United States Patent Application Publication US 2024/0301345 A1 - sequence listing, part 11

SEQ ID NO: 1582 - DNA, 3609 bp, Unknown
  R221_24m  MAG No. k141_37411
atgaagccgccgtactgcttcatgttgtccgcggtctcgtccgggttgaacgtgatcgaggtgtagaagaagcagaagaacacgatcatcagcgcgtacagggcgatgtaccacacggatgtggtgttcgccaggttggcgttgatccacttgacccaggactggtcggacttgccgaactgggcgatcagggtcgggatggcgaggatcgaggaggcgaagatcggcgggatgacgccggacatgttgatcttcagcggcaggtaggtggaggagccgccgtacatcttacggccgatcatgcggcgcgtgtactgcaccgggacgcggcgctggcacagttcgacgaagtcgacgaagatgaggatgaccacgagcacgcccacgacgatgccgaacttggtccagtcgccgttcttgccgttggtgccgtagccgatctcccacagctgcggcaggaagccggagcagatggacatgaagatcaagatggacatgccctggccgatgcccttgtcggtcacgagctcggccatccacatgatcaggccggtgccgccggtcatgatgaggaccatgaccacgaggttccacacggagccgtccgggatgacctggtcgcagcggtagttgaacagggcaccggagcgggcggtgaccaggatggtggtggactgcagcacggccaggccgatggtcaggtaacgcgtgtactgggtgagcttggcctctccggactggccctccttatgcagggcctcgaagcgcgggatgaccacgcgcagcagctgcaccacgatggacgcggtgatgtacggcatgacgcccagcgcgaagatggacagctggagcatagcgccaccggagaagaggttcaccagtccgatgaagttctcctgggaggcgctgccgacagtggccatgcacttgttcaccacgttgtagtccacgccaggggtcggaatgaacgaaccgatgcggtagacgatgatgatgaacaggacgaagagaatcttcttcctcaactctttggtcttcagggcctggattagtgtcctcacctagatttcctcccaatagcgcgccaatcacgcgaaatacacaaactaacgaatgagcatagtctacagtgcctacttcggccacttcatgtctcgcgaatgttacctgaattatgctccgtcgtactgaacgggggaagcatactcaaaacgatcattgtgttgagactgcttctctgcgctcagaacaacaattttttagaaaagggaacccccgtccacctattggcggacgggggttgtacagcctattgcgctccccgtaggactaatcagtcctcggaaacggaaccgccggcggcctcgatcttggacttggcggaagccgaagccttaacacccttgagggtgaaagccacggtggtctcgccgtcgcccagaaccttcaccggagcgttgtcacgaacagcgcccttggcgatcaggtcggccacagcaacctcgccaccctcggggaagagctccacgagacgagcgatgttgatgacctggaactcgaccttgaacgggttcttgaagccacgaagcttcggcaggcgcatgtacagcggcagctggccgccttcaaagcccggacgcacgtggttacgcttcgtctggcccttggcgccacgaccggaggtcttacccttggagccttcaccgcggcccacacgggtgcggtccttcttggcgcccggggcgggcttcaggtcgtgcatctgcaggatttcgttatctgccataatcagtcaacctcctcaacggtgaccaggtgacgcacggcgttcaccagaccacggttggccggggtgtcctcgcggacaacggtcttaccgatcttgttgaggccgagggtcttgacggtggcgcgctgagccggggtacggttcacgatgccgtggtgcagggtaatcttcaggttcttagccatgagtatcactcaccatccttctcttcggcggccttagcggcagcagcctcttcgcgagccttgcgagcctcggcaatgccggcggcacgggcgcgcagcagagcatcgggagcaacctcgtcgagcgccaggccacgacgggcggcgatctcctcgggctcttcgagctgcttgagggcgtcgacggtagcgcgcaccacattaacggcggtggcggagcccatcgacttggtcaggacgtcggtgatgcctgcgcattccatgacggcgcgcacggagccaccggcgattacaccggtacccggggcagccggacgcagcaggacggtgccagcagcgtcgtgaccctgaaccgggtgggtgatggtgccgcggacgcgaggcacagagaacatgtgcttcttggcgtccagctggcccttggcgatggcggccgggacttcacgggacttgccgtagccgacacccacggtgccgttgccgtcgccgaccacaaccagtgcagcgaagctgaaggtacggccacccttgtgggtcttggacacacggttgatggtcaccacgcgatcgagcagctcgtcgccgtggttttcttcacgacggttacgacgctcgccgcgacggccttcaccgcgctggccacgacgacccttgcggtcctcgttgttggattcggtcgccacagtgttctgagtttcttcagccacttgggtttccttcgtttcgttgtcgctcacagtgcaagacctccctcgcgggcgccatcagcaacggctgcgacgcgaccggtgtacttgttgccaccgcggtcgaacacgactgcggtgatgccggcagccttggccttctcggcgatcagctcgccgaccttcttggcggcctcagtcttggtgccttcgaaaccggcgaagtcggcctgaagggtggaggcggacaccaaggtaatacccttggtatcgtcgaccacctgagcaaccatgtgacgattggagcgggtgaccaccaagcgcggacgctcgggggtaccggagatgcgcttgcggatacgcgcgtgacggcgcttgagagctaccttcttgccttttccgagaatagcaacgctcatatcacttaccagcctttccagccttgcgcaggatgcgttcatcggcatacttgatgcccttgcccttgtagggttccggagcgcgcagcttgcggatgttggcggcaacctggcccacgacctgcttgtcggtgccttcgacaaccacgtggttggcgtcggtcaccttcagggtgatgccttcgggcgggttgacggtgatggtgtgggagtagccgaggaagaactcgatgcccttgcccttggcgacggcgcggtaaccggtgccgacgatctcaagagtcttggagtagccatcgtgaacacccttgaccatgccggccatgatggagcgggccagaccgtgcttggcacgggtcggacgcaggtcatcagcggcggtcaggacgatctcgttgccttcaacggcagcggtgatgccttccggaaccacgtaggagtcagaacccttagcgcccttggcggagaagttctggccttcaatcttgacttcaacgccagcagggatggcgatggggagcttaccaata

SEQ ID NO: 1583 - DNA, 2506 bp, Unknown
  R221_24m  MAG No. k141_38430
catcggcaatcttcggcgcctcgtcgccgaatcgggccgccggtccatcaccgctgcggaacgcgccgatcactccacccgccgaaccgctgaccgcctgggccagaccgtcgccgaccttggcgggcagcccgagggattcgagccgcgccggcaatgttccgttgacggccatggccaacgacgcgccggagatggccgaaccgacggcggtgccgagctgtcgaaccgtggactgggtggccgacccttcgccggactgcatgatcggcacttcggagagcaccacgctggtcagctgtgcggaggcgaagcccagacccagaccgtatgcggccatgggaacaagctgccaccacacagagaaccccacaggcataaggaccgcgaccagggcgacggcgatgatctcgatcacaagaccgagttgaatcacgccggccggggtgagcctggcggccatgacatgggcctgcgcacctgcgacgatggaccccaagcccatcacagccagcatcgcaccggcctgcagcgtgttgagcccgcgggcgttgatgagatacaacggcagcatgaacaccagcgcgaactcgccggcggcgatggccgcagccgccagattgccccacgagaacgtcttgatgcgaaacagggtcatgtccagcatgaccggccgaccggctttgccccgcgccgactcgaagacgatgaagacggccatcagaagcgcgccggcgatcaggcagatcggcaccggcgacaaccagtcacgattccagctcaacccgcccagcttcaactgcgttgaggtctgcttccaccagccgtaggtctcgccttcgataagaccgaacaccagcagggccgaggtcagggcagacagcaccacgcccgggatatccacaccgacacgatgggatcgggcatcccgtgcggcatccgcggcgccggcgaccgaggcgttcccaccggtttgcggcaccaggaagatggccgacacaaagaccgcgatgcccaacggcaggttcaccaggaagatccaacgccatcccaaagtctcggtgaacacgccaccgagcagcggaccaagcgcggcggccgaactcatcaccgcaccccagacgccgaacgccgcggcacggtatttgccacggaacagggcggacaccgtggacagggtgttcggcatgatcatcgcgcctccgatgccctgcagcacacgggcggcaagcagcatccccgccccctgcgaggcggcggcgagcgccgaactcgccacgaagatcacggtaccgacttgaaacaccagtttgcgccctctggcgtcgcccaacttgccgaaaggcagcaacaacgcggcaagcacgatgttgtagagcgaggtgacccactgggcgtcggtcagggtaatgccgatgtcgtcgatgatggtggggatggagacgttgacgatcgagctgtcgagcacgatcatggccaatcccagggccatcacccacagcgcgccccacggcggcgcctgggtgggcagcggcgacgaggccgtcggattcgttgaagagatcgaagacgcatcggcctgagtctgatgctgagatcgggatgcatgatccataacggggtttcctctcattgccatgattgcggcgaccgacacgcctatgcgccattcacggtacatccgcggcctagaccgtctcgccggatttcgcgggacattccgggcgttcagccatgggcgtaacctcggcggatcactgaagagaggagcaccaaagacggccgcactattccagatgcgtcatttcgaaatgaaagcccggcagaacgccggaatcgcaacgatcgacaaatcgccagacgatacagggccgggctctcgctcaggaaacagggcatgcccagcgcccatttaccggcgtcggcaatgacggcatcgccgccaccttccacgtctcctcccgatgaccgaatcgctaattcccgcccgccagaaccccattgcatcgtgtagacgggatatgggataatccacaaggtgcttttgcgtaggaccaaggcgccggcgatgacacgggacaaccacaacagcgaatgacgcacaacgggccgtccgggacacccccgtaaacggtcgcgtcgttttccattggtgtcattacggggtttgggtcccgcaaaacgttggaaaatcagcgtttcttgaacggtaaggtaacatatggcagaattcgtatttcagatgatcaaggcccgcaagtcttacggcgaccgcgtgattctcgatgacgtgaccctgagcttcctgcccggcgcgaagatcggcgtcgtgggcccgaacggcatgggtaagtccaccctgctgaagatcatggccggcctggagaccgtgagcaacggcgaggccacgctgaccccgggcttcacggtcggcatcctgcagcaggagccgccgctggatgacaccaagaccgtgggcgagaacatcaagatggcgttcggcccg

SEQ ID NO: 1584 - DNA, 4278 bp, Unknown
  R221_24m  MAG No. k141_38523
aaggtcgactgccagatcatgaacgctttcgatgctgcccaatacggcaatcaggtcggcgggcggcaacttggtttcgatttggatgaccgcgctcatcgcgtccgggccgtcgaaatggctgacatggtagagcggcgaaatgccctgtacctgattgccaggaacactgtcgatggaaacgatggtttcacggaacagccgttcggcatcctgcgaggtagaatccagcgaaataatcgccttgcgtgagacgggtgccgacttcgacgcggattcttgcttgactgcatgcccgccgagcatccagtcttcgctctcgagctgcacggcgttacggtccggcgcggtggccagcaaatcggccacaggcccctcatgggcgccggcgagtttggcgttcggattcaatgccaaccaaggagccagcacaaacgcacgctgccaagcacgcggatggggcaatgccagatccggatccgcgctggtgatgccatcaaagtcgataatgtccaagtccaacggcctggaatcccaatgattctcacgaattcgtccatggttcgcttcgatgttttgcaacgcggcaagcaattcgtggctgcccattgtggtttcaagctccaccacggcgttcaggaaatccggcgtaccgtcagccatgccccacgcggccgtgcggtaaagcggtgagataccggtcacctgtgtgccgagcagcgcgtcaatctcccgaacggcggctcgcaaggtggattccacctcgcccacattgccgcccaaggccaccaccgcgttatggatggcatgctcttcagcagtacgtccattatcggtggcacgcacgcgcgagatggagaccgatacatctgcaaaagccacgacgatgggcgcatgaggcttgtgcacggtgacgtcgatggaggcgacggccggcgcatcggcaaggatcttatccgcgatacgttgggccagacgctcgatcaggtccacatgagggccttcgatgacagccgtgatgtccttggccacacggccgtaatcgatggtgtcgttgagatcgtcggattgaccggctgcggccagatcaaggtgcagggtgacgtccacgacgaaggtttgtggccgttcgtgttcaaaggcgagcacaccgtgggtgccgttggcatgtacgccggtaagtgtgatggtgtccattggtaaggctttctgctcaaatgctctcctcggtcgccttcggagccagctcccctcgtccgaggggagccaaggcctagaagcaaccaaaacagggagccaggggaatcatgcgtattcgcgccaggtgttgccggcgatgacggcggcgcggcttttggccacgtcatgtacgcgcacggcccatgcgccatgttcggcggacagggcggacaaggctgcggtcacatcatcgcgctgggccatgatcggcccatcagcaccggcagcgcccgcctcggtaagcatcgccgagatgaagcgtttgcgggactggccgatcagcaccggatatccagtggcgcggaaggtctcgagtccggtcagcagcggcaggttgtgctcgatgccaggcttggagaagcccaggcccgggtcgatgataatgcgctcaggctttacgccggcggccagcacaccgtcgacttggcgcatgagttcgtcgtgtacgtcggtcaatacaccgtgctcgtagacggaggtgtcttgatcggggttcgcgcccttggagccggcgagccaaccgcgccaatgctgcacgatgtacaggcagtcgtggtcggcgaccacatgcggcagttcggcatccagcgtgccaccggagacgtcgttgatgatctgggcgccctcgctcagcgcagcggcggccacggatgcgcgcgtggtgtcgatggacagtatggcaccggccggaatcaatgtcttgacggcaccggtgatgcgggccagttcgtcggcctcggacacgcgcttggcgccggggcgcgtggattcggcgccgatgtcgatgatgtccgcgccggcggccatcatgtcgcgcccgtgctgggccgccttggccgggtccagccacaggccgccgtccgagaccgagtcctcggtgatattgagcacacccatcaccatggtgtgcgtactgtcatgcaacgcctgcaaatcagtcataggttatctccccttcgttgtttcccttcgctcccctcagtcgcctacggcgacagctcccctcagagaggggagcctaggttgcgtcacttgtcaagaatcaagctcatggcttcggcccgggtggccggattgcgcagcatgccgcgcaccgcagaggtcaccgtgcgggcggaagacttcttgatgccgcgcatcgacatgcacaggtgctcgcattcggtcaccacaatcacaccacgtgcgcccgcatactcgaccagcgcgtcggcgatctgctgggtcagtcgctcctgcacctgcggccggcgagcatacacctcgaccagtcgggcgagcttgctcagccccatcaccccgtccttggcgggaatatagcccacatgggccacgccgtggaacggcagcaggtgatgctcgcacaccgaatacagttcgatgtccttgaccagcaccagttcgtcggtatccacgtcgaagtgcttctccagcacatcggccggggaagcctgcagaccggcgaacagctcgcggcacgcgcgggcgatacggtcaggcgtttccaccagtccctcacgctcgggatcctcgccaatcgacttcaggaacaggcgtacggcttcgcgcacgccttcctcgtcgtatgtgcgtttctcccgctggcaagactctatatattcgttcatctcatctctcccttgtcattgtccacaacgacgtcggcccggcctgtgtacgtgagaaaccacatgaacaggttgggccgaatcgtcatcgtgtctactcttccggcttcatgccgaccgagcgcttgaggctttcgggaatctccaccggcggcttgtccgagtcggggcggcggtcgttggacagccacaccgggcggaccggcgccttcttgatcggcgcgaagatctccgcaagttccttctcgttcagggtctccttgaccaacagctggcggaccagctcgtcaaggatctcgcggttgtcgttgatgatggtccacgcctcggtgtgcgcggtctccaccagcttgagcacctcgtcatcaatcacttcggcggtgcgatcggagtacttgcgcggctgcagaccgtccatcacagtggtctggtcatcgtcggaaccccacttgatggcaccgagcttgtcggagaagccgtattcgatcaccatcgtacgggcgatgctcgtagccttctcgatatcgttcgaggcaccggtggtcgggtcgtggaagacgatttcctcggcggtgcgaccacccatcgcgtaggccatctggtcgagcagctggttgcgcgactgcgagtagcggtcggaggtcggcatgacggcggtgtagccgagggcgcggcctcgcggcagaatcgtcaccttggtcaccggatcggtattgttcagggcggcggccaccagcgcatgcccaccctcgtggtatgcggtgttgcgcagctcttccagagccatgcccttggacttgcgcttcggtccggcctgaacacggtcgatggcctcgtcgatggcgcggttgtcgatcaactgggcaccggcacgggcgcacagcagggcggcttcgttgagcacgttggccagatcggcaccggtgaagcccggcgtgcgcacggcgaccatgtgcaggtcgacgtccggcacgaacggcttgcccttggcatgcaccctcaggatcgcctcacggccttccagatcgggggccgccacgcccacctgccggtcgaatcggcccggacgcagcagggcggggtcgagcacgtcgggacggttggtggcggcgatgatgatgaggttggtgtcgttgtcgaagccgtccatctcgacgagcagctggttcagcgtctgctcgcgctcgtcgtggccaccgcccatgccggaaccgcgcttgcggcccacggcatcgatttcatcgatgaagatgatggcgggggcgttcttcttggcctcatcgaacaggtcgcgcacacgggaggcaccgagacccacgaacatttcgacgaagtcggagccggccatcgagtagaacggcacgccggcctcgcctgcgatggctcgggccagcaacgtcttaccggtgcc

SEQ ID NO: 1585 - DNA, 6189 bp, Unknown
  R221_24m  MAG No. k141_38834
cattggcaaagtcataggacgtggtttcgaggatttcggttcccaaacattcggccaccttctcagctagctcggggtaggcgcggcccgtgaccaatacgagtcgtttatccggagtgccttcaagaatcgccgacatgctttcgcatccttttgtgttgcagtgtttttagccttaaccagtgtactagcaccccaccgcagcgcgtgccgtgaagtggggctgtgttgtaagagtgctgcaatcgttgatgaacatgcggcactgtcccgccctgaccataagataggtaagttgctcacagggcgaagtgcatctgcatcgccctatgattaacacgcatacacactcctgccacggaacgtccgtggccgaatagtccgaaggaggtgggtgatgtctgcgcacaagtacgaactgatgttcatcgccgatcctgagctggatgagcgcggtctgaagaagctgaccgagcagtatctggaactcgtcaccaaggaaggcggctctttcgatgagcccgattactggggccgtcgcaagctcgcctatgagattgccggtaagaccgaaggcaactacgtcgtggtgaagtacaccgccgagcccgctaccagcgatgagctcgaccgtgttctgaacctcaacgaatccgtgatccgtacgaagatccttcgtaagggctgaatcaagcgtttagtcagctgaacagctggtattcaaggtaagtaagaaggaccgttatggcaggcgaaaccgtcatcaccatcgtgggcaacctcactgcggaccccgagctgcgcactattggcagcggcgcgaccgtggcgagcttcacgattgcttccaccccgcgaacctggaatcgtcagaccaaccagttcgaggatggtcaggcgctgttcatgaggtgctccgcttggcgtgacctggccgaccactgcgcccagtccctgaagaagggcatgcgcgtgattgccaccggccgcctccagcagcgttcctatcaggcacaggatggttcccagcgaaccgtcgtggagatgcagctcgatgaaatcgggccctccctgcgctacgccaccgcacaggtgacccgccagtcgtccggtcagggcggcttccaaggtcgttccggtggtttccagggtggtcagcaacccaatcagggctatggcaaccagggtggccaaggtggttatgccggtggccagggcggttacaacggtggctatcagggtggtggcgctggatactcccagcagcctgccgctcccgccaacccgtccgctcctgcggccgacccgtggagcaatgccggtgcatctgatgccggtagcttctccacgttcggcgcttcctccgatttcggcggcggcgacgattccgacccggagttctgatcagtacttacctccccgctgccagcagcaatcaatatcaagatttataaggagaacatcatgtcacgtaagaggccgcaaccgccggtcaagccgttcaagaagaagccgaacccgctgaaggccgccaaggtcaccgagatcgattacaaggacgtcgcgctgctgcgcaagttcatttccgatcgcggcaagattcgttcccgtcgtatcaccggcgtgaccgtgcaggagcagcgtgagctctccaaggcgatcaagaacgcccgcgagatggccctgctgccgtacgccacctcgggtcgctgagttagggaggctttgaacaatggctgaaaccaaggttattctcaccaagaccgtgtccaacctgggccactccggtgacgttgtcgacgtgaaggccggctacgcccgcaactacctgttcccgcagggcctcgctttcgcgtggaccaagggtgctgaggctcagatcaccgctatgaagcgcgctcgtctggccaaggccgtcgccacccgcgaggacgccgtcgccgccaaggccgccatcgagggcaccaccgtcgagatcgccgccaaggtgtccgagtccggcaagctgttcggtggtatctccaacgaggccatcgccatcgctctgtccgacaaggccgcggtgaacccgaaggccatcgaggtcgagaccatcaagaccaccggcgatttccccgccaaggtggccctccacccggagatcaccgcttccttcttcgtgaaggtcgtggccgagtgagtcattccggcctagtgctggaatcacacagaccaagagtctgagcttaagcatcatcccccgtgcggttcgcgccgcatgggggatttttgtattagcaaaaacgccggaaatagacgcgacacgccgagagttgcattcgcttcaaatctgagtatatttatcacctgttgcaaggaacacttcaacatctaaccaagcccctgtagctcagttggttagagcagctgactcttaatcagcgtgtccagggttcgaatccctgcgggggcacagacaaccggaatcgaaagattccggttttttgttttttccagcatcagtccgtagctggtgcggaaaggccgtcttcgcgcgtgacggccggacgtgtaaggagcggcgtcatgtctcagatattcgcgttcaccgtatccgaccccgaaggcatgcacgcccgcccagctggccggttggttgccaaagcgcgggaatatgagtcgaacatcaccgttgcctacggcggcaaatccgtggatgccaagcgtatcttcggtgttatgggacttgatgttcaacaaggtgacgaggttacggttcgggtgcagggcaacgatgaagctgtcgctgccgcagagttcgagcgattcctcaaggagcacctgtaatgagaacgatacagggcgtcggcgtatccgctggcattgctatcggcacggtccgcgtgctcgccgccgccgatcatgctgtagaacgccgcgtaatcgacgatccgcaggctgagatggatcgattccgcgcggcccgtgacatggccgtcgctcagctcaagcgactgcgtgacaacgtcgccgctgagttcggcgaaaacaaggccgagctgttcgacgcccatcggcttatgctccaggacccggactatgcgggatgcgtcgaaggtttgattgcgcaagacaaggtgaacgccgaatttgcggtgaagagcgtcgccgaacagttcgccgccatgttcgctgcgatggatagctcgaccatgcaggctcgagccgctgatgtcgaggatgtttctcgccgcgtgatgaacgtgctgcaaggcaaacgcgatagcacggcgcaggatggcagtatacaaggcgatgctgtgcagaacggtactgtgcagaacgggattgcgcagaacggcgaaagccacatcatcttcgcccaagatcttgctcccagcgagaccgcgcagctcgaccgcgctaaggttttgggcctcgtgaccgccaagggctcagcgaactcgcacaccgcgattctggcacgcacgatgggcctgcccgccatcaccggtatcggcgacgccttcgacccgactgatgacggtcacgttgccgtaatcgacggcgccagcggtgcggtgttcgtcgacccggacgaggccacgctgaccgagtgccagcgcaggaaggccgaagctgaggaacacctgagcctactacggaagctcaaaggcaagcccaccgaaaccaagtccggtcagcgggtccacctgtacgccaacatcagccgtccctctgacgtagccgccgtgctggccaacgatgctgagggcatcggcttgttccgcagtgagttcctgtatctggaacgcgaggactggccgaccgaggaatttcagttcgatgcatacagacaagtcgcacaggagatgggcgaccgtccggtcatcatccgcacactcgacatcggcgcggacaaacaggtcgactacttcaatctggaccacgaggataaccccgcgcttggttaccgggcaatccgcatctgcctgacccgcccggagattttcaaagtccagttacgcgcattgttgcgcgcctcagcatacggcaatatcgccattatgctgcccatgatcacctcggtgcaggaggtgcgcgacgccaagcggattcttgaagaagccaaaagcgagctgcgcggcgagcacaccgacttcaacgagagtatccagatcggcgtcatgatcgagacgcctgcgtcggtcatcatggccgacgagctggccgccgaagtcgatttcttctccatcggcaccaacgacctgacccagtacacgctggcctgtgaccgtcagaccccgagtctcgaacgctttgccgacccgcattcaccagctgtgctgcgcatgatccagatgactatcgaggctgcccatcgtcatggcatctggtgcggcatctgcggcgagcttggcgcagacctgagcctgaccgatacgttcctgtgcctaggaatcgacgaactgtccgtctcgcccaccagcgtcctacccctgcgcaacgtcattcgcaaccactgagagtcaaggtcgcttcggctgattccggtggcttttttgggcattgcattcggctggacattcgacatcgcatcctgccagcatttcgtcgtggggcaaagtgtacaatcgccacgtttgctttcgcgcccagcgtaaatcgcgtcgccggctccgcgaacggatttccaatcacacagaatgccgtgaacagtcagccatgcctgttgcgcggcgaagagaaaagaagaagcagtggaatactctctctttaccaagctggccgccgagttcttcggcaccgccattctgatgatcttcggcaacggctccgtggccaacgtcgagctcaagaacaccaagggtcaccacgccggctggttgaacatcgccatgggctacggcttcggcgtcatgttcccggtgcttatgttcggtagcgtctccggcgcgcacatcaacccggccatgaccatcgcccaggccgtcaacggcctgttcccgtggagcgacgtgctgccgtacatcgtcgcccagctgctcggcgccctgctcggccagttcatcgtctacctgacctactacccgcactacaaggagaccgaggacgccgacgccattctcggcaccttctgcaccaccgacgcggacaaccagaaggtcaactacttcctcaacgagatgttcggcaccctggtgctcgtcttcggcgccctgtgctgcctgtccctggcttggggcaagcaggattacgccgccgcctccatcgtcgtcggcttcattgtgtggggcctcgtgacctccatgggtggcccgaccggccctggcctgaacccggctcgcgacctcatgccgcgtctgctgcacgccattctgccgatcccgcacaagggctcctcccgctggggcgaggcctggatcccggttgtggccccgatcgtcggcgccatcatcggcgcttggctgttcgtgttcttcttcgccagctgattcgttgattgattcatatatgcaaatggcctccgctcgttttgggcggaggccattgtcgttgaatcaggtaaacgcagaggctactgctccaggaacacctgcggggccttcatgaagttcgtggcgcagtgctcgccgcagaagtagtagaacttgccttcatactcgcgcgtgatcgcgtcggcgttcaccgccacggtcatgccgcacaccgggtcggtggcggtttcgccgtcggtcggggtgacgtggtgcatgtgcattcccatatccatagtgttctccttgttggttggattattggattggtcagatgcgtgattggttggattcagcgtggtgcgatcgtcgatgatgacggttggctcgtgaggcgcgttggatgtggtggagccggtgatgttggcggcgttggctgattcggccgatccggctgattcgatatccgccgtgctgttgcccgagccagcggtgccatcgacaacgcccgcgttgatgttcgccctatgcagcctgttcgcgttcagcaccaggcacactgagctcaacgccatcgccagacccgcgatcatcgggctcaacagccagccggtgaacgggtagagtgcgccggcggccaccggaatgccgatgacgttgtagccgaacgcccaccccagattctcgcggatgttgcgcatcgtggcgttggacaggttgatggtcttgatga

SEQ ID NO: 1586 - DNA, 3513 bp, Unknown
  R221_24m  MAG No. k141_38892
aggatcggcgatgaacatcagttcgtacttgtgcgcagacatcacccacctccttcggactattcggccacggacgttccgtggcaggagtgtgtatgcgtgttagcccatgacgcagcaccaaaccggcaccgcatcttcgggcaacttggacagtctatatataaggcgggacagggtatggccatattcctgccggtttcgcgatgcccaccattttggccaagcccgcgcagccaagcccgcgcgccatcacccagtattgtccatttcgagcctcgccctatggtcatggcgctgattttgcgggtacgatagtgctcgaagaagcatcagaagaaagggggactatatgttctgtcctaattgtggcgcagctgtgcgcgaaggagcgcaattctgcggttcctgcggcaaccatcttgccgcggcgtcagctccagcagcagcgacgcccgccgcacccacgcccggtcaacccaccggcgccgttcccacgaccgcacagcccgcggctcccgcaccatcgattccgttgcccggcgcagcggctgtgcagccgacgcctcagcccgctgcacagccgcaggcccagcccgcaggcggaccggcattcaccgcaccgaccacggccattccgaacccagggcagcccggcccatcgccggctcccgccgctccggcacaacccatctcttccagtccactggtcaaggaactgttcggcgcccccaacatgcagaccatcggcattgcggccggcatcggtacggcagccgccttggtgctttcgattttccctgcaatcgcaatgaattccatgagcaccgcagcacccagcctcggggccgattcaacactgaaccaagccgttggcggcatgttcatcaccggcaacggcatgaacttcttccactacctgttcctatcgttggtcatgggcctgtctggcggtattcatttcgacatcgtcgacctctcatcctccagcatggacgccagcaacatgatgtcgtacccactggggctcaccggcttggcattgctggtcggcaccgcattcggcgcattcatgctgggccgttccaagagcattcgattcaagttcaccggcctgatctccggctttatcaccggattgctgccggccgtggtcatcacgctgcttgcggccatcgcggcggcaccactcgccagtggcaccaccatcgtggccaaggtgaccggcgccacagtgcgtacgttctttatggcctacctgctctccgcgctcggcgctctggccggctatgcactggcccaatatgcttccgattccaagaatgtgttcggagctacttggcagtgggcacaccgcgttcgcggatacacgcgcacggtggtcagcgtcttgagcttccagctggctttgctcttcatcgtcggcctggtggccctgttcgccgtggcattctcctcaggtcagggaatcctgatactgacgttcccggtcacactgctgatgatcggcgagttcttctttacctggggaaccttcggcgccattacactgaccgagtccggtcagctgccgcaggatctcagcctgttcagcatcaacctcagcgttaccgtatggcctatttggatcctgttcgccgtgttcctggtcctcaccttctacacggcattgcgcgtctccgcacgcaacctgtacgaccgtgcctacatgggctggcagcactgctggaaagccccgatcgccatcatggtgttctgggcgattgccacgctgctgatgggtactatgggcaaccgcacctccgtcacgcaagttcagaccaccggacctgccatgtggtacttcctggtcatgggcctgtgggcattcctggttgaggtcgttgcactgacgttcggcccgaccatggtggtttccatgccgggactgcgggccctacttgtaggcggcactgtgcgtgccacgcctcagcctgtggtcgactacatctatgccagcggcgcaatggtcggcaagtggcccacgtggggcacgccaagcgccggcgtgggtacgggcgcaaacgctgcgcagcctcacgtcaacgtcacgccgacgtccgccggccagcctcctgttgctggtgtcggtgtacccgcgcccgctgccccgggtgctccggccgcccctgcaacccccggtgctccgggcaccacattcgcaaccgcggctcccaccactcccggagcggcaccggtagccgcacctggcgcgacctccaccaccatgaatgagcagcagaagaagatcttcatcatcgttggtgccgtggccggcttcctcgtactgttcggtatcgtgtatggcgtgctgtcttccgccgtgttcagcgcgaagagcgtggcgaacagctatgtggccgccatctcctccggcgactacgacaaggccaacaccatcgccgatcctcacgtggatacgaaccagcgcgcactgctgaccagcaaggcatcctcgggcgagaacacgcacatcaccaacgcgcgcatctcgcagacttccaacaatgccgatggcaccgtgagcgcccagctgacgtacacgcttgaaggcaaggaggtcaccggcgattccatcaagatggtggccaacggcagcaagttcctgatcttcaagaactggaccgtcgccgaaccgttggtcaagaccatttcggtatatgcgccaagctcgctgggcagcatcaccgtcaatggcgtgaccgtaacgcccaagaacgccgtgaacaacgacgcggacgaaaccggcaactaccggctcaaggtgtaccccggcgtctacaaagttggcgtggtgaagtccgactattacaccgccaagaccgtgtctctgagcaccaacagctccgatagcggcactcttgacgctcagcctacggacaagttgacgtcggaaatcgacacggcggtgaagagcaagctggatgaatgcgcggcttccaccgatgcggaaccgcagggctgcccgttcagctactacacctccaattccagccgataccgcaacttcaagtggacgattgacggttatccgaaggtcaccagcgtgagcctgtcggatagctcgttcaacaccgacgaaggtgatgtgacggcgaattacgagtaccgttacagcgatggctgggaaccggaagacgattccagcactttctcggtgtacggcaccttcaccatcaaagacaataaggtcagtgtcgagttctccgaataatttcggcaatctcaacactcttacgaaataggcaccccgccgtggcgttcgctgcggcggggtgcttgtacactggttaaggcgtaaatcacacagcgactcaaacaaaggatgcgaacgcatgtcggcgattcttgaaggcactccggataaacgactcgtattggtcacgggccgcgcctaccccgagctagctgagaaggtggccgaatgtttgggaaccgaaatcctcgaaaccacgtcctatgactttgccaatg

SEQ ID NO: 1587 - DNA, 2587 bp, Unknown
  R221_24m  MAG No. k141_39516
accgggcggcgtcttggagagcacgtcgcgtatgaaacgcaccatgcaccactggcatctcgcgttcggcagcatcgagtcgaccgtggagacgagtccggcgcaccggtcgccgaccaccagtccgacgcccctcaacccgcgtccgatcatgcttcggaagaaccgctcccagccggccgcgtcctcgcgcatgccctcgtcgaccgcgatgacctcgcgccggccctccgtgccgacgccgatggcgacgaggacgcccgcgttctccacgtgcccgccccacagcagccggccggtgtcgtccaccctgcgtgtgcccacgcccgcgaggtacatctccatcagcgcctcctcgacgctggattcgcgcctccggcagcgctcgatcaccgccgacccgaacagggcgcccttcaattcaggcaccttgagactcaacttgccggccttggcggccagcgtgcgcccgtagtggccggcgcggaacgccttccggccggtcctgcgctcgtatccggcggcgttggcgatctcgtcggcctcggcgtcgagcatggcgttgatggtccgctcgaccttctcgcgcgccatggcgtcgagcttggactcgaacattgccggtgttgcagaatcgccgttttgccgatccgcagttgtgtgactgacctctgaataactttactagcgctgttgataagggttctatgatgggaatcatgaccactactgttgatagctctgattcaatgcctgaacgtctgcaagaggggagcgcggcgcccgatttcactctgccggcggttatacctgggtttacagagagcggatcaatcaacctgtctgacgtgcttgatgccggccgcagggttgtactgtacttctacccggccgcgatgacgcccggatgcaccactgaggcttgtgattttcgagataatcttgctcggctggaatcgcagaatgttgtggtgctaggtgtgtccaaggattcgcttgacaaactgcgcaagtttgccgagcgtgatcatctcacgttcccgctgctgtctgatcccgacctgaccgtgcacaagctgtacggcgcatacggcgaaaagaagctctacggcaaggtgcacgtaggcgtgatccgctcgacgctcgtcatcaatcccgatggctccgtggcgattgcgcgctacaacgtgcgtgccaaaggacatgtcgattcgctgttaaaggcactggagaagttggagaagctggagaagtagcgcgttctcgttgctcgaacacagtggttcgtgcatagcagttccgtgcggtatgtgccgcatgaatcactgccatatgaaccactgccgtatgaaccaccggttgacttctcggactcaccggcaaatagtgagaccgtgggcgcgcagtacgtctatggctggcatgtaatcgagcgatgttgcggtgggattgagcatcagttcgcggagggcggcggatgctgaggactcgcttgtctgcgaggattctgcggccgggaagagagcgtcggcgattagggagatgatacgggaacgtgcatcgccggcattggcattgttgctgctgttgccggcgtcggtagtggcggagttgccaatagtagcggagctgttttgtagagtcgtatccaacgctgtgacaagcggctccaggttgttctttgtcgcctcggcaatgtcatcgagctgatcgaataaggcgaacagccatgcacgacttcgctcctcatcgttgccggtcgcaagcctttcattggtgacgcgcacgagttcgtcaatcggtactgctggcgtctttgccggatcgcgatgctcacggttgtcttcgatatcgcccataagatgctggatttcgcactcgtcctgcaatacggtggtctcggcaaatgcggtggcggtggcgtccgcgtcgatgaactttcctccctcggactggaaacgcacgcgcttgggctcactgtaataatgcgacatgccgaatgtgatgtactgaggcatctcatcctgcaattgcttgaccgcttcggccaccttgcgcatgtccgcaagctgctgatgcaccacaataaaggcaagcactgctttggcgtcggcgagagtgagcggctgaccgatgctggctccatgatggtgctcatgatgcgcgaacatgttcttcagcgaatcaaacaatcccataatgtcctccttcggactggggcacaatcggctacatctgccgcttactgtagtcctgaatatgtgggaatggtccatggaacgccgagagcgaatattgacgaatgcgtgtgctgagttcttttgacttagatgattggaggaataactgaggaaatgaataacccccagcgattttaaaaagcacttttgcatgattagcgaggcaaatcctctggtgaattgagattttggctcactgataggcggtcggtgaagtgttcctacggttgagtcgagcttttgcttcgctgagcagtctcagtggggcaaatcttcggatgggccaaggtattgctttgctgagaggccgcttagcggggcttttcctctactggctctctgggttg

SEQ ID NO: 1588 - DNA, 23826 bp, Unknown
  R221_24m  MAG No. k141_40695
cgttcttgcgcacgtaggccaggcgttcggcgagacggctggccgcgtagatcggcagcggcagcagcaccttggtgtcgtcggacgcatagccgaccatgagtccctggtcgccaccgaacgtgttggacgcctcctcgcggctcaccttcgtgtcgtcgccgtagttgccccaggcgccgccgtcgttgctgtcgaattcgcgcggacagatgttgttgatcacgccggcgccttccgggtcaaggccgctggcggcgtcggtgtagccgatatcggcgatggccttgcgcacgatggccacatggtcgagcgtcctgggtgccgacacctcgccttcgacgaccacgagcccgtccttggcggacgtctcgacggccacgcgcgagtccgggtcgacctcaaggtaagcgtcgagaatcgagtcggagatgatgtcgcacaccttgtcgggatgtccttcggtcacggactcggaggtcagcagtctggtcattggtggttccccttctggtttgattggtggttgctattggttggttattggcgttcgtttgattgacggatgattgccggcggccgcccaccgggcctcccccgaagtccggccggccgatcgtccagaacccggtcagaacgtggcgatgaagcgttccagcgcttgttcgccgaagcgcagcgcctcgatgggcacgcgctcgtcgatgccgtggaagttggcgatgtagtcgaatccctcgggcaccttgagcgggatgaatccagccacctgaacgttcgggttcacggagagcaccgccttgctgtcggtgccgccggacgagaggaacggcagcacctgcgcctcggggtcgagttcgccgagcacccgttcgatgccggtgaacagctccccgtccggcgcggacaggtagcctttgctgcggtggatcttggccacgtccacgcggtcgccggccagggtcttcagcgcgtcgagcacgtcgtcctcctgcccggacagcgcacggccgtccaccagggcgctggccttgccgggcacgatgttcacggtgctgcccgcgtcgatggaagtgacgttgaaggtgttgcgcaccgaggagccgacccaggctttggcgaatccggtggcctcgatgagctgggccacgtgttcgggcgagtcggcaggaatgccggtgagttcggcgagccggtcaagcagcagccgggttacggagttgagcgccaccggccactgatggtcggcgatgcgcaccgccgcgcgggcgatatgcaccacggcgttgtccgggttgatctgcgagccatgcgactgcgtgccgcgcgaggtcagggagaaccattgggtgcccttctcccccgtctgcacgtagtagacgcgacggccgttcacgctgccggagaatccgccggtttcgctgatgatgtagcccacgccgtcgaagacctccggacggttcgcggccagccattcggagccttggaagccgccggcctcttcgtccgcgaacagcaccagcttgatgttgcggcgggggcggatgccggcccgggccagggaacggacggcagcgagcgtcatcgccaccatgttcttcatatccacggcaccgcgcccccagacgcacgccgtgccgttgtagtcgcggatgacgccacccagcgggtcgacgctccagtcgtcggcgttggccggcacggtgtcgagatggccgtgcacaagcagggacggcagcgtggggtcctcgccggcgatgtccgcgatgaggttggcgcggccgggcttgctttcgatgatgatggagtcgatgccggcctcggccagtcgctcggcggcccattcggcggccgggcgctcgttggtggtgccgctgccatcgttgcgggtgtcgaatcggatcagccgctggaggaacgcgacggtttcgtcgccggcatcgatggcgtcggcgacggcctgtccggcaacactttcgacgttctcgacgctctcgacttttaccgcagtctcgttcccgagcacgtccgcatctactacgctgatggtcaaagcgatccccctgtgtgatttcccgatgatgttcgccggccgctctcccccggtcgggcggcaggcgatgtgttgaattgactcgaatcgtatgggatgccggcagcctcgtcaaacggcaaaaccctcgcgtttccgccgttttggggtataagcaaaatcatgaatgggtgccattgcggccccagcgttcacgtttgcggccgcccgcccaccgcgctataagctcaccggtgggccgggtataagcaacgggtatacggccgattccggatgccgacggcccataatcatttcattgatgccatcataagttttaccgatgggttgcacggaacggcttcgctgcgaacctgatagattgtgagccacatggaccggccggggatgccgggaatagggaccagcacggttcccaccgttatcgaccacataaaaaggggaattcatgtctgatcatcaattcgacacggcgcaggtgcatgccggtttcgacccggccgccaacgccgattcggtgacgccggtcatttactcgaacgcggcgttctggctggagaattcgcagcgaggccatgacgtggccaatggcgatgtgccgggcttcctgtattcgcgcgtatccaatcccacggtctcgttcctggagaagcgcatcgccgaactggatggcgccaaagaagccgtggcggtcgcctccggcatggcggccatcacctatgcgctgctcaacacggctgagggcggcggccgtattatcgccccctatgacgtgtacggtggcaccttcgactcgctgcgcacgctgctgccgcagttcggcgtgaccacctcgtttgtggagaacatcaacgatctggatcatatcgagtcgctgatcgagcagggctcggacggcgagggcggcacggacgtcaaggtgattttcgcggagtcggtctccaacccgaccaccgtggtcacggatgtcgaggcgctggccgaactggcgcatcgccacggcattccgctggtcatcgacaacacgctgcccacgccgtatctgtatcgtccgctcgaacatggcgccgacatcgtcgtgtattcgactaccaaggcgctgagcggccatggcaacgccatcggcggcgtggtcacttccggcgattcgttcgattgggccaatggccgctacccgcagttcaccgcgccggagtacattctgggcgaggccgcgggccgtgagccgcgcagcttcgtcgaggccgcaggtccgctggcgttcatccgccgtctgcgtctgaagtatctgcgcctgaccggtgccgtgctgggcccgtttgaggcgtatctgcagctcatcggtctggagaccttgaccgagcgcgtgtccaaggagaccgcgtccgccggcaaggtggccgcgtatcttgccggacaaaggcatgtgacggccgtcaactatgccggtctgcccggcggcgcacagtcggaactggtggccacgaactatccgaacggcatcggctccgtgctgtccttcgagctggagggcggccccgaacagaccgccgcgttcatcaaccaggtgaagctgttccgttatctggcgaatatcggcgacgcccgttccctgatcgtggacccggtgaacaccacgcaccgcgagttcaccaaggaggcgcgtgccatcgtaggcgtgggtcccacgaccatccgcctgtcgatcggactggaaaacccggacgacctcatcgccgatctgtcccaggcgtttgatgccgtgtatggggagtaatcacatacggcacaagaagagggcggctgccacatggcagtcgccctcttcttgtgccgttcttggctcccctcctgaggggagccaactcacttattatttattcctcaccttccctgtgcacatcaaagtgcagtttggtcagcagcagtttgcggtaggcggcgaagtcgtcggatacgcggtcgcgctgggccaggtcgatcggcacgatctccttgatgcggcccggacgcggcgtcatgatgaccacgcgattgcccaggtagatcgcctcgtccacatcatgcgtgaccagaatcatagtcatgtggtacttctcccacaagtcgagcagtcggtcctgcagatcggcgcgggtgaacgagtccaaggcacccatcggctcatcgagcagcagcactccggggtggtcgatgagcgcgcgggcaatggccacgcgctgggccatgccgccggaaatctggtgcgggtaggcgttgccgaacccggtcagccccaccttctccagatactcgccgacctcgtccttacgttccttgtacttgccctgggccttcagtccgaaggcgatgttctcctcgaccgtgagccacgggaacaggctgccctgctggaacacgtagccgcgttccgggttcggcccctcaatcgggcggcccttgaacgtcacctcgccgcgctgcggccggtcgagtccggaaatcaggcgcagcaacgtggtcttgccacagccggaagggccgatgatggagatcagctcgcccggtcggatgtccagatttacgtcggacagagcctgggtgaccgagccgtcggagtccacgaagtcgcgttcgatatggctgatgctgataatcgggttcgtggcgttttcggtgtccacggcattgcccgccgtcgccgtcgtttctgcgattgcagcgctcatttgaccagtccctcctgccagcgcagcacacggccgcgcaccagttcgatgagtttcataatcagggagaacagcacggccatgatgacgatcgccgcaaggatttcgttgtaggcggaccatgccttcgcctgatcgatgtagtagccgaggccgccaggctggcccatcatttcggaaatcacgagggtcaggaacgagaggctgttggccatgccgatgccggtgaagatgctgggcatcgagtgcggaatggccacatggaacaggatgtagcgcgtgtccgcgcccaacgtgcgcgaagcttcgacaagcatcttcggcgtgctctggatgccctgcgcggtcaggaaggccaccgggaaccacgagcagatgaccagcaggaacatggcggcaatgaacggcgtgggcatcagggtcagggcgaacggcatccaagcgaccgccggaatcacgcccgtgatcttgagcaccgggaacacccagtagtaggcgcgggcgaaccagccgatgagcacgccggtcaccacgcccagcaccacaccggtcacgaatccggccgcgaacaggcgcaccgaatagaacgtgttgagggcgatgtagctgccgtcggtcaggaacggctccagcacctgggaggggccggggaagaacggctgcggcaggacctgcagtttggtgccggtgacgtcccacagagcgagtgccagtccggctgcgaaccggaattgggcgcggtagcggaatcgagccgcatccttgggattacgggcgtcgacgatgccgatgaccacgtacaccagtgtcaacacggccagcagcgtcagatacagttcctggccgttgagcaggaagatccagatctgcccttgcttgaactcgacgggggcgctctgcgggaagatcacgttgacgatgacggcgatgacgaccccggccgcagtgagcgccaccgcgaacggatacggcaggctccgcgcggcgcgctggtcggcggccggccggcttacggcctgtgccgtcgcctccgaatgctccgctacgggatcggcggcggagacggatgccgcccgcgctgattgcggacgtgccgggtcccgcgtttcgagccttgcggccgaacgcggctccacaaggttggcggtgatactgctcatgggtggtgttccttccgatgacgaacgatgaacgaacgaatgatggtgaatgagaaatcgaaatcaatgcggtccctgcaacaacagggcggacggacctgaacaggaccggacggtcaatgccgtccggccctgttcaggtcctaccgtcataccattgatgcaatcggatggccgcgggccgcgatcactgatcaatcttctggtaggcctgcttggcaaaggcggacgggtcgttggtctccaggaagccgatcttcttcagtccttcggagaagtagtccacgtcgctttcgatctgcttggcctcgtcgggctgcacggcgtagtcgtagtccttgaagagcttgacgatcaggtccttgtcgttgatggtggagtacttcttcgccatgatgatgtcggcggactcttcaggatgctgggcgatgtagtcgcgggccttgttgagggcgcgcaggatggcgctcatctcgtcaggcttctccttgatgaccttgttggagccgtagaggaagcagcagaagcgcttggcgaacttcgggttcttgccaaggtcgaagatgatgtcgacggtgcccttggcctcctggatggtgggcagcgggtcccacagggcggccgcgtcgatctggccgttctgcagtgcctcgaattcgaggttggcgtcatcgaacggcaggtacttcacatcgccgttcttctggtccacgttcaggcccgcgtcgccgagccacaggttggcggccatgtacggggtgccgccgatctcatcgacgccaatggtcttgcccttcaggtcctcggcagtcttgatcggcgagcccttcttgacggcgatcttgatgcagcccttgtgcagggcgcccaccacgctggtcttcacgccctgctcgatggacgggaagaattggaagtcaccgttggtcactgggaagcggcccgtgtcgaggcccaccttgcgggtttcggcatcggccgtgaccagcttggcgttgatgccctcatccttgaagaatcccttctccagggcgatggcgatcggcgagctgcacagcgagctggacttcgggaattccacggtgccgtacttgtagtcggcggtcttggagttggagttgtccgtggtggtggacgcagcattgctgctgctaccggtgctgatgccacagcctccgaacgtcaaggtggtaagcagtatgccgaagatggcagtggctttcatggtaagacgatgctcggtaagcatttcgccattcccctctctgagccaccccgtctcacgccggggtacagaactccccccgaaatggctctctgtgtggtaacgcttgggagcgaaccgctcccgttcccgccatcgtcatgtctcatacccaaccgattcacgccctgcgcggaagtactttcatcgtagacccccgagtctcaggaaccgcgagatttcaacgttttggggttctggatatccgatagggcgatatatggccagcttatagcgaagaggttttctatcaacctggcttataaccaggctgatagccagatcagtcgctccccaatgcggccaatgtgttcacaacggaggtggcgagcagatcggcgccgtcggcgagcgcatcgagtttgacatagaaggtggggccgtgcatggcacggcccttgttgcccacgccaatgcggaagaacgcgcccggcgccctgtccagataataggagaagtcctcgccgccgagtgtggcgttcggtccggtcacggtgagtccgaggctttcggcggtggaggccacgagcgccaaccaacgtggatcgttgatcacggcgggcgcactgtcctcccagatgaagtccacggtgacgccgtaggtggcggcgatgccttccacgatggcctgaacgcgattatggattatcgcgcggtcttcggggaacgcggtgcgggcgggcggcatgcgtgcctcggccgtggatggtgatgcggaatttgttcaccgcgccggtgttgatcacggccggcaccggtggggttgcctgcggtcccgcgggattcctcggccggctggaagatgagcttcaccgtgccggcgaaccggttgcggcgtccctgaagcaagagcacggctccgaaggcggtggtcatgttgtagtcatggccgcacccgtgcatgtatcccggggtttcggaagcgcacggcagcccggcctgctcctgtatgggcaggccgtcgatgtcgccgcgcaccgccaccacatgcctggcggcccggcaccggctccgcggcggggtccgccgtgccttgcatgcgtgacaccaagccggttttgagtcccgtgtccaaaatttcgatgccgtgcacggtcaggatctccttgatgcgggccgtggttttgacctccccgtacgacggctcgggatgccgatggaaccaccggtagtattcctcaagttccggctgcagcccctgcactcggttgtgttccttcacggacatatccgctcctccctatcgattttcattcggataccatgccgttcacccggatatggcaccatatgcgcaggtggcccgcacgattggattcgtgcgggccacctgcgatggttttgcttgaaattccagaccggcttccctgtccgtcagacctggcccgacctcatggttgccgagcgcggtcgattggataatcggccgatatcaggcgatcagcttggaaatctggctgtcgttgtcggcgtcgatggtctgcttgacatccagcggcagggcttcgtacgctttgtcgagggcctggccgaggtcttcgaccaaatcgtcgacgtcctcgataccgatggacagtcggatgagctcgtcggtgatgccgaccttgaggcgttcttcgcgcggcagttcgaagtgggtcatgcgggcgggcagttcggcgagcgattccaccgcgccgagggagacggccaggcgaaacacgtgcaggttgtcgagcaccaccgagggatccacgccctccttgacctcgaagctcagcacgccgccggcacccctgagtcccttgaccgtaagctcgtgctcgccgtcctcgcccaggcccggatagtgcacgctggccaccagcgggtgcttgagcagatactgggcgatggccttggcgttcttctgctggcggtccatgcgcagggccagggtctggatgccgcggcgcaccgcgtcgcattcggccggagccagaatgccgccgagacggttctgcgcgaagtagatgcggccttccagatcctcgctggaggtgaccacgaggcccgcgatcacgtcggagtggccggccaggtacttggtggcggagtggatgaccacgtccgcgccgaggtcgagcggctgctggagatacggggtcacgaaagtgttgtccacgatcaccagagcgccgtatttgtgggcgatggcggcgatgcggctcacatcgttgacctgcagcagcgggttggtgatggtctcgaagtagacggcctttgcgggggcggtgtcgccgttgccgctgatggcgcgttcgagacggtcgaggtcgccggccgtgttcacggtggtgacctcaagaccccaacgggtgaagtggtcgttcaactgcgagtagctgccgccgtagacgttgtcgccggccacgatgcggtcgccgggctggaagatggagagcacggcgtggatggcggccaggccggaggagaaggcgaagccgcggcgaccgtgttcgagctgcgcgatctggtgctccaggaagtcacgggtcggattgccgctgcgcgcgtaatcccagcgcggcacggagtcgaccgaggggaaggcgtacgtcgaagagttgtagatcggcgggttcacggctccagtgtcgttgtcgtcgaccggcagaccatgaacgagctgcgtgttgaaccttgccataattgtccccttatcagtaggttgaagcgtggtggcggcacggcgggcggtctcggccgacgccccgtgcggcatggttacgaccataatgcaaaagcccatcgcctaccacggcgttgctatatgggttggttatggatgggtataagagcggaaaccctctaccccggctgcccgagtccatgccccgactcaggcactctttattcgtattgttctcaccttttccggcgtatacgaacgggccggcaccgaatgtcagcaccggcccgtcaatggcagtgttattggatcaggcgaacacccccgaggtcaactggttgaatacgtccgcttcagcatagttctggaggtaacgggagcaggcgatttcgaaggcttgatcaaggtcttcgataaggtccactgcatcctcgatgccgatggcgagacgcacgagttcgtcggtgatgccgatcttcaaacgctcctcgcgcggcagttcgaagtgggtcatgcgacacggcagttcggcgagcgattcgaccgcgccaagcgagacggccagtcggaacacgtgcagattgttgagcacgtcggccgggtccacgccaggcacgacctcgaagctcagcacgccgccggcgcccttgagtcccttggagtcgagcctttggtcgcctgcaccgggcaggcccggatagtggacggacttgaccagcggatggaccagcaggtaccgcgcgatggcattcgcattctcctgctgccggtccatgcgcagggccaatgtctggatgccgcggcgcaccgaatcgcattcagtgggcgccagtacccctccaagacggttctgggcgaagtacacgcgattggccaaatcctcaccggagacgaccacgagaccggcgttgacgtcggagtgaccggccaggtacttggtggcggagtggattaccacatccgcgccaagggaaagcggctgctgcaggtacggggtcacgaacgtgttgtccacgatggacagcgcaccgtaacggcgggctgttgcggagatggcgcgtacgtcgttgaccttgagcagcggattggtcagggtttcaaagtagacggcttgcgcaggcgcgatgccgttcgcgcggtcgcccttgacggcggcctccaacgctgcaatgtcctgggtattgactgactcgaccacgacgccccaacgggtaaagaactcattgagctgcgaatacgacccaccgtaaatgttgtcccctacaataatacggtcgccgggcttgaaaatgctgagcacggcatgaatcgccgccaagccggaggcgaacgcaaaaccgcgcgttccctgctcaagctgggcgatctgctgttccaggaagtcacgtgtgggattgccgctgcgcgcatagtcgtagcggggcatcgcgtcgaccttctcgaaggcatatgtcgttgagttgtagatcggcgggttcacggctccggtgttgttgtctccaaccggcagtccgtggacgagctgagtattgaacctggtcattgcgcaccccctttatggtgttctctatggctgctgtgcacgaggccgttccccgtgcggcacgtctacgacgataacgtatcggacacttgaatggaacggcgttgctatatgggttgcttatggaccgttcaaatgcggtcgcggcggtcacgtggctacactgggagccatgaagattgccaaggccttgacccgtttgaccggtcctgaaaccaccccggtgttcgtgctgttgcacggctggggttccaatgaatacgatttgcccgatctgctgaactattgcggtgccggttcggctgattatgccagtttgcaggcacccatcgcctatggcatgggatatacatggttcggtgcgtgggcgcatgaaggtgtgccggagggcgaatcattggacaagcaggcggctgaggccgcccaagccattgatgcatgggttgcggagcatattcccgccactcggccggtggttgccatgggattctcgcagggcggcctcttggccgcgcatctgctgcgtttcaatccgaaacgatatgccgcagccgtctcctgctctggatggctggcaccggggtccgttgcgggcgatgccgaattggcttcgttgaagccgcccgtgttctacgggcatggtgctgcggacgacatcttcccgaaagccgatgtgacggcgatgggtgagttctggcgcgagcacggcacgttgaccgaacaggtgtatccgggcatggcccattcgatcaatatgccggaaatgcgcgatattcaacggttcttggaggccaacggattcattcggccgcagatttggtagtcaccacctcacatggcgtagtctacgtgggcgaattcggggaccttataccatttgacggggtagccggcaccgtgggcgcagaagaccgagtcgggggtgttgtccagatcggcttcgggatcgtaggcggcggctgcgatgacctgttcggcgtcatggcatggcttgtagccgccgaaggtggcggagaaacggccatggccgtgcgtgtactggttcacgtccatcgcatagtcgcgcatttcggacaccggtgcctcgccttcaatcacggcgtattcgtcatcggtgaccggggattcgaagctgccggccatgcgctggatgtcgctcatggcacggccgatcatgtctgcgggcacttcgagccggaaccggtaccacggttccagcagtcggcagttgccctcccctgtggtgtccggccggctctcgaccggcgtctcgggccggccactgactcctgccctggcttccatcagcccttggcgaatcgcccggtacgtggcttgacggaagtcgccgccttcggtgtgcttcagatgcgcgcggccggccaccaaagtcatcttgatatcggtgagcggtgcgccaacgagcacaccgagatgctcacgctcggtcaggtgggtcagaatcagccgttgccaattgcggtccaaatcattttcggacagggccgaggccacagtgactccgctgcccggctcccctggttccagcaggatatgtgcttcggcataatgacggagcggctcgaaatgacctgcgccttcgatcggcgcagtgatggtctcacggtacaggatggagccggggccaaaggacacatccagaccgaaccggtcgtgcagagtctgctggatgattttcagctggaccgcgcccatcaattgcacatgaatctcggccagccgttccacccacaccacatgcaacaacgggtcttcgtcttccagctcacgcaatgcggtgatgaccttgtgcaaggtcagatcatcgaactggggacgggccggcgagctattgtccgccgcggtctggccggcggtgtcgttctcctcattgcggccggttcccgacttggcggcatcatgctcggcatcgtcctgattcgcgctgtcacggccggctcccccacgtttggccgctcccgaggtgccggccgtatcggattccgctccgacgggcaacaccgtgtaggtcaacacgggttgcaacgacggcgattcggcgtccggttccgttcccagcccttcgccggggaaggtctgcgtcagcccggtcaccgcgcataccaagccggccggcacttcggtgaccgtctcgaatttggcgccattgtagatgcgcacctgatcgactttctcggaccacgccatgtcatcatcctcctgcgctggcgacggtgtcgacgccgcggcgcacgaggatgaggagacgatctccttggctttgagcgcaccgccggtgacgcgcagccacgtcatacggttgtgctgaccgtcgtgggcgattttgaacacgcgtgcggcgaaggcggccggccattcacgttcgcgggtgaacgtctccagcccgtccaggaattccttgaccccttcgagtttcaatgccgagccgaaatatacggggaacagctcgcgtacggcgatcatcgatcgcaatctgcccacggacagcgcgccatgttccaaatagtcgttcatcgcctcctcgtccagggtggcgatgtcttcggcgaacgcgtccaacggtaacgcgctgccctcagcggactgttccattgccggcaacggatatatcgcatcgctcagacgcctgcgcaactgagccaacacggcctcgcgggcaaatccggcggcgtcgcacttgttgacgaagatgaacgtcggcacaccgtatctggccagcagacgccatagtgtctcggtatggccttgcacgccatccgtgccggagaccacaagaatcgcgtagtcaagcacacgcagcacacgttcggtttcggctgcgaagtccacgtgccccggcgtatccagcaaggtcaggcgcaggtcgccgtgttctaccaatgcctggtgcgcgaaaatcgtgatgcctcgcgccttctccaaggaattggtgtccagaaacgcatcgccgtgatccactcgccccaatttgcggatctcaccggtacggtagagcagcgcctcggacagcgtggtcttgcccgcgtccacatgcgccacgatgcctgccactatctgtttcatcagctgtgctcccttcccgatgcgccgcatgttgccggccgcctaaccaatatatccgagaaaatccgggagggaaaaattttaccgtcagaccgggctgccggtacaataagtcaccgaacaccgactgatatgaggagcctccgtgaccacttccggcattaccgttttcggccaaccatcccagcccaatcatggtgccggcgggcgaatcgccatggacgatgccctctttcccaccgattatgtggcgctggatctggagaccaccggcttttacccgaacagttgcgccatcacggaaatcggtgccgtgcgcgtgcgggaggggcatatcgtcgatcaattccagcagctggtgaatcccttgcggccgattccgcgtcagatcaccacgctgaccggcatcaccgatgcgatggtggccgacctcgatccgattgacgaggtgcttccccgattcatcgcatggctcgctaccccggctgccggtcccaccgttgagccgattgtcggtcataacgtcagcttcgatctgcgattcctggattacaacacccggcatatcgccggctgtggctttgcctgcgcggattatgacacgatgcagatcagccgcgccctattccccgcgcagcggcatcaccgtctggctgacctgatcgtgcgcttcggcatcgcggacaatgaggaacaccgcgcattaagcgatgccatccagacccagcagtgcttcgaatggatgcggcattatgtcaccgagcatcacgaatccgaagcaatccgttggaagcaggcgccggccagaaacagcaccgaaattctccaccagcagctagtggtaaagcggtagttacagcccgtattattcgcacatagaggaaaactattagtcgctgggctagagaccttatagtggacggattcctctcgcatatcggagaaatgcgggataccacacggttagcggccaatttggggccggcgtcccgcaaccgtgcgggacgccacgcacgtcaaacgatgcacacggctggcatcccacaccccattccacagaaccattggaattctgccaatcccacaaaccggtgacgacaccgtacatcaggttctgtgggacgccagaggaaaaacacccgaaatccgctggcatcccacaccatgtcacaccgcacctgcagcatcgcaccacaccacatcacgccgacacctattcgtgccccccatttgcataattcgacgtttttggaagatggcgcacacatgcatgtgcccccatttgcatatcaaacggttgacgcacaaatggggacacacaaccacaactcagaatcctcggaattccgccaatcctgagatttcatcccccaacacggcaatcgccgcctctgccaccattttcgcatcaaacgattgacgcaacaatggtggcgcatgcccctttgtatcggtatgaatcagtccctgccgtcaggctctcccccctattgtgagggccgactggcagggactgaacacgcataatcacatgagcacgccatgccaagcatggacatctcagtacgaacagaacctattcgcacacgttacagcccgtattccttggcgatgacggaccagaggtcggcggcggcctgatcgacggtttcgttgacgatggtgacgtcgaattcgttttcggcggcgagctccactttggcggtttccaggcgacgggcctgctgttcggcggtttcggtgcctcggccgatcagacggcgcttgagctcttcaaagctcggcggcgcgatgaacacgtacaccacttccaagtcgagttcggcggcgcgctgcttgacgcggcgggcgccctgcaaatcgatttccagaattgttggcacgccggcagccagatgctcctcaacaggcttgagcaatgtaccgtagtgggccatgccgtgcaccacggcggtttccaggaactcccccgccgcttcgcgggtcaggaactcgtcttcggtgaggaaccagtagttgacgccatcaacctcgccggggcgcggggcacgcgtggtggcggagacggacacccacacttcggggtggtcggcgcgcagcttggcttccacggtgcccttacctactgcggtagggccagtcaggacgattagacggccggcatgggtgttttcagtcatgggttcctccggagatgatgtggtgtgcagcgattatgaatccaatgtggtaacggctcaccggcgagatgaccggtaactgttacagccccgacgaacagggaagaatatgaatcgtgatgcgacgtatgcaatgagataaatacgtacgcatgccgcgacatctgattccgttctgattactggttttctgcgccttcggcagtggcttccatcagcgactgacgtacgtcaagcgcaatcgactcggtagcttggctcagtgcggcgatatccggcccatgcgaggcgataaagcgggacacggtaaccagcacgttgccgcgcgtaccgcggaacacggttttcagatccttggcctcggcaccctgccaaccgtaaccgggggaaagaatcggaccggtgaacttggaggggtccacgccggaatcctgcatccattggccgatggtggcaccgatgatcagacccaccgagcccatgccttcgatatccacgttatgcttctgcgcggtggaggcgatgccgtaggccacggtacgtcccttgtaatcgccgctctggcgcaacgcggtctgcagactcatgccttccggattggaagtcagggaggcgatgaacacgccgcgtccgttttccaacgcttcggtaatcaagccgttcaacgagcgcgcgccatagtacggcagcagcgtgatggcgtcggccagcaacggtgcaccgggcttgaaataggcgtccgcgatggcggaaatcgtggtggacaggccgccgtgcaggcagtccacgatggtgatgacgcccatttgtcgtgccgcgtagagcacgcgctcgagcgcttcgaaacctttggctccgtagcgctcgaacatcgacgtctggaatttgactgctgcggcgcgcccgttggcggcctgcagcatacgcatggagaagagttcggcgccttcggcgtcgacgttgtatccccagtcggtgaggagcttgcgatgtgggtcaatgcccacacacagcggtccgtatttggccattgaattgctcagtcgcagaccgaaatccgaacgttgtgcctgcaattcctcactgctgggtgtagtcatcagaactcccgtcgctccaattcgaacagctgcttcgaatgctcctgaatgctcatgatctgataatcattatgcttcacggcctcgatagccagcagtgcggcttggaactcggtgatggtggtaaactgcggcagatcggctgcaatagcggcagcacggatggagtagccgtcggaacgggagccgcgcgagttcggcgtgttgaggatcatgtcgatcttgccttcctcaatgagctgaaccacgttcttgcccacggagccggcggcgtgatgcacctcgaccggggcttccggatcggtgtccacgcgggtgctgatcttgtccacgatgttcgactcgatgccgtaacggcgaagcacggaggcggtgccctcggtggcccagagcttgaatccaagctcttcgaggcgcacggcgagcagcggcagctgacgcttgtcggtgtcgttcacggaaatgaacacgttgccgtgggtcggcaggccaccatcgtaggcggcgagctggctcttggcgaaggcgtgcgggaagtcgcggtcgaagcccatgacctcgccggtggagcgcatctcaggtccgagcaggatgtcgacggtcttgcccaccggggtgcggaagcgcttgaacggcagcacggattccttgaccgcgacctgctggccggggtggatgtcgccgccgtcgcccttgggcagcagcagaccgttggcgcgctggtcggcgatggtttcgccggccatgatgcgggcggcggccttggccagcgccacgccggtggccttggaggcgaacggcacggtacgggaggcacgcgggttggcttcgatcacatacagcgtgttggccatgaaggcgtactgcacgttgatcaggccctgcacgtggcagcccttggcgatggcgtaggtgccttcgcgcaggcggcggatctggtcgtcggacagggtggacgggggcagggtgcaggcggcgtctccggagtggacgccggcctcctcgacgtgctccataatgccgccgatgtacagttcctcgccgtcgaacagggcgtcgacgtcgatttcgatggcgtcctgcaggaacttgtcgatgagcagcggggagggcaggcggccggagaccacggtatcggccttggcctcggcaagcgcgcggtccacgtacttggtgagctgcttgtcgtcgtagacgatttccatgccgcggccgccaagcacgtagctcgggcgcacgagcaccgggtatccgatgcggtgggcagcgtccatggcctcttcgaggctcagggcggtgccgtaacgcggggcgttcatctccgccttcttgagcacctcgccgaacagctcgcggttctcggccagatcgatggattccggggtggtgccgagaatcggcacgccggcggccttcagacgcgcggccagggacagcggggtctggccgccgagctggacgatgacgcccttgaccgggcccatcctcttctcggcctcgtagatctcgagcacatcctcgaaggtgagcggctcgaagtagaggcggtcggacatgtcgtaatcggtggagacggtctccgggttgcagttgaccatgatggtgtcatagtccttgccgagctcctgcacggcgtgcacgcacgtgtagtcgaactcgatgccctggccgatgcgattcgggccggagccgaggatgatcacggcctcgcgctcgcgcgggcgcagctcggtttcgtcggcgtagcagctgtagtagtacggcgtggcggcgtcgaactcggcggcgcaggtgtcgacggtcttgtagaccgggcgcaggccgtaggtccagcgcagctcgcggatggtgttctcgccttcatcgcccaagccacgcaggtgggccacctgcacgtcggacagaccggcgagcttggccttcttgagcagcttcggggtgagggtctcggcctcgcgcaccgtcatggcggtctcgttgatgaggaagatctgcttcaggaaccacgggtcgatcttggtggccgcgaacacctgctccagcgtggcgccgccccagatggcgcgcatgagctgcaggtaacggtgttcggtcggggtgtggatggcctcaagcagttcggccacttcctcggcggacggcttctcgccatcccagttgaagcccatgtggcgcttgtcgatggagcgcatggccttgccgagggactcctggaagttgccggccagggccatggcttcgcccacggacttcatggaggtggtcagggtggggtcggcgcccgggaacttctcgaaggcgaagcgcggcaccttggtgaccacatagtcgatggtcggctcgaatgaggccggcgtggactgggtgatgtcgttgcgaatctcgtcgagcgtgtagccgagggccagcttggtggcgatcttggcgatcgggaagccggtggccttggaggccagtgcggaggaacgggagacgcgcgggttcatctcgatgacgatgatgcggccggtcttcggatgaacggcgaactggatgttgcagccgccggtgtccacgcccacgccgcggatgatggcgatgccgatgtcacgcagcttctggtattcgcggtcggtcagggtgaagcagggggccacggtgatggagtcaccggtgtgcacgccgaccgggtcgacgttctcgatcgggcagacgaccacgacgttgtcgttgcggtcgcgcatgagctcaagctcgaattccttccagccctcgatgccctcttcgatcaggacttcgtcggtgggcgagtaatggatgccggcgccggcgatgcggtgcagctcctcctcgttgtgggcgatgccggagcccaggccgcccatggtgaagctcgggcgcacaaccagcgggtagccgaacttctcggcgatcttgtcgacttcctcgatgctgtgggcgatgtcggagcgggcggattcggcgccggcctcgtcaacgaccttcttgaacagttcacggtcctcgccacggtcgatggcttccagggaggcaccgatcagttcgacgttgtacttcttcaggacgccggcctcgcccagcgccatggcggcgttgagtgcggtctggccgcccagggtgggcagaagcgcgtcggggcgttccttggcgatgatctgctcgaggatcggagtggcgatcggctcgatgtaggtggcgtcggccatctccgggtcggtcatgatggtggccgggttggagttgacgaggatgacgcggatgccttcctcacgaaggacgcggcatgcctgggtgcccgagtaatcgaactcagcagcctgaccgatcacgatcgggccggagccgatgaccatcacggatttgatgtcggtgcgcttcggcatatcacttaccttccttggagttgttcttcataagttcgcagaaacggtcgaacaggtaggccgcatcatgcgggcctgctgcggcctccgggtggtactgcacggagaatgcggggatgtccacgcactgcaggccttcgaccacgtcgtcgttcagatcgatgtgggagacgaacaccttgccgtacttgccgttctcaaacggcgcgtcgacctgcctgccgatcggggcatcgaccgcgaagccgtggttgtgggcggtgacctcgaccttgccggtggtcagatccttgaccggctggttgatgccgcggtggccgaacttgagcttgtaggtgccgaagccgagcgcgcggccgagcagctggttgccaaagcagatgccgaagaacgggtagccggcgtcaagcacctggcgcagcagctcgatttcggggccggcctgttccgggtcgccaggaccgttggagaagaagacgccgtccgggttcaggttctcgatttcggcgaaggtgatggtggagggcaccacgtgcacgcggcagccgcgctcggccatgcggtgcggggtcatgcccttgatgccgaggtcgacggcggccacggtgtacagcggctccttgccttcgtactcgccgcacggctcgatggtgtaggtctccttggtggacacctcgtcgtacaggctcaggccctgcatctgcggtgtgttcttgacgtcttcgagcagctgctcgatggtcttgagcgcgccggtggcctggtcggtcagggcgtcgccggagaagatgccggcgcgcatcacgcctgcggaacgcaggtgacgcaccagcttgcgggtgtcgatgtggctcaagccgacgatgccgttcttggcgaggtcgtcatcaaggctgccttcggcacgccagttgctcacgttcggagagggatcacgcacaatgtatccggcaacccagatgcgggaggactcagggtcttcgctgttgacgccggtatcgccgatgtgcgggaacgtctgcacaacgatctggcgatcgtagctcggatcggtgagcgtctcctggtatccggtcataccggtggcgaagacgatctcaccggtcgtctcaccgagggcgccgtacggctcccccacatatacctgtccgtcttccaaaacgaggactgcatcgtccttgtcatacatcggaattgcgatggtcccggactcgttctggctcaccaaaacccccttatgtttttcgggtattcgtaccaaggttaacggccagcgcagactcacacgccgttgggcgcaaagtctcaccccgctggcggggctgtcggcaaggtgccgacttgagaatgtacggcggcacaagtgtccgcccatgaaaaagcctcccgaatggggaggctgaacgacaaatgactaatcgaccgtcggctgaatctcagcggacggggcagcgggctcgtcggatgcaccggacgaatcgggcgaatcggaaacatcgccctcatcggtcggctcggatgcggcggcatcggaatcggacgattcctcatcggcctcttctgccgcggactccggtgccggtgctgcgttcttggcggtgcacaccgcagacagcaggccatggatgaaagcgggcgaatcgtcatcgcacagggtcttggccaatgccagagcctcgtcgatggcgaccttgtccggcacatcatcgttgaacagaatctcccaagcggcgatacgcagaatgttgcgatcgaccacgcccatacggcggaccttccaacccgtggagtgttcgtccagggtcatgtcgatctgacgacggtgctcggccacgcccttgacgatttcaatggcatagtcgggaagcggggtctgggcaccgggatgtgcgatgcgttcgtcaagcagggagagaatatcctgacttttttcgtcggcttcgtacagggtgttcagagcccttttgcgcgcggtggaacgtgccatactgctgctgtcctagtcctttatacggtcggtcgtctgttgaggatgcggagatcagttgttctcgcggccggtgtaggaaccatcctcggtgttgatcttgacgcggtcgccctcattgatgaacagcgggacctgaatctcggctccggtctcaacggtggccggcttggtgccggcgttggagcggttgccctgcaggcccggctcggtgtgggtgatggtcaggaccacggagcccggcaggtcaacgctcagcggggtgccgtcgtggaaggagaccaggcagtcggtgccttcgagcatgaacttggccttgtcgcccacgagggtcttcggaaccatgatctggtcgtaggtggtcatgtccatgaacacgaagttgtcgccgtcctcgtaggagtactggagggtgcggttgtcgacggtctcgaattccatcttcatgcctgcgttgaaggtcttgtcgacgatcttgccggagagcacgttcttgatggtggtgcgtacgaaggcggggcccttgcccggcttgacgtgctggaacttcatgacggtccacagctgtccgtcgaggttcaggacggatccgttcttgatgtcgttagtagtctgtgccacgttattcacctatttcaaattcaaactagcttaggcaaagcccaaaaattgccttggctattatgccacaccgggtatacaggaagtgaacgc

SEQ ID NO: 1589 - DNA, 12408 bp, Unknown
  R221_24m  MAG No. k141_41458
aggcctccggtggttttctttgcgatcatgagtgctccttgttgttcttcattgagcggctgttttgccgcatgcaacacggtaagatgccaatgaggagcgaacgaagtctgtgtgacgggaatcgtcacagtgttacgatttcgtttgacggaggcgatttggggagggggtacttatgaagaacgggcgcctgattcggcttgccttggtggacaacgatcgttgctctgcggagatgatggctttgcttattggcaggacgattcccgaggcgcatatgctatgggttacggataatcccagtcttgccttggaacgttgtctgttcgatccgcggaagccggacatccttatttgcgatctcatgatggacgggctgaacggagtgcggctgacggaacgtattcgacagcggaacgtgcaggttggcgtcatcgtagtcacttcgtatgacctggcaacctatggtgaggatatcgcgtgttgcggagcccaagcgttgatttcgaaaagagatttcgcagcgaccatacgcgaggcggtcaaatcggtgtttgacgggggaacataccctcatggttggggtttgcatagccttgaagagacattgcatacggtggatgccgcacagccggaagcggatggtgccaggctcttctccgatcgagagctggcggtgttgcgtctctatgcacatcatgtaccgaccgttgaaattgcgcgccgcttgggaatcggtgtcgaaactgtgtacagctatgtgaaacgagccatgcgcaaggtcggggtgacgaggcgcggcgaactccttgattactgtgagcgataccatgttctgtgacggcagccgttttcttagacgtcgcttccgcgatttcgggaagtcttggcatggcgagaagatcgcggcgctagcctgcgccttgtgcatagccgctgatacggtcatcgaatcgtgtatcaatccggtttgggatgagtgggccctgtgggtgggtctgttgttcgtcatcctgtcgttgctctgcgtggcattcccgttcggcggcaatatcgcgttggcgatctcatggtgcgtggtgttccccttgccggtggatctgtccatgtcggtgagcgtggtgatagccgagccattaatcgtcctctcctatcaacgcatatggtgcggcgtggtgttggcggtgactgtgaccgtatctcgcgtggcgcagctgatatggcagtatgggttgccgatgggttgggatgccgggacgttggtgtccgttgtgccttggaccgtcatgccggcgttggcgtgcgttggaatcggtctgctgctgaattggcatcatcgtgagggggagagggagtcggaagcgcgtggcagggccgaatcgttggatttggcggcaaggctgcatgatgcgacgaccaatgatctctcatatctcatcatgagcatcgacaggatcatgtcggaacacccttcgcaaggagagtcgatggacttgccactgttgcgcgaagtggctcaacgggcgctcgatcagacgcatgatgtcatagcggttctcgcaaagcacaatgtcggtactgcgcgaatcccgcgatgccatgcgcgtcgctccggagaagccattgttccgatcggtgcaggtcgattcgaggccgagatcgaacggcgccggcgggaactcgcaacgcttggtttccgaggcgaggtggttgtgtccgatcccttcgatctcctgagtcggtttgacgagaagactatccagttgacgcggtcgttgctggaagagacgtttgccaatatcgccaagcacgcggatcgcgaacaagggtatgtactcgccatacaagtgcggcaagacggactgtacgtatcggtggctgacgttcccgccaagatggcggatggagcattggcggaatctccgagaacattgggcatgggatttggaatggctcatctgcgtcaatcaattacgcggagcggtggttggctgcgcgtccaagaggaagacgggtattggagttgcctagcgtatattccgatatatcatcgggatacagcgtgaatcggaaggaaacagcgcatgggattcaacatcgaacgtgtggacaagccgtttgtggtcaaatcgccgtaccaaccatccggagaccagccgaaggccatcgaggaactggccacgcgcatcgagaacggcgagaacgacgtggtgctcatgggcgccaccggcaccggcaaaaccgccaccaccgcatggctgatcgaacggctgcaacgtcccacgctcatcatcgagccgaacaagacgctcgccgcgcagctgtgcgccgaattccgcgagctcatgcccgacaacgcggtgagctatttcgtttcctactacgactactatcagccggaggcctacataccgcagaccgacacctatatcgagaaagactccaacatcaacgacgatgtggaacgtttgcgccatcaggccacggccaacctgctgaccagacgcgactgcgtggtcgtggccaccgtctcctgcatctacggcctgggcactcctgaggaatacgccgggcgtatgctgtttctcaaggaaggccagcagatcaatcgcgacgacctgctgcgccggttcgtggccatgcagtacaagcgcaacgacatcgccttcacgcgcggcaccttccgcgtgcgcggcgatacggtcgaaatcatccccgtctacgaggaactggccgtgcgcatcgaattcttcggcgacgagatcgaccgcatctccacgctgcacccgctgaccggcgacgagatcgacgaggaaaacgaaatccacatcttcccggcctcccattacgtggccggccccgaacgcatggaacgcgcgctcaaaaccattcgcgaggaactcgacgaacgcctggcagaactgcgtaagcaaggcaaggagctggaagcgcagcgcctcaacatgcgcaccacctacgatctggaaatgctcacccaggtgggcgtgtgctcgggcgtcgaaaactattcgcgccacttcgacggccgcgccgccggcaccccaccgcacacgctgctcgacttcttccccgatgacttcctgctggtcattgacgaatcacacgtcaccgtgccgcagatcggtgccatgtacgagggcgatgcctcccgcaagcgcacgttggtcgaacacgggttccgcctgccctccgcgatggataaccgaccgctcaaatggccggagttcctgcagcgcgtcggccagaccgtgtatctgtccgccacgcccggcgactacgagttgggcttgtccgacggggtggtcgaacagatcatccgtccgaccggcctgctggacccgaagatcgacgtgcgcccggtcaaggggcagatcgacgatctgctcgccgagatcaaggcccgcgtggccaggaacgagcgcgcgctggtcaccaccctgaccaagaagatggccgaggatttgaccgactatctgctggaacgcggcatcaaggtcgaatacctgcattccgatgtggatacgttgcgccgcgtcgaactgctgcgcatgctgcgcgaaggcaagatcgacgtcatcgtcggcatcaacctgctgcgcgaaggcctcgatttgccggaagtatcgctggtggcgatcctcgacgccgacaaggagggcttcctgcggtcctaccgttcgctcatccagaccatcggccgtgccgcgcgaaacgtgtccggcgtggtgatcatgtacgccgacgagaccaccgaggccatgaggcaggcgatcgacgagaccgaccgccgccgcgccaagcagatcgcctacaaccgggaacacggcatcgatcccaagcccctgatcaagaagatcagcgatgtcaacgatatgctcgccaaggaggatgtggacacccagaccttgcttgaaggtggctaccgcaacgcgggcaaggccggcaacacacacctgggcgtgccggtactcgatcccaacgaggcagacaaacgccacgaggagatcctgaaggccggcctgcccgcgcaggacctcgccgacctgattcgccagctgtccgaacagatgcacaccgccgccgaacaactccagttcgaactcgcggcccgtctgcgcgacgagatccgtgatctcaagaaggagctccggcagatgaccgaggcggggcgatgacccgtcacatacatgggttagtgtagggaatcatggcagaaaccccactcgcatttgaaatcatcaccttcgtggtgctcgcgctgttcttcatcgtcgacctgttcgtcatcgggcgccgaccgcatgtgccctccaccaaggaatgcgtgcagcatatcgccttcttcgtggtcatggcgttgatcttcggcggatgcatctggttcttcgccggctccaggcccgccatcgagttctattccggctggctcaccgaatactcgttgtccatcgacaatctgttcgtgttcgtcattatcatgtcgaacttcgcggtgcccaagcagattcagaagtacgtgctttcggtgggcatcaccattgctttgatcttccgtggcattttcattctgatcggcgcggccctgatcacccgcttcacatgggtgttcttcctgttcggcgccttcctgatctacaccgccgtcaaactggtgctcggcggcgatgaggacgaggaatatcacgaaaacggcatcatccgtaatctgcgcaagatcatcaagatcaccgacgactacgacggcgagaagctgcgcaccaccaagaacggcgtgcgttactggaccccgatgctcatcgtgttcctgaccatcggcaccaccgacgtcatgtttgccttcgactcgattcccgcgatcttcggcctgaccaaggatccgttcctggtgttcacctccaacgtgttcgccctgctcggcctgcagcagctgtacttcctgctgggtgctctgctcgacaagctcgtctacctgcctgccggcctgtccgtggtgctgggcttcatcggcgtcaagctcatcatggaggccctgcacggcaataccttgccgttcatcaacggcggcgaaggcatccattgggtgccggaagtgcccacatggctgtcgctggctgtgattgtggtcgcaattggcggcgcatccgtggcttccgtgatcaagatgaagagcatggaaagcgccgagaaggcctgaaatcgttagagaatacaacccttaaacccagtcgacacaacaatgtgagcgctcacaacacaccgtgaagaaaacttgtcatgagtcggctcgcgctagtagactgggtttcggcaaatggggcaatcgtgcctcgaaccaaattgaacaagaataggcaggcattcatgcgtaaagccaagatcgtagacaccatcggtccttccaccgaggattacgacaacctcctgaagctcgttgaagctggtatggacgttgctcgtctgaaccgctcccacggcacccccgaggatcacctcaaggtctacaacaacgtgcgcaaggccagcgaagccactggtcgcaacgttgccgcgcttgttgatttgcagggcccgaagattcgctgcggttggttcaagaagaacgccgatggcgaagacaaggttcagctgcagctcggccaggaattcgtcatcaccactgatgacgtcgagggcgacgagcacatcacctccaccaccttcaagggcctgccgggcgattgccacccgggcgacccgatcctgatcgatgacggcaaggtccgtcttgaggtcaccaaggtcgagggcaacaacgtgtacaccaaggtcgtcgtggccggtcctgtgtcctcccacaagggcatcaacctgccgggcgtcgccgtctccctgccggccctgaccgagaaggatgaggctgacctgcgttgggccatccgcaccggtgccgacatcatcgccatgtccttcgtgcgtttcgccaccgacatcgaccgcgcccacgagatcatggacgaggaaggccgtcgcatcccgatcgttgccaagatcgagaagccgcaggctctggagaacctcgaagagatcgtcaagaccttcgacggtgtcatggccgcccgtggcgacatggccgttgagtgcccgctggaagaggtcccgctggccaccaagcgcatcatcgagctggcccgccagtatgccaagccggtcatcgtggccaccgaagtcctcggctccatggtgaactccccggtcccgacccgtgcagaggcctccgactgcgccaacgccgtcctcgacggctccgacgccaccatgacctccaacgagaccgccgtcggcaagtacccggatgtgaccgtggccaccatgtcgcgcatctccggctacgccaccgaccacggcttcgaccgcatcccggagctcaagaacctcgacatgtcctccaccggcgccgtctcctccgccgccgtggacctggccgacaagctcaacgccaaggccatcgttgcttacacccagaccggcgccaccgtgcaccgcgtctcccgtgagcgtccggccgccccgatctacggcctgaccagcaacgagcacacctaccactggctggctctgtcctggggcaccgaagccttcctgctcaaggaggactaccacgacaagtcccgcaaggatctgatgatctacacggacaaggtcctcaaggatgccggcaaggttgctgacggcgacaagatcgtcatcctgagctctgctcagggcgatcaccagccgggccgcaccgactccatctacgtgcacaccgttggcgcttgcgactgatttcaggccgctggtagctgctgacagctagcacatagcacgcgaaagcccccccatccagaaagtggatgggggggctttcgttatccgttatgttgcgattgtgcggtgattgcaatggcacgtagtcaccgcgatgatcgagcgtggtgactagtcgttgagatgatcgagcgtgccgctcttcagacgcagaatggcgaccatggtcttggcatccacaatcgtgccattgaccaccatctcataggcatcgtccaccgacaccatacgcacgtcggaacgcggagtctccgggccgatttcctgacgggaagccggggtaagtccggtggcgaagaagattgcggtgtgctgggtggaatagctcggcgtgttcataaaacgggtgaactgcgtaagcttggaggcatcgaaaccagcctcttcggccagcttgcgcttagccacatcggtcgggcgttcggacgggttgttggcgtggcctgccggaatctccaacgtccaacgatggttggcgatgcgatactgctcgaccagcggaatcatgccgtcatcggtgacggccagcacagccacagtgtcgccattgttctcctgaacaaagtagcgttcaaacgaaccgatctgattcgactcataggagacgtgatcgacattgaaataatgcgtctccacaatctgtctacgggaaatctccttgaccggagaggggcgccagggatcgaactgacggtaagtttcgttgctcataagccctcctaacaaaagcgatacatcgaaactacagcccattgtaagcggtgaaaccacgcagaagaacaggcaacacacgggtacgccgtccacgatatcgacgtgtttcgcctgttttaccggggggaaatggaggactggcgcgtgtcttgtgtcgcaggagtcgaatcggtatgctactctcttcagagtgcttaggcacgccctcgtatcccaattggtagaggaagcagcctcaaaatctgcgcagtgtgggttcgagtcccaccgagggcactttagctaggagttcgctgaaattattacgaaccccattgttgggtaattcaagaaagaggttggcatggctgcaaggaagaagtccgaagaaccgagtatcaacgtcgatgaggtgctgaccgacgaagaactcaaggccgtggccgatgaaagcgaacctgctgagcgcaaggccgtggccgaggatggtccgcgtaccgtcgtcgtggccgaggatgaagccgtgaaccgcatggatctggtcgccatgctggaagacaacggttatgaggtcgttggtcaggccgccaacggcgaggaagccgtggaactgacccgcaagtatcgccctgatgtggtgtgcatggatgtcaagatgccgcgtatggacggcatcgccgctgccggcattatctgcgatgagaacatcgcccctgtcgtcatgctcaccgcattctcccagaccgatctggtgaagaaggccaccggtgccggcgccatggcatacgtcaccaagccgtacgaggaatccaagttgctgccgaccctcgaggtggccatgggccgtttcgccgagatcaacgatctgctggacaacgtggagcgcagcgaacgcaagctcaaggaaaccaccgaccagctcaaggaaaccgaagagaagctcaagaaggccgaagacacgcttgaggagcgcaagctcgtcgaccgcgccaagggtctgctgatggacaaggctgacttctccgagcagggtgccttccgttggattcagaagacctccatggaccagcgcatccccaagaagcgcctggctcaggccatcatcgccaagtacggcgatccgaagccttctgattcgggcgaacgctgattatcggcatcaccgtgctgagtcgtaaagcaacacaaacacactatgggagaggccagcgtgaccgtacccaccaatgaaacattgctggtggtggacggccactcgctggccttccgtgcatttttcgccctgccggtcgacaacttcagtacttccagcggccaggccaccaacgccgtctggggttttgccaccatgctcgcgcaggtgatcgatgcggagaaccccgaccatctgggcgtcgccttcgatgtgaagggcggcacattccgcaatgagatgcttccgcaatacaaaggcacccgtgaggcggctcccgaagagctgctcacccagctgccattgattcaacgcatgctcacggccctcggcgtcacctacatcgagaagccgggattcgaaggcgacgatgtgatcgccaccctcgccaccatgggagacaaggccggctaccacacactggtattgtccggagaccgagacgccttccaactggtggatgacaacgtcaccgtgttgtacccgggtcatcacttcaaagacctgaagcatatgacgccgcagtccatcatcgacaaatacaaagtcactcccgcacaatatccggatctggcggcgctccgcggcgaaaccgccgacaatattcccggtgtgcccggtgtaggcgatggctttgcggccaagtggatcaaccaattcggttccctcgacggcatttgcgagcacgccgatgaaatcggcggcaaaaaaggcgaatcgctgcgggccaatatcgaccaggtcaagctcaatcgcaaagtcaacgcactggtacgagacgtcgatctaggcgtcgatatcgaggatctgacattcggcaccgtggacgtggcacaaatcgacgccctgttcaaggagcttgaattcggaccgcgtaccaggagtcgtgtactgaaaaccttcaataccggtgccaaggtttccaacacatacggagccggcgagtctacgaataatgaacaggacgagcaggataacagtctcgatctgaacctgccggaacccacgagcatcacctcttcggagcagttcgacgaatgggtcaaggcccatcgcgccgaggtcaaagttcccggtgaaatcgccgatttcacggtttccgactatggcgatggatcgcagcggcataccgtctgcggcgacgcggtcggccacgcttggaccgtggccgcatggggcgacgaaaggccgggtcgtgccacggcacaagccattgccgttgccacggcaacatcagcggccatagtgccccttccaatcaccgataccctgcgagcacagcttgcgcggttcctgaaaagcgaacactcccgcaccatcgtgcatgggtataaagaattgctgcatcttctgggcgcggtagatcttgacatggacctgccgatgttcgacaccaagcttgccgggtatctgacccaaccggatttccacgccgatagcctcaagcaggcggccgagcacttcctcgacatccacttcaccgaaaccgaacagccttcgcaaggcacgttggacttcgatgacgatcaggtcgaagaagatccgaacgaacatcgtctgcgcgatttggccattatccgcagcctcgccgtcacgctcgggccgattatcgacgagcgtgaacaatgctggctgatgcgcgcgattgaacttcctgtttcccgcgtgctgcacggcatggagcacacaggagccaaagtcgatagcgttcgactcgtttccatgcgtgaccagtttgccgccgaggctcgtcaggcgcaggaaatggcttgggagtatgccggcaccgaaatcaacctgcaaagtcccaagcagttgcagaaggtgctgttcgaagatatgggtttgaagcccaccaaacgcaccaagtccggctcatacaccacgaatgcggccgcattgcaggatctgtatgtcaaatcagtggacaatgagcgggccaacggtttcctcggggcgttgctgcgccaccgagagatcaacaagctcaagcagatcgtccaaacgctgatcgatgccaccaacacatcagatgagcgcatccacaccactttcgagcaaaccgtcgcggccaccggccgattgagctccgtggacccgaacctgcagaacatccccaaccggaacgccgccggtcgtgagattcgcggcgtgttcgtgccgggggaggggtacgaggccctgatgagttgcgattactcacaggtcgagctgcgcatcatggccgatctgtccggtgatgaggcgctgatcgaagcgttccgctccggagccgacttccacaaatacgtggcctcgatggtctacaagctgccggtcgaccagatcaccggcgaccagcgcagccacgtaaaagccatgagctacggattggcctatggtctgagcacgtatggtctcgcccagcagctcaagatcgcgccacgtgaagcggaagcgttgaaaaaccggtatttcgataccttcggcaaggtgcacgattaccttgaatcgctggtggccaatgcccgagagaaggggtatacggaaaccattttcggacggcgtcgctacttcccggccctgcattcgaccaatcgtgttgcgcgtgaggccgccgaacgtgcggcactcaacgcaccgattcagggatctgccgccgacatcatgaagatcgcgatgattcgcgccgagcagaccttggcagaggcccacgtcaagagccgtatcattctgcagattcacgatgaactggtagtggaaatcgcgccgggagaaggcgaccaggtcaccgaactggtgcgcaacgccatggaacacgccgtcgaccttgccgtgccgctggacgtatcgtgcggtatcggttccgactggcagctcgccgcacactgacaatttctagctcccctcgggtgaggaggctgagccgttgagcaaacagtccagtggattgtttgtaggcgaaggcgagccgatagtcgagcaatgaagagcacgagcatggcttgtccgcaattgcagaatgagtcccttgccgcaatagcccactacaatgggacatatgccgaatctcaagcaagtcatcgacgttctcgagaccctgtacccattgcgctacgccgaggaatgggatgagccgggtctcatcgtcggcgatctgagccacgacgtgcaccgcatcgtgttcgccgccgacccgacctccgccatcattgacaaggccatcgccaccggcgcggacctgctcatcacccatcacccgttgttcttccgttccgtacacgagacgagcggactcggtttccggggcgacatcgtccgcaggctctaccagcacggctgcgggctgtgggtagggcacaccaatgccgacgctgcgtatcgcggcgtggggcaggcggcggccgactacttcggactcatcgaccagaaaccactcgtgccgattgacgatgccaacgcctctcatccggtcggtttggggcgtgtgggtcgtttgccgaagcctgttgccctgaaggatttcgctcagcgtgtattcgacgaagtgtccgatcatggcatgaccaccgcgctcggcatccaggtatgcggcgattcggacacttttgttcagtatgtggccattctgcctggctccggtgactccctgttcaacgaggtgcgtgccaccg

SEQ ID NO: 1590 - DNA, 3288 bp, Unknown
  R221_24m  MAG No. k141_41786
ccggaggtcgaggagatcccggtgcaggtcaacatccagtacgtggtcgaattctacgcccgctgatccgggccctctggtcaacaaatccaggacataccgctcgaaccccgcgcttctttcgagaagccgcggggttcctgcgttgtagggcgattactggccgcacaccgcctgacgaatcatcgtcgcgtacgcataggcaccggtcatattcggatgaatgccgtcatcgttgaggtattcgctatgaccttcgctatacccatgccaatcgatgatgcccacgttcttgttcttcttggcggcctcacgcagcatcgtattgttgttgttctcctgccacgggtatggcatacggatggtgatgaagtatgtcggcttgccgccggtcaggtcaatgagctgttgcacttcctgctcattcgaaatcacgccgttcgtgccgaggccaaacaccaccacactgccactgtggccggcagcggtgtcctgctgatacacatccaccgcctgcggcatctgacggttcggcaggccatcgataaaagcgttcgggaatgcggcctggatggcgtccgaagtacccgacgtcactgaatcgccgaccatcatcatatccgcgttgcagctttccgttgccggatcataggcgtacttcgaaatgtcaagattgtttggcaccttttccgcaatcggtttgatggtgggcggctgagaatccgaaccgttcttattcgcgtcagcggtattggtttcgccgttcgcggcattcgtggcagaagactcgggctcgggcttcgccggtttcttgaccggcttggcgggtgccgcgagttcggggcgcagctgaatggctcgcgcttgagcgatgccattccaatccaccggtgcccacgtcagcaccacaacggtcaccaatccgataaccgacatgacccacgcgcccgggcgcagctggtagccggctttcggcagcggcttggcatgttggctgcgaggcatctgcaccgatttacgggccgcctcgaccagctggtagaaggcttccgacgccgccaacaccacgatggcctcaagaacccaaccccaccacggcaacgcctgcgttcgtgtcgccgggttcatgaactgcagcagcggataatgcatgacgtacagcgagaacgatcgcgacccgatatagcgtaggggagcgcaacccagcacgcgcgaccagattgagtcattgttcacggcacaggccaaggcgcacaacgatatgaacgcggtaatcaggtacccgccttggtacatgtacgacagatacccgttggcgaaccagaatccggccagcagtgccgccaaagccgcggtgccaagaacattgcagacgatagtgagacgggcgcccgtcttgtcgccggcctgacgtccgatctgcactgtttgcgaagccgctccagcttccgcaacttccgtacctcgcgaggaaggcgcaatccagatagccaacagcgcgccggcggccagctcggcgagacgagtatcggtaccgtaatacacgcgggaggtattggccgggtcaaacagcagcaccatggcggcggtggaagcagccatgatgacaagaatcgccatggagcgcacccatttggacttggtgattttgccgagcaccaccatcagcaacggccaaatcagatagaactgcatcgtcacgcccaagaaccacagatgggtcagaggagaaggcaatccggccgcctcgaaatacggcaccttgcggaagatgtacacccaattgctggcgaacaaggcgctcggcagcgaatcggaaaccactttctgcaacaggctgggagcgaacatccaagtgagccaaggcaccacggcaatggtcgccagcatcaccggccataaacgagtaatgcggcggatcagatatcggccatatccaaaggacccggtgcggtccaccatgttcagtactgaacgtgtggcaagaaaaccggtgataacgaaaaacatcgtcacgccaatgaatccgccctgcaatagcgacgggcgggtgtggaatgctatgactccaagaatcgccagagcgcgcagtccatcgatacccctgaaatgggcaggctcagacgattgagatggtgcaggtttcgaggttatgctcatagtaccctaagtgtactctcaggaatcgtcaggtatactacccggattacgcatatctcaggtagtgacctatgccgttatgacttatgacttccggcagcccgcaccgaaaccgccggaatggtgacataatcggaaccatgattcttcatctgcatttggtccgtcacggacagacctatttcaaccgatacaaccgtctgcagggatggtcgaattcgccgctgaccgagtcgggcgtcgctgatgccgtcaaggccggtgagcgactgaaaggattgacgttcaccgccgcctactgttcggacaccacgcgtgcccggcagacggccgagaaaattctcgacatcaacgaagccgcgggtaacccgcgccccgcactcgtgacggacatgcacttccgcgagcagttctacggctactacgagggacttgacatggccatggcctggtacgccgcgggagcgcctcacggcgccaaaacctacaaccaaatcgtcgagaagttcgggttgggggcctcgcgtgattttctcaaggaagccgatcccttccacgatgcggaatccgatgaggaatattggacgcgcgtcgaaggcgcgttccgtcttatcgccgacaacccgaatctcaaggatggcgacgatgtgctgcagatttcgcatggcaacacactgcttagcctcggccaccggttcggcggccctgacctcgatctgaacgaacgcccggccaatggttcggtaaccgtgctcgacttcgacaccgacaagccgttcggcgaggccgtgaccatcgtttcgtacggcaagtagcaaatagcaagcaatacatatcgaatagcacgtacggtccacggcggcacgccgcaaacgaaagcgtcagcaggacacctttcgcctatagtcgcatgcatccacgcgcacggttttcgccctgcgcgtgcaatggtatgccaagaaatagggaaggagtgctacccttaggcgagtaagtgtgaccgcaaggaggaaacaatgggagtcggagagatcgctggcctgatcgcggccatcgcgttcgcagtattggccggtttcatgatctatccgctgatcaggctgggcaagatgtttgatcagatatcgc

SEQ ID NO: 1591 - DNA, 26252 bp, Unknown
  R221_24m  MAG No. k141_43510
ggtactaccagcatgtgccgctgttctccgatgtgctggacgtggtggccggccaggctccgctgattgtggaatacaagttcagcgacaacaaggcttgggatgagcgtagcgaagagctcatggaaaagggccacgccttgcttgaggcgtatgacggcccgtacgtgatcgaatccttccatccgggcgcggtgaattggtacaaggagcatcaccctgaggtgtgccgcggtcagctgagctggccggcgaagctgagcaagaatggtgcggctgaatgggccgccggcttactggcgttcgactggctgtctcgtcctgatttcgtggcctatgactggaccggtggcacttcgccgcaagtcaggctcgctcgttcgatgggtgcgatgccggtttcatggaccgtgcgcagcagcgatgaactcgcccagtgcgcgccctacttcgaccgccacatcttcgaagcgttcgtccccgacgcagtgtgaggttgagggcgttattgatgtgctcatggggcggttacaggctcatcgggcggtaacttgcccatggggcggtttgaagaatatgtgaaaccgcggaattaagccattttggcataccgccccatgagggttttaccgccccatgaggcaattaccgccccatgggggatttcccgccccatgaggtatggcgttttacttgtgatatggctcgccagcgttgatcttataagcgcgatagatctgctccagcagaatcacgcgcatgagctgatgcgggaacgtcatcttcgagaaactcagcagaaaatcagcacgacgcagaatcgcgtcgtcaaggccgattgagccgccgatgaccagctgaatatggctggtgccacgcaatccaaggtcgttgattttggcggccaattcttcgctggacagctgcttgccattgatggcaagggcaataacaaacgcgccgtccttcagatgcttggcgatgcgttcgccttctttggccttgatctgtcggtcaacgccttcggaggcgtggtcaggcgttttctcatctgccacttcaatgatgttgagcctgcagtagcgcgaaagtcgcttggaatactcgtcgatggcgtcgcgaagatatcgttccttcacgcgtcccggcgcaataatgtcgatttgcataaaaagcccatcacattggctcccctctctgaggggagccaggaaaatcagtcaattacgccatagagacggtcgccggcatcgcccaaccccggcacgatgtagcacttgtcgttgagcttctcgtcgaccgcgcacactacgaccttgaagtcgatggacggatcgatgtgctcttccacgaacttgatgccttcaggcgccgcgataatgttgatcgcggtcacgtccttggcaccgcgctcggccagatagtgcgtggcagcaaccagcgtgccaccggtggcgagcatcgggtcgatcaggaagcactgacgaccggacaggtcctccggtagacggttcgcataggtgacctgctgagtggggtgttcctcgtcgcgcttcataccaaggaagccgacttcggcggtcggcataagacgggtcatgccatcgagcatacccagacctgcacgcagcaccggcacaatgatcggacgcggtttggccagcttcttaccggtcatcggagcgaccggtgtttcgatcggcgcggcaactacggacaggttgcgggtggcctcataggcctcgagcatcacaagctccgagacgagctcgcggaaagtggaggaaggagtgttcttgtcgcgcagcacggtgagcttgtgctcgaccagcggatgattcaaaacgtgaagttccatactctccagcctacccgtagttcgcggggaagtcacttgggcggcagtcgcgcgcgtatcgcacaccaatgtaaacagcgttcgacggcgggccgcgtaacaccgttgattttgtaacgtgagcgttatgtatgagacgcatatgaaatattcaggcaacggaaattcacgcaggcactgccatcgtatagtgcagtcggccggaagccagccgtcgatatacggcaagtggttcagcacgatatcaggcatcagggcacggtacggcaatcagcgtagacattccgcgggcgggcaacgttcgcggaatgtagtcgtatgtggggaggaagagtcatatgactcgattgcaaagactgaagatgggtgctgcggtgtgcattgttgccgcagtgcttgccaccagcggttgtggctggggtcgcaccgtggccgagaaagaggcccaagagaacaacgcgactgcggcaagcgacacctcatcatgtgtggacacctcaggcaacaccatcaaaatcggtttcgtgaattcgctgtctggcacgatggccatttccgaacagacggtgagtgattcgctgcacatggccgttgatgagattaacgcaaagggcggcgtgctgggcaagcagctcaaggtagtgcagcaggacggcaagtccgagccggctgtgttcgccgaaaaagccaagaccctcatcgaaaaggaatgcgtggccgcggtgttcggcggctggacgtcctcttcgcgtaaggccatgctgcctgtgttcgaggcggataacgcgctgctgttctacccgctgcaatacgagggcatggaagccagcccgaacatcttctactcgggtgctgcaccgaaccagcagattgtgcctgcgcttgattaccttaaggagcaaggctacaagaagctgttcttggttggctccgattatgtgttcccgcagaccgcaaatcgcgtggtcaaggcgtacgccgagggcaatggcatggaagtggtcggcgaggaatataccccaatgggctccaccgacttcaccaccatcgtcaacaagctcaagttctccggcgcggatgcggtggtgaacacgctgaacggtgattccaacgtcgcattcttcaaggaatacaaggcttccggcctgaaagccgccaccacgccggtgatttccatgtctatcgccgaggaagaggtttccgctatcggcgttgacaacgtcaaggaccagctcactgcttggaactactaccagacgctgaacaatgcgcaaaacaagacgttcgtgaagaacttcaaggcgcgctacggagccaatcgccccacctccgacccgatggaatcggcgtacacatctgtgtacctgtggaagggcatggtcgagaaggccaagtcgttcgatgtggacaaggtcaaggctgcagcagacggtgtcaccttcaatgcaccggaaggcaaggtcaaggtggacggcgaaaaccaccacatctacaagacctcatacatcggcaagatcggctcagacaagctcatccacaccgtctggaagtcggacggtcccatcaagccggacccgtacctgaagacctacagctgggccaagagcctgagcgccagcgtcgagagcaactgagagaagaggacacaacaacatgggtatgttatttccacaaattgtggcaggtctgtccaacggatcgattctgctgctcgcagccctcgggttgtcgttgaccttcggccagatgggcgttatcaacaacgcccacggcgaattcatgatggccggcgcatacaccgcatacgtcatgagcatggtcatcggcaataaaacagtgtccctggccgtggcgctggtggtcggtttcgtagtagccggtttgcttggtttactgctggacgtgttgctgctggagcgtatgcgcaatcgtccgcttgatacgctgctggttaccttcggtgtatcgctggtattgcagcagctcgcacgcgatattttcggtgccactccggtctacgcttcggctcctgaagcgctgaccaatccggtgaccatctttggctacagcttctctgcaggccgactgttcatctttattctgtcgattatctgcgtggctgcgctgtacgcgatcctgaagctcacgccgctgggtcgccagattcgcgccacttccgagaaccgcgacctcgctgaggtttccggcatctccaccaagatggtcgaccatgtgacgttcttcctgggctccggcatcgccggtatcgctggcgtggcgctgagcctgctgaactcgattagcttcaacttcggtacgaccttcatcgtgcaggccttcctggttgttgtggccggcggcgttggccagctcaagggcgcggttatcgcctcgttcgtgctgggcttgtgccagtcgtccatcgaactgccgacctctgcctcgattggtcaggttgccgtgttcctgattgtggtggtgttcctgcagttcaggccgcagggcttggtctccatccgctccaggaacctcgcgtgagtgcttcagaagggtaaggaaacgacaatgaagatgactttgagcgaatacgccacgaaatataaggctttgatcggtgtggccattgccgtggcgctgatcttcctttctccgactgtgctgagcgtgtacaacctcggcctgctgtccaaatacctgtgctacgcgatggtcgcggtcggcatcggcctggcttggggccaaggcggtatgctgacgctgggccaaggcctgttctttggtctcggcgcgtacgtgatggctatccacatgaagcttgaggacattggcgtgggccaagtgccggacttcatgtcccagtacggcatcaccaaggttcctggattctgggaactcttccgcaatccggtcatcgccgtgattggcgtggctgcggtaccgggcattatcgccgcaatcctcggtctggctgtgttcggccgtggcgtgcgtggcgcctacttcgcaattctttcgcaggcgctggttgccgcgttcgccgtgctgcttatcggccagtcgaaaaccaccggtggcaccaacggtctcaacgatttcaagggattctttggttacgacttgactgataacgccaacaagcagatgatcttctacatctgcgcgttcctgacgctggccatggtgcttatcgtctactggattcgcaaatcgtttatgggcgacctgattatcggcgtgcgcgaccaagagaaccgcatgaagttcttgggctataaccccgcctccatcaaggtgttcgccttctcggtggctgcaatgttcgccggcattggtggcgcaatgttcgtgccagtggtcggcatcatttcgccgtccgacatcggcgtgacgccgtccatcctgatgctcgccggcgtggtgatcggcggacgtgccactttgctcggcccggtggtcggcacgctgctggtgcgctttgcggaaacgcagctgtctgaggcgtatccgtccgcgtggacgtacatcgaaggcctgatcttcattctggtgattgcctttgtgccgaagggcttgggacagttcaagggcgtatggccttggattaaggagaagatcgggctcggaaagagttcggttggagcttcggctggtgctggtgctggtgccgttgccggtaccggtactgctactgcaaaggcggtgaacgcatgagtgaggagaagaacatgagctcgaatccatcggctcccgcacctgcatcgcaggccgatttggagcagttgcgcgccgaaatgattgagatgcgcgacgaagccaagcgtatgcgcgacgaagcggcccagatgaaggccgaaatcgttgaagagcgtacgaagctgcacgatcagcttgcggtgctggatgatcgcggcggccagtggagcgattatctggaagttcgtggactgcacgttgagttcgatggattcgtggccgtcaagaatcttgatttgactgtgcagcacggcgatttgcgattcctgatcggcccgaacggtgctggtaaaacgaccatcatcgacgcgattaccggactggtgccggccactggttccgcggaattccgtggcgagcagctgttgggccgcaagccgaacgacatcgtcaagctgggcgtcgggcgtaccttccagaccgcatcggtggttgaagagctgtccgtgttggagaatctgcagctggccgagggcttccgcaagaagggtcgtgagctgttccagccgatgggcggcgtttcgcagaacatcgaatacatgatggacgtgtgcaatctgactgtggatgcaaacaagcccgcaggcatcctgccgcacggcaagaaacagtggctggaaatcggtatgctgctcgtgcaggacgcgcacctgctgctgctcgacgagccggtggccggcatgactccggccgagcgtgtgcagaccggtgagctgctcaagcgatgcagcaagaaccgcacggtcatcatcgtggaacacgacatggatttcatgcgtcagttcgccgattcggtcacggtgctcaaccagggcgaaatccttgccgagggttcggtcgaagacatccaaaacaacgaagaagtagtccgcatctacctgggcggcggagaaaactaactccctgtctcccctccctgaggccgaggcgttaagcaaacagcccagtgggctgtttgtagccgaaggcgagacgatagtcgaaccagcaggttgcaggcaaggcccgtccttaattgcggacgagctgtcaccgaaggtgactgaggggagtaggtaagaggaagaagcgcaatatggaccgcactgacaacaaccatcgcatcccggaatgcgctttttcagtgcatattgagggtgatacaacgcgcctcaacatcaatatgcacgacgccgtagaaagtgaataatcatggcaatgcttgaagtaaaggatttgaacaccggttacggcaaagtgaccgtcgtcaacgacatcagtttcgacgtggccgccggcgaatgggtgagcatcgtcggcaacaacggtgccggtaagaccacgctgttgaaggcgattctgggcttgctgcccgtttcgtccggttcgattagtttcgagggcaaggacattaccaaggctgcaccgaaccaacgcatccgcaagggcatggcgttcgtgccgcagggccagcagtcctttggcaccatgaccgtggacgaaaacctgcacgtggtcgccgaccgctacggttcagaggccaaggcccgttacgacgaagccgtggaaatgttcccggtcttgaaggaatttgctggccgacgtgccggtctgctgtccggtggccagcgtcagcagctttcgattgcccgcgcgctgatcacccgccccaagctcatgattctcgatgagccgaccgaaggcatccagcccaatatcgtcgccgaaatccagaaggccattcgcatgatggccgaagacaagggtatcggtgtggtcttggttgagcagaaggtccaattcgccgtcgagcgcgccgaccgctactacgtcctggcctccggccgtttcatcgccaccggcgaaggcggccccgaccaagtagaagccgccaaggaatccatgagagtgtgattaattcgacccccgtttatggccatagagcgttatgagaaacgtcccgttcttataacgctcttattattgggcgatgttagggctcacattggtgtgcctgaaaaactccagtcaacaacagaggatgttatgagacttacaccacgagagactgacaagttgatgctgtacttggcggggcagcttgccaaagaccgcaaagccagaggcgtgaagctcaactatgtggaggcgattgcgttgatttccgccgaatgcgttgagcgggcgcgtgagggaagcactgtggcggagctcatggcatacggtcgcacgctgctcaagcctgaagatgtgatggatggcgtggccgagatgctggaagtggtggaggtcgaggccacgttcccggacggcaccaagctcgtctctattcataaccccatcgaatccaccgagaagttggtgccgggggaatatctgctggctgacggtgatttggaactcaatgaaggttccgaagacatcgagctggacgtggtgaacactgcggatcgaccgattcagattggttcgcacttccacttctttgaagttaataagtacctgaagttcgaccgtaaggcggcgtatggcaagcggttggatatcgcggctggtacggctgtgaggttcgagccgggtgaaacgcatcgagtgcggttgattgatattggtggcacgcgtgagattcacggcttcagcgcactggttgaggggaagttggatgaccctgaggtgcgggaggccgcgtttaagaaggcgcatgagcttggattctcgggaatctgagctaagggccaccctcagtcagcttcgctgacagctcccgccagcggggagcagactacctctcagtctcgcttcgcgagccagctcccctgacaaggggagctgaaaaacagcaaggacttttgacatgaagattattacgcgcaaggattatgcgggaatgttcggaccgaccacgggagaccgcgtgcgactcggtgacacgaacctcatcatcgaggtggaaaaggactacacgcactacggtgatgaactgaagttcggtggaggcaaatcattccgcgacggcatgggccaaagctccgtgcagctcgacgttgaatcgccggataccatcatcaccaacgccctcatcgtggactacaccggcatctacaaggcggacatcggcatcaaagacggcaaaatcagcgccatcggcaaggccggcagcccgcagaccatgagcggtatcacccccggtctcgaagcgggctccggcactgaagctctcgccggcgaaggcctcatcgtcaccgcaggcggactcgacacccacatccacttcatctccccgcagcagattcgcactgccctcgccggtggcgtgaccacgatggtcggcggcggcaccggtccggccgacggcaccaacgccaccacctgcaacccgggagccttccacctgacccgcatgatcgaggccgccgaagcgctgcccatcaacatcgcctaccttggcaagggcaacgactccagccccgaaccgttgcgtgagcagattcgcgccggtgccgcaggcctgaagatccacgaggactggggtgccaccccggccgtcatcgacactgcactcggcgtggccgacgaaaccgacacgcaggtggctatccacaccgatactctgaacgaaggcggttgtgtggaagacaccatcgccgcgttcaagggccgcaccatccacacctaccacaccgaaggcgctggaggcggccacgctccggacatcattcgtgccgctggcttcccaaacgtgctgccgagttccacgaacccgaccatgccgttcacgcgcaacaccatcgacgagcatctcgacatgatgatggtctgccaccacctcgaccgcaatgtgcccgaagacatctctttcgccgactcgcgcatccgccccgagaccatcggtgccgaagacgtgctacacgacatgggcatcatctccatgatgagctccgactcgcaggccatgggccgcgtgggcgaggtcatcacccgcaccatccagaccgccgacaaaatgaagaagcagcgcggtccgctccccgaagacgaacacgacaacaaccgcaacgacaacttccgtgtcaagcgctacgtctccaagttcaccatcaacccggccatcacccacggcatttccgaatacgtgggctccatcgaagtcggtaagatggcggatctcgtgctttggcagccgtccatgttcggcgcgaagccggaaatggtcatcaagggtggctccatcgcctactctcgtatgggtgacgcgaatgcttctatcccgaccccggaacctgtctactaccgcgatatgttcggcgcgctcggccgtgcgcttggcaagtcctgcgccacgtttgtttcgcaggccgccgtggatgacgatatcaagggcaagctggagctgcagcgccaggtgttaccagtgcatggctgccgcacggtaggcaagaaggatctgaagttcaacgacgtgctcgccgacattcaggtcaatcccgaaaccttccaagtgacggtggacggcgaaccggtccactctgacccggcgtacgagttgccgcttacccagcggtacttcctgttctgagagaactggtggctctcctcaaaggggagagccacttggttttagccttcggccacgaaatcggtcacgaaatcggccacatctcgaatgaggtcgaaggcgtcgtcgcctcgggtggtcagtacacgcaagcagatgccattgattacgcggctcacgccgagctcgccggtgaagccgatggcgtctgcgtgttcatggatgcgagtgatgagcgcgtcttcggcggcgatgcgggcagtctcgatgcgctcgcggatggcggcggaggatgcttctctagttgcggcatcttgtacagcgtcgctagggtcgagttcgggcaggtgagcgtagagaacgccgcagtgggtgaattcgcgccacatgccgagttcggtgtagtcaaaagcatcaggttccaacagcatgcggtcagcaaaggccagatgttcgcgcggttgggcagcggcggcttccgccttggaaggccggcctcggcgatgtgcgtgctgttgcgccaattcggctgcggcggccttggtcacggcttcgggttcggccacatatacgcgcatacgattcgtaaaacgtttcatggcccaacgctcatccatcccaacgcggccacatgtcgccacatccgcatacacgaatgctgactcggcggaaatatgcgcggtggtcaggttcatgaatgagctgttcttgaacggaatcactgggaacggcaggaacacggctttggcattgccacgcgccctgagttcgatggtgcgttcggccgagccgtccgcggtgtcgaacaccttctcgtagctttgcgttttgatggtcgaatcggtgcctgggccgaagtcgatatcgatatgggcttcatcgcccctcaggaagccaggggaggcgagcatcacgacgaaatccgaatgacgtccgttggtgaacggggtcatcagtttgaacggcgcctcgaaataaatatcgtcgattttggtacgtccgtggcggaatgcagtggatagacgaaaagtgctactgcccatggacgaatcgctgccttcttatgattggtgcctgacgatgacatgggcaattatgccgcacttggtgcaacggtatgtttcggcccgtccgtttttggatacgggcgggccaaaacatcacatgtcctcgaacagcacgctcttcttgatccatgcgatgacgtcgtccactccggcaccgcccatcaggtcggtgaagatgaacgggcggtcgccgcgcatcttcttggagtcgcgggccatcacgtctagatcggcgtgaaccaacggggccaggtcggccttgttgatcaccagcaggtcggagcgggtgacgccggggccgcccttgcgtgggatcttgtcgccctcatcggtggcgatgacgtagattgtggcgtcggccaggtccgggctgaacgtggcggacagattgtcgccgccggactccacgaacatgatctgcacgtccgggtgggtgcgggccatttcctcacaggcctcgaggttcatcgagcagtcctcgcggatggcggtgtgggggcagccaccggtctccacgccgacgatacggtccggcgcgaggcgtgagtgctcgataaggaactcggcgtcttccttggtgtagatatcgttggtgaccacgcagatgctgtattcgtcagccatcttgcgggtcaggcgttcgataagcgcggttttgccggaaccgaccggtccggcgacgccgatgcgtacgtatgacatggggtttctcctttatgtgggaattagttaggtatgtggtttgcgggtgaggttatcctggctcccctccttgaggggagccaggataattagctcatgtagagcctcgagtacaagatttcatgctgcatggcggcgatgtcgaggtaagctccggagatgccgagatcctcgggcttcaacgtcatcgcgatattcaccgcgcgcacgaggcgcgggaacgaatcatgcagggcgacttggccagcgtactggctgagcggaatcgccttcgcggcgcacatggtaagcgcgctcaacagcgaatatccatacatgatggccgcgtcgcgcacgtcgttcgcatggtcagccgcgtacaggcccatcgcgatcgaatgcaggccacggcagcggcgctcgcgaatcagcccggcatacaggtcgagcgacggcgagccgtacaggccgtcggcggcatcgtgcagctggtggcgttcggtgtgatgctcgtgcacggcgatgatgctgttttcgcgcgaatccgcagcggatgcggtggcattgtcggcaggacttggcttggcgaacccacgatgcccatccgaggtctgcgcctggccggcatccatctgctcggccagcttgaccaggcgggtacacatgcgctcgctgccttcacggatttcacgtgcggattgcagggccgaggccagctcgtcaagttcgatgagtcgctcggccagccctttgcgggagactcgcgaatcggtggcgtacttgccggccagcaccatctgcccgatttccttgtacggtgcgacttcgaggtagttcttcatatactcctcgaaatcggcgccacggcgcaagaagtcgcgctgtacgaaggtctccatgccgttggacagcgcgaacgcgcccacggggaagacgctgtcgcacacctgcagcatggccagacgtcgcgattcggtttcgttgatgttcatggggctatcagtgggtgtgccaggtgcggccgccgtcgtggctgtgggagccgtccgggcggtgcagcacgccgttcatctcatattcggcgggctcaccctcacctgcgtcgtgtgtatgcacatccagatggccggcggcctcctcggccgggaattccttgtcggcctcggcttcctgctcctcctcggccacgtcgcccgtggtcttgttggtgcccggaatcagtgtgccggtgccggcgtgggccttgacgatcaggaagccgtcaaacccaccctcgatgatatgcggttcataaccgatcttcttcgtgtattccatggtcggatggtcgtacggcaccagcacgcggtcgttctcgaccttgagactcaggtggcggttgcccagttcgaagcacaggcgtcccatttccgtcatcgagttaaccggaatctcaatcagctgtgcggttttaatgcgtgcgaaatagcgcttgtcttcggtttcggcgagcacatcgccatccttgatggtcttgccaaccatgatgccgaactcggtgccgtcctcggccaccttgcgcatgcgcttcttatcggtttcgaaccagtcgaaggcaatcgacacattaagtttgccgtcgctgtactgctgactgatgatgttgccggtgatttctttggcgatcatccgttctccttggagaaaattgcttgtggcgtgagaatccccacgtccttcatgccacagtgtagagagcctgttgcgtcactttgtaacgaatgatcgaaatatgcaaaaaatatagcggaaaaatatccgaaaacacggaaaccggatatatggtacacggtgtgtcgctagtaattgcaagctattttgcatggttgtgcattagacgaatcacagttgtggtattacatatcacgttcctagagcgggaggttgtggtcgagctccgaaatcaacaaaaagagggaagttggatatgatcgaagtacctgacaccgtcacattggcgatgcacattccggataatttcatttcgccgtccaccggggcgttgttctacgtcatcatgattccggtgtgggtgctgtgcctacgctacgtgatccgcaacagcacgccggagaagatggcctacctgggcgccggcgcggcgttctcgttcctcatcatgatgttcaacgtgcccacgcccggcggcaccaccgcgcacggtgtcggcggcgcgctgatcgctctgctgctcggtccccagtacgcgacggtctccgtgtcggtggccctgctgctgcaggcgctgctcttcggcgacggcggcctgatcacgctcggcgccaactgcttcaacatggcgttcgtgctgccgtttgtggcttacggactgtacgtgttgctacgcaaggtgctgcccgacggctggaaggaacgcgtggccgaattcgtgtccggctatatcggcatcacgctcgccgcattctgcgtggcgctggaactcggcgtgcagccgctgctgttcaaagccgctgacggccaggcgctctacttcccgttcacctttaacgtgacgattcccgccatgctgatcccgcacctggccgtagccagcgtggtcgagggtctggtgaccgtggtggttgtcgaattcgtgcgccgtaccgcaccggagattatcgaagacaatgcccgtgtgaacttcgccgagaccgccggtgctgacggcaaacaggtcgcgcacgccggactgcgcaagtctgcgtggattgcgctggccgtggtggcggtgctttccccgatcggcctgctcgccaccggcgacgcctggggcgagtggggcgccgaggacttcatgagtgccacggggctcaactacgtgccgcagtacatcgcccatggcttctcgtgggatgcgctgttgcctgactactcgctgcagggtctgccggacatcgccggctacattctctccgcagtgattggcatcgccgtgctcactatcgtgttccgtctgctggcgctcgcggtgagcggcaacggcaagacatccgcgcgttgacgatacctgcatggatgcgtgagtcggaggattacgatcctccggctgacaagtcatccttcatcgaacacaacctggggcatttcggcagcgtactcgagcaggttggtcatgcgttgccgattgagtcgagcccggtcgacaaggtgctgggctcggtcaatccgggcgtgcggctgctgggcatactggccgcgattgtctgcgtcaacatcacatgcaacatgctgttctcgtacatcatgctggcggtggtgctgctgatgatggcgacccggccggcgcgcctgatgaaggcgttgctcggcccggtgctggccgtatgcatcctgagcctggtcgtggcggtgccgagcctgctgattgggcagtacagtgcgccggtccggctggtggtgcgtgcgttcgtggcggtgtcgctggtgatcgcactggcgcgtacggtgccgtggaatcgcctgattgccggactgcgcgcagttggctaccctgattcggtgatttatatctgcgacgtgacgattcagttcatcgatattctcggtcgttcgatggtggagttgctggatgcgctgcggttgcgcagcgtgggccgcgaccggaccaagctgacgtccgccggccagttgatgggcgcgctgtttctgcgtgcgaatacgcaggcgcggcaaatggctgaatcgatggtgtgccgggggtttgacggtacgtatcatatccaccacgagcgtctgctgacgtggcgcaacggggtgtatgccgtgtgcattgctgcaatgattgcgctggcggtgtattcgggatgagggtggttcgaatgaatggagcccaataatgttcggattaaagcgtaatcataaacaaactgcagccatgcagccagataactcatggttccgcggcgacccgctggtcgaactgaatcacatcgacttttcctataaagattacggcgacgccgacgatgaaacctcgtcgcacgccgtgctacgtgatttttcgctgaccgtcgaacgcggtgagcgcgtggcgctgctcgggccgaacggcagcggcaagaccacgctgatgcgcatcatcaatgcgctggaatttccggactcaggcgagtatcggtttggcggtactccggtggttcgcgaggaagtcgaggcgaagaacagcctgttcgccaaagcgctgcatcagcgcatcggattcgtgttccaaagctccgacacccagctgttctgcccgtcggtggaagaggagattgcgttcggtccgttgcagatggggttgccggatgccgaagtacagcgcagagtcgatgacatggtgacgttgttcggcttggatcggatgcgggagcgggcgccataccgtctgtctggcggtgaaaaaaagcgtgtggcgattgcctgctgcatgtcgatgaatccggacctgcttgttctggacgaaccgaccgacggcttggacgagcgcaatactgacgtagtggttgaggtattgcgcgccttcactgatgccggcaagactgtactgttctccacgcatcaccacgacatcgtggagcggctcgacgctcgcatcgtgcgcgtgcatccgtcactatggcaatgacattcacgtggcgtctattggatatcttcatcgaaaaaagcagaaaggcatcggcgaggatcgcgagtccggcgagaactgcgatagtcgctttggtgatggttgccttcatgagagtttccccaaggtgttgacgttgatttcatgagattcgaaaaagagcgtatctaggccgaaccggacagtaagtcaacggtttctggaaaccagctgaaaaagctacggtattgtgaaatatgtctcatcggaatgggtcaagtttggcctagcgctcgcagtcgtgcgcgaagattcgttggattgattctcggtggattaagtcataggaagaaactagacaccttgcggtgtaaaaccgggaatcggaatggtgtaaaaccgggaatggaaatagtgtaaaaccgggaatgagaaaggtgtaaaatctatattgaggtgattgggtagctgagaaaggccggaaaatgaacgatttgaacaatcgtagtgataccttgactcaacctgattatcgtgctcgcgtggtcgatggcaggttaggtaagttacttaaagcattcggcgcggtggaaatcgtcgggccaaaatggtgtggaaagacatggacggcgctttcccgctcgcgaagtatggatcgtctggatgatgccgctacctttgcggccgcacagactgatccggcattggtactcatgggtaatgaaccgcatttggtggatgagtggcaagatgtgccgcaaatttgggatgccgctcgtcgtcatgtggatgacaatgcgaatcgcaaggggcagctgattcttacgggctcggccattccgaaggaccgagaaacaattcaccacagtggcacaggtcgaatttctcgcttgcgtatgtggcctatgagtctgtgcgagtcagggcaatctaccggtgtagtgagcttgtctggtttgtttgatggacaattcgagcctgccgaatgtgcaaccagcattgaagatattgccagatggtgctgtcgaggtgggtggcccgcaaatcttgatttggatgacgagtttgctctggaaattccgagtgaatatatcaagagtgtgcttgatatcagcgtgcccaagatgaacaagaaccctgaaaccgcgcgtgcactcatgcgtgcgctcgccgtgaacgtatcgcaggcaccaaaatatgcgacgctggctgcggatatggcctatggcgatgagcgccgtgaaccggatacgcagacagtaaagagctatttgggaatgctcaaggacttgtaccttctgacggatttggagggttgggagccgccactccgcgcaaagagtcgtgtgcgaaccaagcccaagcgatatttcgtggatccttcgttgcctgctgcggttttaggtgccgcgccgaatactctgatgcgcgatacacagacgctcggcgatctgtttgaaacgctgtgcattcgtgatttgaatgtatatctgtcggccatgccgggcgcgaacaatcgcatcgcctactaccgcgatgacaaggggcttgaagttgatgtcattatcgagttgtctgatggcaggtggggtgctatcgaaataaaactcagtgaccttaaggtgaacgatgacaatgcggataagctcaaatccttccgcgacaaaatctgtggcaaccccatggcccaagttcgcgaaccagagttcatgatgttccttaccggccgaggtgggaaggcctatcgccgcaatgacggcatactggtcgtgcccatcgcaacgttcggggcgtgaatcgggtaaaagaaaagaagcgccgaaccgcgaaagcgcctgtcggcgcaagggccgctcgcggcggcaaaaaatggagcccggggcttaagcacggtccgacgcggatacttagtatagcttgcgatggggctcgccgcgccggggaggtgtggtgttggctggtagctgattgttggggtgcggttggtgggtctctccctcagtcacgggcatcgcccgtgacagctctctcatcagagggagcccggagcaggatttactccaaccgtccgcgacgccagaggttggcgccgtgctggaaatccttggcggtggccatgaggctgccggcggtgtgcataaggcgggcggctttggtacgcacggccttctcatcggcatccgaggagaaggcgccgttggcctcggcccgggtcaccatgcgccgcgcctccacgcgcaagcccaacgccaccacatcggtaaacgccgccgcacgctcaagcgccacggcaaaatcgcccacaaaagcaccggagagaatcgaatcggccaatcgcacgatgtcatcttcactgggagcctgatccacgccggcgatggcggaggcggtagtggccaccggctcacccaagcgccacagatgcgcgatcgagtcgcgattcgatcgcatccacgtacgcaacatatacagtcgccacagcacaccaggcagcgaatccggctcggcatcgctccatagttcggcgatttcatccacgccgaccgtctccaccaacgtgagcacccgctcaacaaccgccgggtcttcgctatggcgcacacgatccagcaatgcggcagcagacagatgactcatctcgctcaacgcctgcgggtccatgccaccggccaatccatcggccacagccgggtcgagctgagccgggcgcgaggggcgtgaagaacccatgcgagcaggtccgaatgccgctccggccgcacgcaacgagccgaagcccgggcccagactgccggcggcaccattgtgcgcggcatgagctgcagcggcagcggccgaggagttggatgaatcaggaaatgcgggtctagtagacaagcggttgaaccttctgaatatcgatgattttgggaccatgaggcgtcggagtgacgaacagcgccaccgccgtgccggtcggcatgaacggtgtcttggcgatcaggcgtttgctcagagacggcgcaacgcacatgctgcgcaggtgtccgaacataccaccaatcaccggccggtgcatgcatatcgctatgggctgacggcgctcaagtgcgaactcgatttcgctgagtagacactcccatgcggtgtccggcgcagcggcgtatgcatcttcggtgagcggatcgagatgaaccatgtctcgtccggtctgccacgcgaacatctccaacgtctcctggcagcgcacccaaggcgacgtggccagtcgggtcggattgaaacacgccagctcgcggttcagcgcgtatgccgcagccgcgccgcgcggcgtgatcggacggttcgcgtccgaacccttccacagcttgcgcgcttccgctttgccgtggcgcacgataatcaccggcaccgcgtccagtgcaccttcttcgacccgatcaacgaatagcgcgaggatgtccttatcggtggaatggctgagcttcttgcgggcctcggccggcgtcagccacaaaacttcgtcgatttcgccgatgtccgcccgatgcaccgggccaaacgcatgggtacgccgcaggttgtcgatggcgctgatcggcgtggccatccagaactggatatgcttggtatccgccgaccgatccttggtatggcgctgtttgctgccttcttcggacagcgggtactcgatgtcgcccagataagggccaagttccacggacaggcccgattcctcgccgatctcgcgtacggcggcatgccggtgcgattcgttcgggtcgaccttgcctttcggccagctccagtcgtcgtatttcgggcgatgcacgacgcacagttcgatgcggttgagtacgttgtccgccgcggccgggctgtcggcctgcgccgggtccggggtgggagccgcgtccgatgcgccgggtgctgccgtggccttgccgtcagaatccgtggtgttcgcgatgatggtgccatcggtggcaatattggatttcgctgatggagacgatgcctgcgtcggctcggcatcatccttccaccggtacagaataccgccggcggcttccacgattcgtctcatactgttcgtacccatctcttgtattgtaggtcacgttggaccgctgctacgtagtttttgcgcgctgaacaacgatgcccggcatcctctcgaaagaggagccgggcatcgtaaccaccctcagtcagctcgtgctgacagggagcatcgagtgaaatcagttgtgcgaattggggcggcgctggtgcttgcgaatcagatattcctgactgtcgaccagcgggcggccctcgtcgtccttggtgtgcagcacatacgtgccgtcgggctgcatgtgccagctcatggtggagtcggccatctgcaggtccacgtacttgatgagcccgtcaatctgctccggggcggtgacacgcaccagagcctccacgcggcggtcaaggttacggtgcatgaggtcagccgaaccgatgtagacctccgggccggaagccggaccctcgccgatctgcgggccgtccgcgttgcagaaggcgtagatgcgggagtgctccaggaagcggccgaggatcgaacgtacgcggatgttctcggacaggccgggaacgccgggcttcagagcgcagatgccgcgttcgacgatgtcgatcttcacgccggcctgagaggcacggtacaaggcgtcgatggtcttctcgtccacgatggagttgaccttgatcttgatccaggcctccttgccggcgcgggcggcgtcctcctcgcggcggatgcgctggattagaccggtgcgcacggtgcgcggggccaccagcagacggtggaagctggactttggcgcgtaaccggagagctggttgaacagacgagtcagatcctggccgaccaccgggtcgcaggtcagcagacccagatcggtgtacagtcgcgcggtcttcgggttgtagttaccggtgcctacgtggcagtagcggcgtagaccgtccgcttcctgacgcacgacctcgatgagcttgcagtgggtcttcaagcccacgatgccgtacaccacgtgcacgccggcgcgttcgagcttgcgggcccacgcgatgttggcgtcctcgtcgaaacgagccttgatttccaccaaagccagcacctgcttgccggcatgagcggcgtcgatcagggcgtcgatgatcggcgagttggagctggtgcggtacagggtctgcttgatggccagcaccttcgggtccgcggcggcctgcgcaaggaaggcctgcacggaagtggagaaggagtcataggggtgatgcagcaggatgtcgcgctcgcggatggcggcgaaaatgtcctgcgcacgggaggactcgacctcggcgatctgacggttcgtggtcggcacgaacggacggttcttcaggtccgggcggtccacgctgccgagctcaaagagcacggtcaggtccagcgggctgggcagacggtatacctcgtcctggctcacgccgagctggtcggcgagcagctgggagaggaacgggctagtggtgtccgtgatctccagacggatcggcggtccgaagcggcggcgcagcagctccttctccatggcgttgagcaggttctcggcgtcatcctcttccacgtcgatgtcctcgttacgagtcacgcggaaggagcgggcttccttgatgatcatgcccgggaacagggattccagatgcgcggcgatgagcttttccatggcgatgaagccgtaacgctcgtccttggactcctcgtcggtcatgtcgtccaccggcaccaggcgcggcaggttgcccgggatcttgacacgggcgaagtgcgacttgccggaggccgggttctccacaatcacggccaggttgatggaaccgccggaaatgtaggggaacgggtgggccggatccacggcgagcggcgtcaggaccgggaacacctgctggcggtagtagcgcgagagacgctcctgctcggaggaggtgagcttgtcccacgtcagcaggacgatgcgctccttctccaattccggcagaatggtgtcgatcgcgtaatgtgcgtgctcgtcttgcagacggtgtgcggtctcgctgatcgcgcgcagctgctgacgcgggctcaggccggcggcagacggcacggcgatgcccgagtcgatacgacgcttcaggccggcgacgcggaccatgaagaactcgtcaaggttcgaggcgaagatcgcggcgaagttggcgcgctcgagcaggggcatgtcttcgttctccgcgcattcgagcacgcgctggttgaacttgagccagctgagctcgcggtcgaagaaacggtccttgggcagcggtgcctcgccttcctgatcgacgcggcggtcgttgttgtcgttttcggcaatatgctctgcgatttggctgcgcagaattgccttcgagggtgcgtcaaatatctgtgccatagcttatatcgtaagctctggcgtggccggaaaacggctgaacgcgccagaattcaacgggcgttcatgttagttcggtgttggttggttctgagtgtgctagcgtgctcgcgacacgccgtgagcggcggtgaaacgaacgaaaccgaacatcagacgggttcgatgtgaacggttcagctcgttttccgatagccagaaagtgcgattgaacagttgtgataaaaaacgcacaacgactctctgcaggttgcgagaaacgggagtgatgaatagattatgaggtacaagaacaactgaacagagcagagcccacaaatagtgtatggtcacgaggactgttacgttggacgggcattggaaagacttaccgttacgacgatgatgttgtgcagagattctgctccagtagttgaacttgtagaaaaggcccgctccggcgggccttttcgtttgtgtgtacagtggagggcatgacggaaacacagcgtacgccagaggggatgtcgtcgaaaccccgtatcaagccggccgatgccgaagacggccgcccggtctctatctctgcgcgtctcggacgactgcaattccactattccggcaagttccgcgtgctgcagattgccgacattcaggatgggccgaaagtctccaaagacaccatcgccctgattgaggccagccttgatgccacacggcctgatctggtgattttctccggcaaccagatcgccggctacgatccggcctttgccaagagcttccgcaaacgccgttggtgcgaagaggcgattcctgaatctgcgttgaaccatacgcgtgaattggtgcgcaaggccatcggtcaatttacctctcctttggcgtcacggggcataccgtgggcggtgacctacggcaaccacgatttccagtgcggtttgagcaatgccgaactcgacggaatctaccgcgagtttcccggttgcatcaatccgccgagcgatgcgctggccaagcagaccgtatatatgtgtcataaggacggctcgcctgcggcaaccaatggtgaagaaaccgatgcgccgatttccgcgtccaccattcccggcacttttgcattgccggtgatggatgtggattgcacgcgcaacgtactgggactggtactggtgaattccggtgactatgcgcatggaggcggtttcggcacgccttcgcccgagacattggccttcctcaaggctttgcccgaacatatcggagccaaatcaatggtgttccagcacatgccgctgccggagtattaccaggtactcaaaccggtggccgccaatgcggctttcgccatgcagggctaccgcaagcatgcggatacctattatgtgctggacgaggatcgcactcaagccggcgggtatctgggggaaggcatttcctgcccggatgagtcggacgagtttgaggcgctgcgcgaggggtatttcggcgtcgtagctggtcatgatcatcgcaacggtttcgtcggcgaacatgagggtctgttgcttatcgctacgccaacctgcggattcaatacgtacggaccggctccggccaaacgtgccacgcgattgatcgaatttgatatccgtcacccttacgagccgcgtacgcaattgctggagtttggcgaactggtgggcaagcccagttccaaacgcgcctacacctatgcggtgaaccaaaccgcgcctggcgagggcgagggtgatgatttgctgcgcaagccgtcgctatggagccaactgtccggtttattcaggtaacccggtttattcaggtaactgttcctgatagaagcggaaagcggcgcgaagtattcgtatacgcgcgcggccggaggcgcggccgtataccggttccatatcccggcacaaagatatgccgacatatgatacaagtgataacatttgttgaataaagggttacgttttcgcgtttagggacgtgtgcttcggcgcgcattcaaacaagcgcatcccttgcggtcactatctcacgatggttcgcgcgaagcgatgaaccgtcagtatgtgcggagttctggtatggtcacacgtttaacgcggttggcgacggctgtcgcgctggtcgtcggcatgatcgtaccggtcgccacggccgccgccgtcgacggggggggggttgtcgatgccgcacaacagacgccggcgtgcggtcgtccttggaaccaggacgaacagggcgccatcgttgattccagcaagccttccggccgattggtcggctgcatcagcaatgccgcagtgcaatatcgattgcagaattcgacgcaatggcagaacgttcccgtggatgaacacggcaatgtctcgttcgattacagcacgaaaatagcccaattccgttttgacgcgcaattcgtcatacccaaaggaagcatcaccgaagacaaccacgtgttccgataccacatcgcgggattcaacggcaccggtaccgccatgtcgggcacgctcaacgacgatctcggcacgtacacgatcgctccagacggattggtgaccatcgtcttcagtgagcacgccatcagcaagaacgccgccgccccactggacaatggccgattgtacatcgaagccgatcgcaacaaggtgaccggcaataatccagggcagaccgtattggatttcggcaacggccataccaccaccatcaccatgtaccgcagaagcggcagcacctccaagcaggtcgtcggcacgccgacgctgcaaccggacggaacgctcagtaccagatggcaggcgcaatacgtcaacacgggaaccatcgaccagccaatcgtgaagatcgaggattggatggcgtatgagaacgttgcggaacagaacggttccacctcgtcaagccgaggatggtacacggctgagaacatcaacgatctgtaccaaacgttgaccacaacgatggggcacggcacgttgacggtatatacggtcacgctgccgagctacaagggcggacccgccgtcacatggccggccggaggattggccacgggaacctattggaaatgggttttccagccggattcgtattcgattcccgcagggcagacgttgacgttgcaatacgattcgacgttcgccaatgacgtgctgtatcccgcttcgaaaaacatttcgcggttcgtccgttccaataacggaggcgactatttcaccaacaacgcagtcgcttggaatccgctgcggccaaggatctcactcaccaaaacggcgggcgggca

SEQ ID NO: 1592 - DNA, 5198 bp, Unknown
  R221_24m  MAG No. k141_46173
atgtcagcggaaagctgatcaggagccgcagcagttcccgacaattgaaccccctttcttcttctctctcctttctctccccggcgggcaaccgccggggttcttttttgccctgaatcattcccccgaatgaccgccattcccaagccatagcggtacactggctgtgtaatcggcaggaaggggggcaccgatggcccgcaacgatgaggactacgatttcttcggcgatggtcagtatgacgattcgcgcagctcacgtcgtgcacagaatcgacgcccatccaggcggaatgccggccggcgattcgccgctacaaaagtcagcagcccaacgtcgatattgtgccgcagacttgccgttgtcagcggactgctagccgtcgtggtatcggccacctcggcggttcatgaaatcgcgccttacgccatttcctttatgacggcagtgccaggacgatacattgcgttgacggcggcggtgcttatcagcatcaccctgatgctggtcatcgctgcgcgagtcaccatgcctcggtacgccactcacgggggagtgggcgcgggcggcatcatcgcactggtgtgcgccatagtttgcttggttatcggcgtggccatgggcgtattgttcccggaaggactgattcagcagtcgaacgacaaggcacccgtcgaagataccgcacagatggagcaaggcatagaacaagctgccggcgcgtgcaaagaaggatggcaggggcttgatacgggcggtttgccaggcatcaccaccgtacagatgtgcactgatccgagagtggccttcgtgtcctttgaatcggaaacgtccgcagccatcagccgggcacctatcgaaagcaagatttccgaactgctgagccaatacgctgataatgagcaaacgaaaggcgattggcgattgctgaacggcaaacgctggatggtgttcggcgagggcagcaagatgaccgcactgcagcagcagtggggcggcgaacttgagacaatcaccgcagccacagacaccgcagccgcaaacaacggtaatgcctgacagattgccggtatcccctggaaagtcccaaggcgattcggcgcggattacccaatgtgactgaaatcatggtccatcgttttccgcacagcgcgcaagacctctatattggattggtatgagcaaagaagcgaatgccagccagcctctgatcggccgcgaatccaccactgtgcctggacgttttggcgagccactcaccgtggaacacagcgtcacctcgcgcggcggcttcgaccagcatgccacgcatccgctgttcctgtgcctgcatggatggggatccagcgaagaagacatggcggacatcatgcgcctcatcgctccatataacgacttcgtggcattgcgcgggccgctgacactcgcgccggcccgtgaaggcagtcccgaccccggcaactacgcgtggtttcacgatgccctgcctatcggcgatgatcgtgactacgacgcgtatgccgccgccacagcagtcgaccgatgggtggccgacaacattcccgccgaccgtgacgtggtgccgcttgggttttcgcaaggtggactggtcgccgtgcatttgttgcgcatcaaccccgagcggtaccgggccgtcgtctccctgtccggcttcaacacacccggtcaggtgcccggcacggcccccgccgactctcgcctggccgattacgatatccccgtgttctatacgtacggcaagaacgatggcgtaatcccgaaatacgaactgttcgccaccgccgcttggttggaagagcatacgtggctgaaaaccaagagctaccacggtctggatcacaatgtgagtcttgaggagttcgccgatttgcgccagtggctgctcgacaacgacattacctctggcgtgctgtagtcagccgccatcactggaattggcgcggccgtcacagcaatcggacatcgagggcgcttgtggccggcgcggtcatagactgttctcccatgagcgaagtgagcactgcaagcactactgcacatactgaagagaatcatacggaaatagcaatccccaacttggctcccctcagagaagggagccaaggaaactagatgccggaatcggcatcgacctgcataacgtagatgttgcgcctcagggagcgggcttgggctcggttgatgtcgccggcttcgtacatgtcctgaatcacaccgagttcgataccgtagctctcgcgctttacgtcctcgacctgcgtgatggtttccgtagtgccgctcatattcggacgtgcctgcaatgaagcctcagcgcgacgataatccagcaacagcgccgaacaatgctcggtgttgtacgtatcctggcccatctcgtcaataagccggccgataacatgatgaatcgcctcgacctgcagttcgcgggtgcgcgcgaaaatctgatcctcgctcaccaatggtgtggtatggcgaatcttggacaccgtgcgtttggcgtaattgctcatctgccgctggaacatgcgtaagcgaccgcgaatctgcgataccgcatgccccgaagtcggatcagtggaagtgtgacgcagcgtattcataatctggtcaagcatgcgctcgcaggcttcgacgttcagctcttgcgtggccgtatccgccgccggatgcgccttggtgtcggcaagtcggtcgcgcacgaattccttttcccaatgcagcgcttcgatctgcaattgctcgaatccctgaggatcggtatcgccgatgcgctgctgcaatcgtccgatgcgcttggtgtattggtcgattaccatcagaatcgcacggcgattctctggcgtgatgcgtccggtcaattcctccaccgtggcgcgtaacacatcgatggtcaccggaatcatttccgcgctgggatccttgccacggttcggggccaatagcggtaacaggaagttggccagcagcaaggtcacgataatcacgcctgacgcaatgaaaatcagctcgtcacgcatcgggaacggcgcaccgccggcaatgtaatacgggatggtaaacatcaatgacagcgtgatggttcccttggggccgccaaaggtcatcactgcggccgagcgccagcgttcgggtgtcattttgcggcgctggccggtgattgtatctcgcgcaacgcgcagcatggccgcaatccagaagaatcgaagcgcgattaccaccagagtgaccagcagaataatgccgatcagcacggtattgctgatatacgggtcagaccagctggccctcatggcgcgcggcagctgcatgcccagcagaatgaacaccgcaccgttgagcgagaaactcagcacaccccatactgaagtggaaacgatattcgtacgtgccacattcggccccacgccggtacggtcgaatcggatgaacaggccagcggccaccaccgacagaatgccggacacattgaattcctccgcgcccaaatacagcaggaagggcaggaacagttccatcagaatacgtgtggtggtggtttcccaaccgagggatcgcacggtctcgaatagccagttggccgctgctgctatcaccaggccaaataaggtgccgccaaagaaggagatcacgaattcgccggcggcctgccccacggcgaattcgccagtgaaggcggcggccagagcgaactggaagccgacgatgccggaagcgtcattgaagagtgattcgcctttcagcacgctgcgctgacgctgcgtcagcgaggcttctttacctagggagctgacggccaccgcatcggtcgggccgagtgccgcgccgagtgctaaggctgaggctaaggtgatggacggccagacggcatgcaaagtgaatccgaccgccgccatcgtgacgatagccagtccgatagccagcgataggctcagatccagcgttttcagcaacgccgacttatcgatttcgtgcgcttccagatacagcagcggcgcgataaacagcaccatgaacagttccgggtcgagctttgcatccgggaaaaacggcagatacgtaaccagcacgcccagcacaatctggaccagcggtgtggaaaccttcggtacgaagcgactggcaaacgagctcaccaccaccgccgcaatgatgcataggatgagctcaaataccgccatgttgccgccttctcgtattttttctccaccaaaagtatatgggaaccatgaagaaaacgttaagattgcggccgattatgcacatcatgagacgatatgagaaaaaggcatacactcgttggtatggaatatgacgaggcgatgcgctgcgcactggaactggccggtcaggccgcagccgctggtgacgtaccggttggtgcggtggtgctggatgcggccggccagattgtcgggcgcggatacaacacgcgtgaggctgatggcgacccgcttgcccacgccgaaatcatcgccatgcgtcaggcggcccaagccttgggcgcttggaatctcgccgattgcacgctggccgtcacacttgagccgtgcccgatgtgcgcgggtgcctgcatccagacccatatcggcaccatcgcgttcggtgcctgggatcccaagctcggtgcatgcggttcgatttgggatattccgcgcgatccgcatatcggccatagtcctgaagtgcacggcggcgtgctggaaggcgagtgtcagtccatcctgactgatttcttcgcccagcggcgatagacacggacgcattacttacctcacgcaaccaacacgcggcaccaaggcaacatattccatttcttctaccatcgaaaccagtagtgcaatgcaaatccacacacgtcgaaggagacaatatggccgagaacacctccactttcaccggcgccgccgctgacggcaccgcactcaccgccgtctacctgacccagcccgccgccaatgtggcgatcggtctggtgtttgccggcagcgacctgccgcacatcgtccactggggccgcccgctggccaagcccgacaccctgctggccgcctatgacgccctgaagccgcagcgcgtgtccggcgcgctcgacgacaccgcctggccgtctatcctgcccacccaggccgaaagctggatcggcgagcagcgcgtggtgctgcgccgcgccggc

SEQ ID NO: 1593 - DNA, 13041 bp, Unknown
  R221_24m  MAG No. k141_46473
caccgcagctcccgctacggcagttgccggcgcaagcgatgatccatggaatcagccgcaatctcaggctacggcctcgctggcactgcaaccggtcgaagccgacccgtggaaccagccatatcagcagtctcctcacgacgacccgtggaatcagccgcagtcccagactccggcttcttcggttcctcagacagtgtcgggcaatatgtccggcgatgacccgtggaaccagccccaatcggttccgcagccggctgccggcgatgacccgtggaatcaaccgcagcccgcacagccgacgccgaatgccgacccgtggaatagccagccgcagccgcaaccgcaagtcgcggccgaggacgacgaatactcgatgaacgaccagtcgctcggcgaggcgacggccatgaatcttgacgatctgaaaaagctattcgaggtcaaaaaagtcgagcaattcgcggcagatgatccgaagaaccccaagaacatccagcctgccaagaagcactcggatgaataatgaggacgaataacgaggaatacccatggcacttgcttatgacggcgcaatacagcgactgatcgacgctttcgggcggctgcccggcatcgggccgaagggcgcgcagcgtatcgccttctacatgctgtccgcgcccgaagatgaagcgcgcgatttggccgaggccatcgaggaggtcaaggccaagatccgcttctgtgatatttgcggcaacgtgtgcgaatccagcccctgcccggtatgcgccgacccgagacgcgaccgttcggtgatctgcgtggttgaagagcccaaggacgtgatgagcatcgagcgcacgcgcgaataccgcggcctataccatgtgctcggcggcgcaatcaacccaatggccaacgttggccctgccgacctgcgtattcccagtctgctcaaacgcttagaaggcgatgaggtcaaggaagtcattatggcgctcgacccgaatattgaaggcgaggccaccaccagctacttgacccagctattgcgacccgtaggtgtcaaggtcacccgacttgccagcggcctgccggtgggctccgacttggagtacgccgacgaaatcacgctgggcagggcgctggccggtcggcgtgaggcctaggccagcgtatcattggcgctttcgcccttgcggcgcatccacggccagaatgcgccgtggcggatgatgcgcgcggccttgtgccgtcgtgccaaccagataatgaacagtcctgccgccagtatgcccaggccaacaccaagggcgatattgcgcgcgtcaagcacgtcattcggctcggggccggcatcggaattgccacgcggtgcccggagataagcagtcgatgcgtgttcacgccgtatggcgtacaggtcatcaaggtgacacggtcctcacccggcacaatcttgagcttcgacgtgtcatccggcaaaatcaccgaaatgcggtccactttgtagcccaaagtttcgcccatgacaaggtattcagttatggggttctgcggaaacctcgccggtttgctttcgtctgccggtaattgatagttaaccgctcgaatcttaaaggatggatgcggctgtctcaaagaaccaccggtgaaaacttgaatatttgctgaacaacgtaggccatacccgtgtccgcatgccggcgcggggtcgcggggtgaacgcgacagcccttataatcgttgcgtttgcgtagaatatcgaccaaacaaatccctaagagaagaacaaaggacagcagtggctctcatcgtgcagaagtatggcggctcgtcggtcgccgataccgattcgatcaaacgtgtggccaagcgcgttgtggagacggagaagaagggcaataaggtggccgtggtggtctccgccatgggcgataccaccgatgaccttatcgatcaggcgctgagcatcgactccaacccgcccgagcgcgagatggatatgctgatgactgcaggcgagcgaatttccatgagcctgctggccatggccattcacgccgaaggcagccgcgcccactccttcaccggtcagcaggccggcttcttcaccgacacccgttacggcgcggcccacatcaaggccgtgagaccggaccgcgtgaagaacgcgctctcattgggagacatcgccatcgttgccggcttccagggcatcaacgccaagggtgacgccaccacgctcggccgcggtggttcggacacgtccgccgtggcactcgctgtggcccttggtgccgacatctgcgagatttacaccgacgtggatggcatctttaccgccgatccgcgcatcgtgccttccgcccgccgtattccttccatcggctacgaagccattctggaaatggcctcctgcggctccaaggtgctggcactgcgctgcgtagagtacgctcagcgtttcaacatgccgctgcacgtgcgctcttcgttctcccgtcgccccggcacgctggttgtgcctgacggcattgacccgcgcacgctgccgaacctcgactgagcgcggctacagcgaacaataatcgtaagtaatttcaaccaagacaaggcaagacatgactgaagaagaagcgaaatccatgggcgacctgttccctgacctgggccccgaggcaccggtgatctccggcattgcccacgatcgttccgaggcgctggccaccgtgcgtggcgtgccgaacgagccgggtatggcagccaaggtgttcaccgagctggccaccgccgacgtgaacgtggacatgatcgtgcaggccggcgcatccgttggcactgcagacatctccttcaccgtgcccgaatcggccgtcaagcaggtgcagaacacgctgctcgacaagcaggaagtgctgggttaccactcctttgatgtgaacaccaacgtcggcaaggtagccgtggtgggtgttggcatgaagacccacgccggtctggctgccaagttcttccaggccctgagcgatgagggcatcaacgtgctgatgatctccacttccgagatccgtatcgccgcactcgtgccgctcgaccagctcaacgacgccgtcaaggcgctgcacactgcctacggtctcgatgccgatcagatcgaagccgtggtgtacggcggtactggccgctgagccgcgaattccgcgcctaatacgatgaaagccctccttgcggagggcttttgcgattttaacgagattcaactacttcttagtgatgtagcctagagccttgagcatttcggcgcattcgagggcgccgccggctgcaccacgcagggtgttgtgggccagacccacgaacttccaatcgaagatggaatcctcacgcagacggccgatggaaacgcccatgccaccctcgtagtccacgtcgagcttgacctgcgggcggtcatcctcggtgaggtactggatgaagtgcttcggcgcgtgcggcagctccagctcggaagccttggacgtgtagttcaccagacggtcgataagctcttccttggtggccttcttgccgaagttcaggaacacggtggcggtgtgaccgttgagcacgggcacgcggatgcattgcgaagtgatcttgaggtcgccgtcgaacggcacgatctcgcccttttcggcgtccacatggccgaacaccttgagcggttccttctcggacttcgcttcttcaccagagatgaacgggatgatgttgcccaccatctcaggccaatccttgaaggtcttgcctgcgccggaaatcgcctgataggtgctcacaaccacctcacgcggctcgaattccttccatgcggccagtgccggcgtgtaggcctgaatcgagcagttcggcttgacggcgatgaaaccacgagtggtgcccaggcgcttgcgctggtgctcgatcacctcgaagtgctccgggttgatctccggcaccaccatcggcacgtccggggtccaacggtgagcgctgttgttggagaccaccggggtctcggtcttggcataacgctcttcaatggcgcgaatctggtccttcggcatgtttaccgcagagaacatgaaatcaacgccagaggccacggactcggcatcgtcgccatcgacgaccaccatgttcttgacgtattcgggcatcggggtttccatcttccaacggtctccgaccgcctcggcatacgtcttgccggcgctgtgcgcggaagcggcaagggtgaccacctcgaaccacgggtgattctcaagcagcgtgataaaacgctgaccgaccataccggtggcaccaaggatgccgaccttcaatttttcggacatgatgacctctatgacctctgggtttcgatgggttacttacgttcggacggccgtcatacgggtgaccgtaaaacaatgacattgtacgaaacgcgcggaacaacagtagcggtcttcccagatggtgactgcccgatgaagcgaaggtgatgttctacactggtagccatgtctatcgcatcagtagaggcccaaaaacagctcgaccgtatcgtggctctcggctatccggatgtggcggatatttccgccgccgcattccgctcgctggcccgacccctgatcggggcgctcgagcattccgatttgggatcgaacatcctgctggtgcccacgcgcgaactggtttcgcctgagtcactgatcgcacgaacctccatcaatcgcatggccggcttcaccaccatgccgccgcgtgacatcgccagcttcctgcctcaagacggcttcatgccgccggaaggcccgttctatctggtcgtcaatccgcacaccggcacgtgctatatcaatcgcgagccggacgtggcccgcaagcttatcgactccgatgaacgcctgccgctcaccctcgaggaaggcttggccatcgccacccagcacccggagtggctgctggaaaagaacggcttcaatctgctcggctcacgctccgcagacggccgcgtgccgagcatctggatgagccagaacgcaccgcgactgggagctgtctggcccaattcccgccatacctggctgggcaacgcgtattgcacggcccgtcgcggggtgagtctgttccgttgactccgccagtgtgcgttttctctgtacaatgaaaggcatattgcatcatttcatcagagagaagacgcgatgaactgtgataggtgcggtgctgccaatgacgataggtcccgtttctgcacggaatgcggtgctccgctggcaccgaaacttgccgtgggacacaatacggtcactgatgttccgcctgtgccgatgccacccgccggtcccattcccggccccggtctcagctctagcctcggcccagcgtcgtctgcgcccgccactatcgcggtaccgcagacgccggtaccgggccataagcgtcgccaaggccgctgcggccgttaaagatatgggtgtgccgatttatgccaagcgagtagccgcaacatccaaggccgatacgaagaaagtcgtgtatacctacccggctggggcagccagtggacgataatggtgcgatttatcttggtatcccggatccctcagtcgagggcatgccggccgacgttatcggtatggataaggatgaggcgaaaaccgcagtagaaaacgcatcgaacaacaagatcgaggttattctcgagccgcgattttccgccaagaaggattttggcaaaatcgtagcttccaattacatttttggtgcgccgtttgaggcgagcaatgaggaaaatgattataaaatattgcaaccgatacgtctgtactacggtgtgggagccgacaacactgaagatgtggtgaccaccggttcaggtagtgattatgatttcgacccgcacgcggattatgccagcactagcaagagtgacaggagtttgccgtatatctcggctgcgggcgaatggcgtgttacgggcacctattgcaaggatggtttcttacctggctcgggtggatgcatctcgctgatttcgaagggtcaagacggaatgaaatacgggtccggttacccgtatttggtgcgcaaaggcgatgagtccaatggcatatgggacgatcgggtcacactgtgcacgcccaccggagacattggcgggtgcattctgcactacaaggatggttcgattcccgataatgaaaccaatatgcgcaaccacttgttggccaaacagtggggcatgttcgagatgtaccgtggctacggatggccggtatgcgacggcacggtctaccgaggctatggggagacggaagggtgtgaccatggtcaatatgtgaggactgatgatatccctgatggtcagcaatccggtgccacctacgaaatggatgacttctacgtttacttcccggtgggatcgaagatcagcaaactcgaggattccgactatttctccaacaaggcgctggctgcggcgaacaaggcggggaagccagacaccgaccggccgttcttcatcatgcgcgaccccaagggatacaagaccacaagcgtcgaagcatacaagaacggcgagcaaaccaccaatccgttcgtacccggtataccgatgagcggtggatacaacccgctagtgaagatggatgtggctcccagcgccgatgcgtcgtctgaagactcggccattgccaatacgtcgcagtcgagtaagaagttcgttgccgcaggcctgtatctgccggtgtatcttgcctctcaaggcaacggcaatgcggaaggattggcaaatacgatgatgaccggcatggacaacagtgccggcaatcaggctgtcggggcccttggcggatggagtgctgtcaattcatggctgagttcccatgggtacagcggcaccagcttcaaccgtgatttcggtgatgtacaggccagcaatgctggatatgagaattacagtaccgctcgtgacgcggcccgcatgctggttgccgttgatgcggtcggtggcactggtctgatgaacactgatattgcttcggagggcgtggtgattccgagcggcatgaccgtgcatgcacatcgtggcatgggcatccagaacacgtggaattacttcgccatcgtggaggtgaatggcaacaaggccgcggtctctgtggtcacgcaaaaccaaggtcaggatcgtgccgctcagctgatgagccaagtgcttgcctcggtggatagcacgttgcgcaaatagtacaagcagtatttgcacatgcaactgtgtatacggaccacgccttttggttggcggctgagtggggactattccatcgcgtcatttcccagtagaatgaggctatagtgcgtcattcgaccagagagaagagcaatgatgatctgtaagaattgtggtgctgacaatgatgggggaagccggttctgcatgcactgtggtgcgccgctaaccgacgtgagtgctcctgctcctcaggcggcggccggcccgattccagtgccgctgccggacaatactatgacggtgcttgatcacccgccgctgcccggcccaaacgatgggaacgcctatgggcagcccggcgtgccgacatcgagcggtgtggcaggagcgccgaccgcaccgggagcaagtcatactgggtcgatcgcaccgggagcagtgccgcaggccgctccgggtgctcctgtcgctccgggcgcagccacgccgccgagcggcacaacgaccgcaaccgccacattgccgaatctttcgggcaagcgtggcccgaatacgctgattatcgcgctcgtggcggtgctgctggcgttgatcgtagccggtgtggctttattcctgacgtatcgtgccgaggtgtggggtggtaagtcgctgcctgatccggcgtccatcgcctccagcgtcaccgataagaacggcaagaaggcatcggtggtcaaggccaaggatgtgaccgagacgttgaaggccaagggcctgaacgcgaagacggttccggtgttctccggcgaggatcgcggtgtgttcctcggctacgagggcacgaatcctggcgctcgcgtcaaggccggttccacggtggtggtgcaggagtcggccggtcccggtgtgccgaagggcacggtcggcaaggatgtgaacaaggtgacgaacacgttcgcgaatatgggcgtgccgattcactataagaaggttgtgatttcgccggacagcaagactccggaagggcaggtcagcgtcacgtacccggctcccggtgcagggctcaccgatgacgagaaggacaacggcatttacattggcgtggcctccaagggcgatggtatcccggtggatattcttggtgcggacaagaacaaggccgtcagcgacttggagtcgcaaggctacagtgtggatttggaaccgcattactcgtcagagaaatacgtgggcaagatttccggctcgtacccggctccgggatccacgttgagttccggccagtcggtgaccttgtattacggcatcgataagtccagcaacatggacgtgctgagcaaaaccaactcgtatgacaacatcaagatggccagcatccacgcgtccgcaatgatcggtatgtactgcaagagcgaggtgacggatgccgccaaggactgcatcacactggagcaatcctcgatgaatccctttggctccacttcatccgaggattatcagtacctgcaaatcaaaggccatgagcctgaagacaaggccgatgtgttgggcctgaccaacttctctcaggacatcagcggcgcgatgctggaagcggattcggaatacggcatggccgcggacaaattgccgatgaaaaaccatctgctgttgaaagactggggtatgttcgagctgtacgcgggcatgggtctgccgaactgcggctcaaaggtgatgtccgcttcgataggcgagtactgcgtgaacggcaactatgaacgggcgtcgttcgacgatggcgaaatgacgccaccggccggggctgagaacgggtcgaccggcatgacctacgacatgaaggacttcctggtctacttcccggccggttccgatgccaagtcattggatgattccggttacttcgacgccgccgaactggcgaaggccaagaagcagaaggccgtggataccagccgcccgtacgttctggttcgtgacaagagcctgtacagcgagatcagtgtgagcgccagccggggcaaggacgtggacccgtttgtgccgaccaacagcagtatcaataactatcagaacgcgctggtgccgatgaggccggctcccagcgattcgaccgtctactatctggtggagcagaacggcgatctcgactgggattccctgccggacgccgaggtcaagggcactggcgataaggccgcttccggtgagacgaccggtgacaagtccaaggacagcggcaaacgagacgccacattcaaagaggccatgaaacaggcggcaggtaactatagtttcggttccggtgtcggcgcatggggaaccgtaatgaaagtcaataaggatggcaccttctcaggctcctaccatgactcggatatgggggccacgggagacggctatctcataggaaacgacgtcgatacgctgaacggcaaggcattgctcaacgtgacgagcggagcggataagggatacacgttctacgatttctcgtagtgattcagctgccgtgcggagcggcggggaacgtgaaggaccggcgcgtatgctgtgcgaaacagcattacgtccctagactggtgaggcatgacgaacctgcgattccgcgaaaacggcagcttccgcgtgctgcaaatggccgacatccaagacggccccaacgtgctccccgataccatccgccttatccgtgaagccattcgcaaagccgacccggatctggtggtgttcaccggcgaccagatccgcggttacgatcctgcctacatcgacactttcctgcgccgccgtggcgaggaaccgggcgctcgcgtgcgtgcggtcaccgaggtcgaggccaagctgcgcggaatcaagcggcgggccagagaccgcgtgaacaatcgtctgctggccatgaagtccgacggcagcgattccgacgcccaacaaaccgcgtccaccgcgtccacgctggtctactccacaacatccgatccacaggatgtgccgacgactttggacgagctcatggacgagacccgtgacaaagtccgccgcacgtttgccggcttccttggcccggtcatcgaagcggaagtgccgttcgctgccacctacggcaatcacgatttccagtgcggcatcctggccgacgagcaggacggcatctaccgcgaattccccggctgcctgaacccagtcgacagccttgagccaggcacttttgccctgcccattgaggcttccgacggatccgggcgcgtagctatgtccgtcatgatggtgaattccggcgattacgccggcaagcccgaagagaacgacgcccaatacccggcctatgtggtcaatccgcgtggtcttgatttggctgattccgatgggtatggcacgccaagccccgaggcgatcgattggctgggagccgtacagtccgaacttggcgaacgcaacggcgacggtaagccggtgcctgccatcgccttccagcacattccgccgcaggaattctacgattgcctcaaagaggttcccgcatggacgccgaacgcggtggaaggcgcacgtacccacgccggtcattgctacgtgctcaaccatgagatctgccggccgggatcgcggctgggtgaggcgattggctgtgcagacgagaacgtcggtgaagtggacgccttgcgtgaagcaggcggctacttcgcgctgttctgtggtcacgatcacaagaacgccttcgtgggccacgcgcatggcattgatttgggctacgcacccacctgcggattcgaatgctatggccccaagtcgcgctatcgaggcatccgcctgtttgaattccatgaaagcaacccggccggctacgtgacccgcatgctcacctggggtgatctggtgggccgatactccagcaacgaggtgcgcgtctggttcgaggaccactgcgtgaccggtgccatcagcatgcgtaacgaattgcgccgcccgcaggtattcgcagtgctggccggtgccatgagcctcggttttatggccgtcatccgctcgttggtgaagaagcgataaaaacacgtgaggccggtatgaactggcctcactgagtattaagcgttggatccgcctgaaccctgcttaactgttatttatttctgggtgcggataaaaacaccagagccttcggtgttaatcagcatccaatcggatggtccatccggcgttccacgcttgacgagcatggcctgtgcttcagatggcaacgcatcgctggaggttccagatggatatccggtgaaggtgccacacgggctgaatcctgacttgtcggatttggatttgtcgtcaattttgaaagccgacgcatcacacttcagcgttaccgtgccatctgaattggatgtggcggatgcaaacttaccgctgaacttggtctggatacgtggcgcattcgctgcggaatcgccactgctcatatctgcctcgtccacagtgccggagaagttgccccgatcatccaacgaaatggtggtgaaggcgctgccatcgccagcaatcgtgtaagcgtattgggcaccggccaaatcagaaaacaccttcagtgaggccgcatccggtgtgccggatttcttactgctcttgttggaatccttggaatccttggaatccttggagttgcccttgtccttggtgctgggcgccttcacgtccgcgtccggcagggaatcccaatcgggttcggacgcttcgaccagatagtaggcgtcggcgtcgcttggggccggcttcatcttgacgatgtcggacttactgccgttgtatccgttgtagggcaggaacggattggcgccgttcccggcaccgttgtatggagcggtggtagtgtcgtagagcttcggatcgcggtacagaatgaacggtcgattggtgtccaccgccttctgcttcttggctgcggcaagcgcgtctttgtcgaagtagcccttatcttccaacccctgcaagtcggagccggtaggcactacgaggaacagatcctgcatgtggtattcgccggatgtgggccaagaatcacccatatgcacgccattgccgtcatacattttgccgttggcccaaaagttggtcaggctgatatgcggcatgagctcgaaggcgccataatcttgtgtgactaggtagtcggctttcggactgttgcagtacgcctgctgaatggcgtcgcaggcaatcagagtaccgtcgtaatcgccggtatagtcagcattatcactgccgccttcagtcaccttgtaattgtcgatggtgatgcacttcccatcattagtgcaccactggccgtcggctgcgcgtgtggtaccgagcagcgcgtcaccgcctgtttcggccaaatcatggcctgtaaaggcttctttggtgtcgctggcatcgatgccctgatacagggtcacgtcttcgccggaagacagggacgatcccggagcggggctggcgccggaaaccttacccacgtaatccttggaagagaaacgctgttcaacggtaactgtgtggccctcagactcgagctgggatttgacggtatccacatcctgacccatcacgtcgatgggcagagcggtgtcgtcacccttggcggccacgccaatgtagatgcccttgtctttctcgtcgtccttgaccccagtgccggcggcaggataggtggccacaaccgaaccttcggggttcttcttggcgtcagagacaaacaccttcttatagtggaccggaacgcccatatcggcgaacgtctcagtcaccttattgacctgtgcgcccagagtgtctttcggcacgccggggccggcgga

SEQ ID NO: 1594 - DNA, 2525 bp, Unknown
  R221_24m  MAG No. k141_47065
gcatggagcgcaaaatccaccagccgcccactccgcctccaagcgccagcacgacggcgaccgccacggcaacgataatccatatacgcttcttacgcttgggcacgacgggcgattccggcctgccattatcgcccaccggcggagacacaagcgtctcactgttgatgtcgccgcccatatcagcggccttcgccccgcagttcatgcagaatacggcgccttgcggcagttgcgcaccgcaatagctgcacaccatcatcgatgctcctcttcttcgatattctccggcgtcattatttatcggcagcttccatcggaacattggggtccgtcatagccctccggcgcgaaatacgactcccacgcattggcgtcgattccatcggaaactgcgtgcagcagcatgccattgggcgatgcgccgctgggaaccagctcgaacttcaccacgctggaggggaaagcgtcgcatgccgcacgttcctcggacgaagtctgagacgcatcgtaggcgcatttgcccacacccgtccaggcataccgcccattggccttctgtttgaacgaatccctgtcataggagccagcttgccattggccttggtgcatggaggaagccgtgctgcagtcggccttcaacgtgtaggtgccgaaggccgaccccaacgttcggtagtcaccggcccaggcggcgcaccgattcgattcgtctttcccgggcagcgcatccgtcgaatacgtggacgcgaatgtggaagagatctgttcgacaatttggtcaccggccgccttctggctcgtggggtaggtgaattccaccgtccgcagtacatccggggcataaagctggtgcaggtaggtgatcgtaccgttctcctcccagctggcgacgaattctcccggcatcaccgccttgtaggagtatttcggatcatcgacatcgaacacatcctccatggccccgttggtcacgttgaacgatccccacgtcgtgatggtcatgcccagctggtcattggtgaacttacggccatcgccgttgtcggattccggctgccacgcgaaatcctccggtacatcaatcgcaaaagcgaaccgcgcattcgtgtagtgcttggtcttcggccgattggtctcgtcgttccggatcgtattatcgttgtcgccgtccgatttcttggccgcatccgtctccttcttggttgtgttcgtctttttatgttccttgatattgatatggctggctgcaacgcccttgccattgtccggccccatgatggccacaccaatagccgcgctggccgccaccacgcagactgcaaccgctgcggcaatcatcggccagaccgagaccctgtgcctgacccgattgccgcattccgtgcaaaacaggtcctcgggtttcaatggccgtccgcattgccggcacaaacgtgcttttgtcatgacacaacaccccgcagatacccgtatcctccaaaatcgatgcgatcataccccagagaaaagccgtcatctggaatctgggcgaacagtggagactgtatgcccttcggatagaacgtcgcatcggaagcatatgagtcattggaaatgcgccatgaatacgtcccatcggcattgcgacggaaagaaccgggcacgtaattcgccacgattccgccatataatcgcgcgtaaccacaatccgcgtgcaaggtgagaaagtcatcgccctgatacagggaatactcatccgcgaaagcggcacagcgcgtcagatcggcgacggtcttcctcctgacgccgtgggtctcgccgttcctgccgtcctccggtacgtccccggtttcatcggcggtctcgtcggacatcgttcctcccggtctgtcgttctgctcttccgagtccatcatagacaacgggatactacatttatgtagtaatcatatataatactacatttatgaagtaatcatgtatgcagtggtgcgcttgggtggaaccatgcacgagcgcatatccgacgaactcacctggcggcagtacgccaaggggctcggcatacgcctgcgccgactgcgcgaccaacgtggcctcagccaggagcgcgtggcctcggacgccggactctccacggtgcagtaccagcggcttgaatcgggaggtttcgccgggcccacgcccaaccccacctccaagaccctgatcgccatcgcccagatcctcgacgtcaccatcgacgaactcctacccccgccatggcccgacctacgcacgaagtgatgtgtcacgaagcgtccccatgtgctagaatcggcatcgtttaaggttcacatagccgccttggacatgaaaaacccaatgattccaagccttgcgaaacctcggcatgtagccctgtgggctatccgtaggtgaggggagcggctgtgccgcgacggaaaatccggaggattttcggtctgtaggcaacgtgcgagccgacaggcgagccagcaaaacgcgggcgaagcccgtccaaaattgctgtaccgttgcca

SEQ ID NO: 1595 - DNA, 50894 bp, Unknown
  R221_24m  MAG No. k141_47748
ctcagattgaaggcgtgaaccagcaattggctttcgccaagtcacaacttgcccaggcgcagcaggctgagcagattcgcattcagcaggaacgtgagcgtgcggctgcggaggcggaacggaagcgtcaggcggatgctcaggccgccgaggccaagcgtgctgaacaggaagcacgtttgaaagaacagagcaaggtactcgaggcgcttgcgccagtggccaagaatcttgataccttgcagaacaaggtcacgcagatcgaagagggtcgcaagagggaaatgggcgcattgggagcccaactcaaggggctcaacgaccagcaggcccgtttggacaaggaaaccagttccctgtccgccgcattgcgcaacaacaaggtgcgtggcgcgtggggcgaggcccagctcaagaacattgtcgagtccgccggattgctggaacatgtcgatttcgacattcaggtggtggtcacggatgccgatggacgtacgttgcgcccggatatgatcgtgcatctgccgggaggcaagaccattccgattgatgccaaagtgccttatgccgattaccagcgtgcctgcgagatcccggacaccgccagccccgaggatattgcccgccgcgatgatttgctgcggtcccatgccaaggcgttgcgcgagcatgtacgtgctctcggcgaaaaggcctattggaatgcctttgatgtggcacccgattttgtggtggccttcatccccaatgaggcgctgttgcaggccgcgctcgaagccgaccccacactgatggatgatgcgttctctcgcaaagtggcgctcacctcgccggtcacgctgtgggccgtgctgaaatccgtggcctatgcctggcagcagcagtcgctcaccgatgacgccaagcagctgttcgatttgtcccgagaactttacgaacggttctccacgttgggtgattatgccatcaaattgggcacccagatcaccaagacagtcagcgcttacaacaagttcgcgtccagtttggaacgccgtgtgttgcccaccgctcgcaagctgcaaaaaatcgaaccgaccaagatcatcgaggaagtaccgatcatcgaatcagacaaaggcaatgtgagcgaactgtccgcccctgaagtggtgccggccgatgaaggtgatgctcatctgactgcctcaggcgatagtctggagtcatgactgaatctggattccgccccactggtaccccggacctcgccgtcgcgaagagccgcaatgactttgccatgctggagccgcgtgaacagctagccaccttgctgagggagcatgtggtgggccgtccgttctccgaacttgccgcggtgacttttgaccaccgtgccgccaccgtcatgggccatgtactgattgacgctttggaagatgcgggctattcggttgatgacttcgatgctgttggtgccttgaccgcagcatctgtgcccatggtgtccgccatgatccaggccgccgcctctcgtggcgaggacctagacggattcgtgatggacttcgtctacccgtccatcaagggcccctccatcgaaggccgccgtgtggtgctgttggatgcttggctgtccgaaaagtcgtacgtgcagaccagctcgctggtcaccctgcgcaacggcaatgagctgagcctcgactttggcatagtggagcagctgggtgccaaggtcgtggccatcgcctcgctggtcggtggcggtgccaaagacatcaatgtggtcaacccctccaccggcgacgagcaaacgctccccttcatccaggtcttcgacgaatccgaactgcggtaaatccacctttgacttccctcgcataaagtcagccgggctgagccgcgaagctgactaagaggaaccggtgaatagcgttatcgaggagaaagattgcacgcacccaaccagatttctttggctgccaaagcttcaggtgaaccggaattccgtgaaatcggccttgggccgtggtctgagacccatcccggcgagcctcgtcccgacgatccgacttctccgaattatgacggtcgtttcgactcggtgctgttgaatgacggcgaccgccgcaacgtattggatcgttaccgctactggaccgtcgctgccattaaggccgatcttgacgctcgagggcgtcatgacttcgaagttgcggtggaaaactggacccacgatttcaacatcggttccatggtccgcaccgccaacgccttccaggccaagcgcgtacacattgtcggtccacataagtggaatcgcaagggcgcgttgatgaccgaactgtaccagcacgtcgaacaccacccctccatcgccgaactggtggaaagctggcatcatcgcatcgccggtgaaatcgcctatgaacgagccaaggccggtgccgccgccatccatgcgcatgatgtggctgtggatggagacaacaagcaccttcatgagctgctggccgaaatcgatgcttgtgatgcgcgcatcaaggagcttcaagccgcccgcgtcatcgccctcgatatcattcccggcgcagtgccgatggaaacctataccttccccaagcggtgcctgctgctcttcggtgcggaaggccccggattgagcgagaaggccctcgaattggccgacgatgtggtctacatctctcaattcggttccgtgcgctccattaatgcaggcgctgcggcggccgtggccatgcacgcatggattgcccaacacgccgtatcaggcgtgtagccatgcgccgacaatcctgccgcatctgcccaatatgggccacattagaggcatgatctacgccaccaaatccatcgccgcggcattaattcgcatttgccgccggcatcgtcggcatcctgctcgccgcaggcatcagcagctccgcgcagtccacactggccgaagccggtaaaccggactactggattcccgaatggtggcagtccggcctgattctcatcgcctgggctgccgccgcatggatcggcggtctcatcatcaccggaaaagcggatatcagatatcaaataacgcgggttactgctttggcagttctgcagtgaccatggttctggtgactctgaccccatggatttgaccaccgtggttcactgcgcttaaccagctcccatcactgttccagcatgaggtatgccggctgcccgcagcttattgagtaaaggatgttgttgcatcacctcctcataggtgaatcggacaatggtgtcgactttggcccggtacagtgccgtctcccgttctttctccgcctgaactgcaccacgaacacccttgcggtcattcatatccgggttcacatatttttcatagccatcgaattcgcccacgataagccgattctcaggtagccgccagaggaaatccacgcgatacagagcaccggtttgcgggtcggtgatgttttgttgcagttctggggctaataggccgcctgcgatgatggtgcctcgtccaagtgactcgccaccattctcactcgccggattggcataatgcagtaggcggaatatcggcgtgcaatcacgtcgcatagtgctgcacacattcagaatgtccgtgatggcgacgccgttgcgcagcgccgaatcgataatgggcagtgcaaatcggaagtcgacggacagcccgcaatccaccaccgttctggctttgctggtcaccgggagtccattggcatattctggcgtgctgcttgacgtgaagatgcgtttgacctttgcactgctggcgttggggcctcgtgatgttgtggcgagagtgatggtgccagcatgaagatgccattggtgttcaaaatcgtggatggccgctgccgtgaccccggcgaacacccaatccggatgtctgttatgaagagttcgtgcaatatgtctgatacgttcgtcggtttgcagcgaatcccagtattccgaagcggcgtacatgttggggaatacacgtttgagttcgcgcgcctgcacgcgccgagccagcgccgagcggtgtgccttggttgttccataagcgcactgttgcgttgcttcagccttcgtgatgagtatgtccactgctttgtgatgtttcatgattcgacggtatgccaatggtgaacacggtgtctatctgtctggggttatgtggttctagcttcggtgcctagatgtgtgtttttgcctgattatcaggcatctgaccgtattggactgattatgtggattcttttgggtgggtatgcaaaatgtggataactggcgaggtgcgcagggcgattgtcgttcatatgttcgatgtaggtgtgtttgggctcattgtgagcttattagggtggccatgcagatacttcagtggggcacatttgcggttgggccgtggcgttgcctcgctgcggggcgtctcagcggggcgttttattggttggaccgcggttttgttttgctgggatggctgagcggggcgtttcatcggtcagctcgcggttttgctctgctgcgagtcgtctcagtaaggtgaacttgcggtccggcaacggttttgccccgccgaagaagccagcagcggggcaaatgctcgaccggcttgagcttctgattcgctgaagggctccagtaggcgggaaaatgaggcttcccgacaactgcgtgtcacatacggctcatatagttatggccatgccaacattttcacgtgaagaaatcgtgcatttgggcgatctggcccgaatcgcgctcaccgatgaggaaatcacccgtctgcagggcgaactgaacgtcatcgcagactccatcaacaaggtccaggaagtcgcctccgacgatgtgccgccgaccgccaacccggttcctctggaagcctacctgcgcccggacgtcgccgaaaccccgctcacgcaggaagaggcgctcgccggtggcccgaagaccgaggccggcatgttcgtggcaccgcgaatcctgggaagcgaggagtaatcgatgagcaacgaaaccgcaactctcgtcaaactgtctgctgccgagcaggccgctgccatcaagaagggcgacgtcacctctcgtgagctcgtcgaagcccacctcaaggtgatcgaagccgccgagccgtccatcaaggccttcctgaaggtttccggcgatgtggctctcgagcaggccgacgccttcgacgccaagtccgccgaagacaaggccgccctgcctgagctggctggtgtgccgatcgccatcaaggacatgatcgtcaccaagggcattgagaccaccgccgcctccaagatcctcgaaggctgggtgccgccgtacgacgccaccgtcatcgaaaagctcaaggccgccggcatgccgattctcggcaagaccaacctcgacgaattcgcccagggctcctccaccgagcactccgcctaccagaccacccacaacccgtgggataccgagcgcgtgcccggcggttccggtggcggctccgcctccgcagtcgccgcattcgaggcaccgatcgccctcggcaccgacaccggtggctcgattcgccagcccggcgccctgaccggcaccgtgggcgtcaaacccacctacggcggcgtctcccgtttcggagccatcgccatggcctcctcgctcgaccagatcggcccggtctcccgcaccgtgctcgactccgcactgctgcaggagatcatcggtggccacgacaagcgtgactccacctccatccccgaaggcccgcgcccgatggtcgccgccgcccgcgaaggcgccaagcgcgatctgaagggtatgaaggtcggcctcatcaaggaactcggcggcgacggcttccagcccggcgtcgaggcccgcttcaacgaggccgtcgacaagctcaaggagatgggtgccgaggtcgttgaggtctcggttccgcacatcggctactcgctgggcgcctactacatcatcatgccgtccgaggtcagctccaacctggcccgttacgatggcatgcgctacggcctgcgcgtgatgccgccgaccggcgtgcctcagaccgccgccaacatgatggcctacacccgtgaggccggcttcggcgacgaggtcaagcgccgtatcatcctcggtacctacgccctgtccgccggctactacgacgcctggtacggttcggcccagaaggtccgcacgctgatcatccgggacttccacaacgccttcgagaaggccgacgtactcgtggcccccaccagcccgtccaccgccttcaagttcggcgagaagatggacgacccgctggccatgtacatgaacgacatcgccaccattccggccaacctcgccggcgtgcctgccatgtccatcccggccggcctgtccgacgacggcctgcccgtcggcttccagttcatcgccccgcagcagcgcgacgaagtcatgtacaagccggctgcggccctcgaagccgcgctggaagacagctggaacggcccgatctggaacgacctcaagaccccgtggcttgacggtctaggcaagtgagcatcggaaggaaagagacaacatcatggctgaaaaactgatgaagtacgccgatgccaccaagaaatacgatgtggtcttcggtctggaaacccatgtggagctgtccacgaacaccaagctgttctgcccggcccacatcgagttcggcggcgagccgaacaccgaactgaccccggtgagcctcggcctgccgggctccctgccggtgatcaacaagaccgccgtcgattacgcgatcaagctgggcctggccctgcactgcgaaatcgccgaatggagccagttcgcccgcaagaactacttctacccggacatgccgcgcgactaccagatctcgcagtacgacaagcccaccaacggcaacggctacctggatgtcgaactggaggacggcaccgtgttccgtgtgccgatcgagcgcgcccacatcgaggacgacgccggcaagaacacccacgtgggtggcgccgacggccgtatcgagggcgccgatcattcgctggtcgactacaaccgtgccggtgtgccgctgatcgagatcgtcaccaagccgatcgagggcgcgggcgatcgcgctcccgaaatcgccggtgcctacatgcgcgccatccgcgacatcgtgcgcgcgttgaacatctcccacgcccgcatggagcagggcaacatgcgcgccgacgtgaacgtctcgctgcgtccgagcccggacgccccctacggcacccgttccgaaaccaagaacgtgaactcgttccgcggcatcgagaagactatccagtacgagatccgccgtcaggccgcccgtctggacgacggcaaggagattctgcaggagacccgccactgggatgaggcttcgcagaccaccgccggcggccgtctgaagtccgatgccgacgactaccgctacttcccggaccccgacctcgtcatgctccacatcaccaaggagcacatcgaggagatgaaggcccagatgccggaaatgccgcgtgagcgccgcaaccgcctcaagtctgagtggggcctgagtgatctgcagatgcgcgacatcctcaacgccgacgccctcgacctgattgaggaaaccgtcaaggccggtgccaaggccgccggtgcccgcaagtggtggctgggcgagctttcccgcgaagccaacgccaagggtatgtccctcgaagagctgccgatcaccccggccgatgtggccgaggtcgagaagctcatcgcctccggcaagctcaacgacaagctcgccaagcagaccgtcgaaggcgtgcttaagggcgaaggcactccggatgaagtcgtcaagaagcacgactacaagatcgtcgaagacaacggtgccatcgaggcggccgtcgacgcggcgttcgaatccaacccggatgtcgtcgagaagctcaagagcggcaacatgaagccgatgggcgtgatcatcggtgccgtgatgaaggccacgcgcggtcaggccgacgccaaggccgtcaccaaggtcgtcatgggcaagatcaagggctgattagattcactggctcccgctggcgggagctgtcgaacggagtgagactgagggtggtcgccatgtacggatgaccaccctcagtccgcttcgcggacagctcccgccagcgggagcacttatttgtagggaaatcctccagttcaaattcgttggacagctcccgccagcgggagcctttattgattctgtaagaaagtcgtctcagagcatttccagcgttcacccagtcgagtaagatatgttcggcactggaccgtgagccgaaacaagccgaaccgggggatgtataccgatgaccgcaaccaacgagacgctgagcatggctaccgaagcgcaactgaagcgcgatctgccacagagcatcgtcattccgccaatccgtggcgaaatggtgcacctgcgccccgccaccatcgaggacctggctcgtttggatgaacttgatgccttctatggcgcatccaagatcaccggcaaggatgcggtcaccgaacgcgccatcgtacacacatgggtccgccgctcccaagcctgggaagccggtcaggcacccgccgaatccggcgtgggcgacccggaatcccgccgcaccatcgcatgggccgtattgactgacgccgaccatgacgatgacggtcagctcgatgcggccagcaccgataatgtcatcggcatgattttcctcatcgacatcgacggctggtccaagtccgcccgcatccagatcatcttgggccgtgagtaccgtggccgcggctactcccgtgacgccatgccgcgtgtgatgacttacggctttgcgcccgaaccggccggcctgggcatgcaccgcatctgggtgagcgtgccggaaaagaacagccgttcgatttcggtctaccagtcgctcggcttcgtgccgtccggcacctcgcgcgacgcgttgtgggatgtcgaaaacaacaaatatcaggaccttatcgtcatggacacgttggtcgacgagtacgatccgattcgttcgcttgacgcttttggtatgcacttgattgaggacaacccgggtgtcaaggaagcgctgtccgcgcgtgagcattccatcgccatccagcagaacaagccggaacccgagccggcacagcgtggtgaggcagccgccgtcacgacgagtgacgtgcagtcccaggcccagacgccggcggccgcacagccagtcgagccacaggccgggcaccacgacgatacgcagaagaacacgcgccacagtctcgaagaggaaagcaactggccgtacggccaggcggaacgcaagccctcaaaggaagcatggtggcgtacgctgggccgcggccgcaaacgcgatacggaaagtgagtgagtaaacaagcatgagtgccgaggatctcgacaattacgaaaccgacgccgaactcgcgctgtatagggaatatcgtgacgtcatcaagctgttcacctatgtggtggagactgagcgtcgcttctacttggcgaataaggtcgatttcaacgtgcgttccgctggtcaggacgtgtatttcgatgtgcagctgactgacgcatgggtatgggatgtctaccgttccagccgtttcgtcaagtccgtgcgcatcgtgaccttcaaggacgtgaacgtcgaagaagtccagaaaaccgatatcgacattcccgacgatattcactgacaggcaatcgtctgatacagcctgtattgacaatgcgcggcattccgtcatcttacggcggggcgtcgcgcattgttcatacaacgcatagcaaaagttcaaactcgtaaccttgccatcgtgtgtcttgtttgcttgcggttgatagaagatgatgctgtttgcacttgcaggaatctcgctgaatctatggaaggttcgtcgctgacgaattagcccaagaccaaaccgattcgccgcgctgtgcgtgacgcagcgttgccgaatacccctacctcacgattggatgcgtcgcctttctgctgatggaagacggcgcatcggtcgtatatcgggagaattctgtaagcattcgctcatctttcggtgtgcgattccggggcttctagtaaactgtctctgattttgcgtttataaggagcataatgaccgacaagcaatccgtagtgattatcggcggcggtccggctggacttaccgccgcatgggaactcgtcaaggatggcggcgcggaaaactatgacgtgaccgtgctggaggggacccgcgaattcggcggtatctcgcgcaccgtgaagcacaacggcaaccgcatggatatcggcggccaccgtttcttctccaaagacgaacgcatcatggattggtggaagaccgttctgccgttgcagggcgcaccctcctatgatgacaagaagctcggccgcgaccacgacatggagccgggcggccccgatccggagacggaggacaaggtgatgctcaagcgccaccgcgtgtcccgtatcttctggaaccgccacttcttcgattacccgatttcgctgagccccaacacgttgaaggccatgggcttcaagctcaccatggtggccggcttcagctacctgaagtccatgttccacaagctgccggaagacaacctggagaacttctacatcaatcgtttcggccgcaagctgtattcgatgttcttcgagggctacacggagaagctgtggggccgccacccctcccagatctccgccgactggggcgcccagcgcgtcaagggcctgtccatcatgggcgtgctcaagaacgccttccagaagcttagccccaggaagcgctccaacgcggaggtcgagacctcgctgatcgaggagttctggtatccgaagtacggtcccggccagctgtgggagaccgtcgagtccaattgcgaggccgccggcgtcaaggtgctgaccgacgccagggtggtcgaggtccgccagaccgatggcgccgtgtcttccgtggtgtacgaggattccgagggcaaccgcaccgagctttccggcgaccagttcatctcctcgatgccggtcaaggacctggtcaacgccatcgacgcggccggcgacgatcccgaggccgctgattccaagcccgccccggccgatatgaccgaggtggccaacggcctgccgtaccgcgacttcgtgaccgtgggcctgctggtcaagcacctgaagctcaagaacaccaccaacatccccaccctcggcaatccgccgatcgtgccggactgctggatctacgtgcaggacccgggctacaaggtcggccgtctgcagatcttcaacaactggagcccgtacctggtcaagaacgtggacgacaccgtgtgggtcggcctcgagtacttctgcgaggagggcgactcgttctggaacatgagcgaggaggacgtcaccaagttcgcgatctccgagctcacccgcatgcgtgtgatcaacggcccggacgaggtcatcgactcccatcgtgagcgcgtcaagaaggcgtaccccgcctacttcgacacctacgagcacatggacgagctcatcgagtacctcgacggcttcggcaacctctactgcgtgggccgcaacggccagcaccgctacaacaacatggaccactccatggccaccgccatggaggccgtcggcaacatcaagaccggcaagacgtccaagaagaacgtgtggtccgtcaacaccgaaaagtcctaccacgaagaaaagtgaataaaccttgttgagctccctcgtcacagagggagcttttttggttttcggcgggccgttttgcgttggtcgagttggcgttgtacagtaaacgaagttcgtgaaaactcagagacgcagcgaacattcatgagcggtgcaaccgcaataatcactcttaacgcctggataggcatgggtctgttcggtatggaaagggcaaccagtggcaaatagccagaatcttgaggatatgaagctgcctgagctcaaagagctcgctaaacagatgggcctgcgcggcacgtcgaccatgcgcaagcccgagctgctcgccaccctgcaggcggcgcgcaatggtggagagccgccggccggtgtgaccgtgcgcgctcccaaggccgccaaaaccgccaaggtcgtcaaggctccgcagtccgatgccgctgaggccaataccacagacaatgctgacgtggccacccagtcgccggctccggctccggcctccacggaaccgcagctcgatttgccgcttcccgtggccgacgatgccaagaaggacgagaccgaaccgcgacgcacccgtcgtaaggccgccgatgatgccgcatccgaaccgcgtgcggcccgccatcgtcgcgatgacgaccagtccgatttcgctcgccgcaagccgcgcaagaaggccgatgaggccggcgatctgctggccacgctcgatttgggagatgcagcgcataccgagcgtcgccgcgagcgccatgaggacgtggaagttccgctgattcgccgagtccgtgatgatgaggatgagcagcctcgccgccgtcgtcgcactgcggaaaacagcgaagaaaccgtgcgtgacctcgacgatatcctggccacgctgcccacgcagaagcacgaggaaacgtccgaagacggcgagcagaacgacgatcacgagtttgtgcgtcgtaaccgccgcgaccgtagcgatcgcaacgatcgcgataaccgtaatgatcgcaacgatcgccgtaaccgccgcatgcgtggccgtgatcgcgacaacgccgatgatgatcgtcgctatgatgatcgcgataatcgtagcgatcgcaatgaccgtgatagccgccgcgaagagccgcaggaggatctggtgccggtggccggcatcgtcgacgtgctcgactcctacgcttttgtgcgcacttccggctacctgcccggcccgaacgacgtgtacgtttccatgggccaggtcaagaagtacggcctgcgcaagggcgatgccgtccatggttcgattcgcgccccgcgcgagggcgatcgtcgcaaccaacgccagaagttcgtgccactgcaggccatcgattccatcaacggccaaagcgttgaagaagcgctcaaccgtccgcagttctccaagctcacgccgctgtacccgcaggagcgtttgaagcaggaaaccgccccgaacaagctcaccggccgtatcatggacatcgtttccccgatcggcaagggccagcgtggtctgattgtctccccgccgaaggccggtaagaccatcaccctgcagaacatcgccaactccatcgccgccaacaaccccgaggtccaccttatggtggtgctcgtggacgagcgccccgaagaggtcaccgatatggagcgcacggtccagggcgaggtcatctcctccaccttcgaccgtccggcctccgatcacaccacggttgccgaactggccatcgaacgcgccaagcgtcttgtggagctcggccaggacgtggtcgtactgctcgattccatgacccgactggctcgcgcttacaacatcgccgcccccgcctccggccgcatcctgtccggtggtgtggacgcgcaggccctctacccgccgaagaagttcttcggcgcggcccgcaacatcgaaaacggcggctccctgaccatcatctcctctgcgctggtggaaaccggctccaagatggacgaggtgattttcgaggagttcaagggcaccggcaacatggaactgcgcctgtcccgcgagctggcggacaagcgactgttcccggccatcgacatcaacgcttccggcacccgccgcgaggagctcatcaccaacccgcaggaactgccgattatctaccgtctgcgtcgactgctgggcggcatggagcccgagcaggcctaccagacgttggtgccgcgcctcaagaagaccgccaccaaccgcgacttcctcgccgccatcgtgcagcaggccaacaccggcaacgcggtcaacggcaactgaccagaccgctgaacaatagtgtaagggctgcaccccgattgatacggggcgcagcccttgccgtatatgatgcaaatacatcaactatcacattgcagttgtagtattgccgtcaacgttcacatgcacgctgacgatatatgagatgaaagatgtatcaatgggttcgattgttttgggagtgggcaatggtgcggccatgttcggcgatgcggatgccagccatatcccctacggcgactatgacatctgagatatctgactttgcgcatcgtgcaaagccgcaatcgggagtatcctcgaatctatgagcgaaacgagcagcggctggcaaaggaccaccatcgactccgcccaggcggcggcccacccggaaaccgcacaagcggtggcgcgcatcaaaacgctgcgccaaaccatcgataacatcgattcggcggccatcgcattactggccgagcggttcaaggccacctcgcaggtcggcgtgctcaaagccaacgccggattcgcgcccgaagacaccaagcgtgaggactatcagatcgaacgcctccaccgcatcgccatcgatgccgggcttgatccggaaattgccgaaatgtaccgtgaattcgtggttaccgaagccaagaagcgccaccagcgcatcgccgatgccggtggcgacccgggcgtactcgacgtattcgcctgattcgcccgcagcgaatgggcacctttcggatattcgtctatagggcaagttgccggcagcgactacattaatacgggaatggaatgcccatagtggccgactgtatgaatgggatacgtagatgagatgtggtgccgcactggtcagttgcgcattgtgcgtggcttcgattctcggcggtgcttggatgtctcgtccgactccggttgattacggtccggtgctcgctacggcaagtgatatgtacgccgtcgccgatgccgaaggggagccggtccgttggtatgtggtagggaagggcggcgccggcaatggagccagtgccgattccggcaatagcggttccactgataccgattccgccaatagtaattccggcacgtccaaggtttctcgtatccccgcttccgccgccaccctgccatggaaagtcagcgtcacctactcgcttgacggtccaaacgtcgaggcaaacgaggttgccggcgcatctggactgatcggcgtgtatatcgatattaagccgcaaaccaaggaggccaaccgtacgatcccggttgtcgcctttaccgtgcctacgcaggtagccgatgatgtttccgctgacaactccattacggtaaccacgcaaggttccaataccgtagtcgccgcagctggaaaagccgcaaccggcttggaattcagctgctatatgaacgccaaagacttctccatgagttccgtggcgctcgccgtattgccttccaattccagcagtccggtggttggtgctaatcccgatgccgcgaatgccgccgcacagcctgctgccgatacggatgtcgcccaactcgtcgcctctgccgccatactggtcgattcactgaccgacgccggttccggggagcatcaacagctcatcgagcagcttcaaaccctgcgcgataatgagcgtgcgctggacaagtccgtagtggccgaacgcgaaaccgcccataagcggacgtttgaagactatatggccgcgtatgtgggctcatataccacgcacctgtctggatcgattggtacctccacccagttgccggcgttgatgggcacggctggcgaactgtccggggatacgcctttggcacaagccgtactcgacttggccaacgcggtgaacaacgtcagtgccgcacatcagcatgccggtgcggtcgatgcgttggatgaggtgattcgccgcatccagcagcaaggcaccaccggactggtggatgatctgaccgccgaggcttcggaggaagccactcgaggctccaagcaatacgccgatggccagagccagctctccgccgcaatgattccgtattcgatgaaatacacggacgtctacacggccaatttgagcgccctgaccggcggcacgtcttcgggcgccaccgcttacgagagccaagccatcgccgaaaccaacggtagcgatgaactcgccgacgctcaatccaaggtcgatgccgcgatgagcacgcttgccaccgcctccgagcatacgggcaaagccacggccttgcgccagattgtattgcgattctccgatcagttcgaaggagtcgcgtcctcggcttccggcagcgatggcgatggctcgtccggtgatgtctcttccggtccggtgaccgaggctcaggcactgactggcctggtcgattcgcaatcgcaatcgttctacggcaagacccgggccgcccaagccaagcgtaaggccgatgccgcccgtaagcaggccaaagccgcgcaacagcagcagtcgcagcattccaaggcctcactggtcgatgacaccatgtccatgtctgctggcgatgtgatgaactatgcgggtggtcttacttcggccatcggtggtggaggtaagttcgattcgtccaagagcgatggttcgggaacgaacgactcagccaagtcgagcgatactggcgattccggcaacaatcttgacaccgctccagtactgttcggctttggcactggcggcacgctgctcaagcatgacatgagcgcgctgatcaatgagaccgtggagatcagcgatgctggcacgctcttggcgcaggccgtcgcgcagctcgatagccccaatacgcaacaaaaaaccgccgaaacccgatacctcatcgtgattccgacggtgtgatggtgtatgcgggaaaatccgcatgtgacaggtgcccaatacgcgtaaagtgcgttatcggtgtgggacgccgcatcaaaaactggctttttcgatgcggcgtcccacaccctcttgtaagtcagagctaactatagtttgaagaatggctaaattccaaggatctgttgattcggtctgtgggacgccgcgtatataaaacgtttgacacgcgtggtggcccacgctattgtgggccgccagcttacaatgcgggatatttgcgtgccgtcccacagtcgtgtcatccgaacgtcaaaaaacaaaagaggggaacctcaataggaggttcccctcttttgttgttgtgcgcaacgctcagtgctttggcttcttggctggccgagccgttaagcgggaagcccggtgggcttcccgtaggctcggaacgagcggcattgccgtgagacctactgttgttgtgcgcaacgctcagtgctttggcttcttggctggcggctcaccgagctcgctggcttcgacggcgacctcggtttcgggcgcgtcttcggcggcggattcctcggcgtgcttggccaccaagtcgaacttgccgaccacgcgaccggcctgcgcgatatcgcccaaggcggcgtgaatcgcgttcacaccttccgaagcagcggacagtgccacagacaggattggggtcttcatggagaccttggcctcggacttgatcttacgcagctgctccacggccttgccggcccaagtcagcagctcgggggaagcaccggtggcggcctcgacatacgggtccacgaccggccaggcggcgcgatgcacggaaccggaaccggcgtgcatccagctccacacttcctcggtggcgtacggcaggtacggggccagcagacgtgcgaaggcgtccaagcccagacccagagcggtgcgggcggacttcacagccttctcggacggcacattgccgtgctcgtccggagtgccataggcgcggttcttgaccagctcgatgtagtcgtcgcagaactgccagaagtaggattcgatgacttccagcgccttggaatgctcgtaggattccagcgcctcggtggcctgacgcaccaccaaagccagcttggccatagcggcgcgatccagcggttcggtcacatcggccgggttccacgaggtctcggcggcagcgcccacgtgatggttctcgtcctcacggccgatggccagcgcgaacttggtggcgttcagcagcttgatggccagtcgacggccaatcttcatctggccgatgtcgtacgtggcatcgaggcccaggcgagcggcggcggcccagtaacgcacggcgtccgcgccgaacttctcgatcggctcgttcggcaccacgacgttgcccttggacttcgacatcttcttgtggtcggggtccagaatccagccggacagcgtggcatgggcccacggcagacacttgttctccaagtgcgcgcggtccacagtcgagaacagccaggtgcggatgatgtcctgaccctgcgggcgaaggtccatcgggaaggtggaagcgaacagggccttggaggcctcgtccggctcagcccagtgggtcacgatctgcggggtcaccgaagaggtggcccaggtatccatgatgtccttttcggcggtgaagccgccgggcacatcacgctgggactcgtcgtagccctccggcacatcgatggtcgggtcgatcggcagacgatcctcgctcggggtgatcgggcgatcgtaatccggctcgccggaagcgttcaccgggtaccacagcgggaacggtacaccgaagaagcgctggcgggaaatcagccagtcgccgttcaggccgtgcacccagttctcgtagcgcacgcgcatgaagtcggggtggaagttcagttccttgccgcgctcgatgagctcggcgttcagtttctcgtcggtaccgccgttcttcaggtaccactggcgggaggtgacgatctcgagcggcttgtcgcccttctcgtagaagttcgtcatacgcttggtcggcgtcggctcaccgtccaggtcgccggactcacgcagtttgtctacgatgaccttacgggcggagaacgtggtcttgccagcggtctcggcaaagacctcacggccggccgggtcggtgatccaatccggggtgtccatcacgatacggccgttgcgctgaatgatcgggcgggtgggcagcttcagatcgcgccaccactcaacgtcggtcacatcaccgaacgtacagcacatggcgatgccggcacccttgtccatttcggcggccgggtgagccagaatcggcaccttgaccttgaacagcggggagtagacttcctggccgaagtactgcttgtaacgttcgtcattcgggttggcgatcagcgaggtgcaagcggccagcagctcggggcgggtggtctcgatgtagattggggtgccgtcttcaaagcggaaagccaccttgtggtagaagcccgggtattcgcgggactcaagctcggcctgagccactgcggtctggaaggtcacgtcccacaggccgggggcgtcctgctggtaggcctcgccgcgggcaaggttgcgcaggaaggccttctgagccacgcgccgcgggtgctggccgatggtgtggtaggtctgcgaccagtcgatggacaggcccagcttgcgccacagggcctcgaacagcttctcatcctgagcagtcagacgctcgcacagctcgatgaagttcttgcgggaaatcggcacctgatccttggcgtcgatcttcttgccatcggtgccctcgaacggcggcttgaagtccgggtcgtaggggagggacacgtccacgcgcacgccgtagtagttctgcacgcggcgctcggtgggcaggccgttgtcgtcccagcccatcgggtagaacacgtcgtagccgcgcatgcgcttgtaacgcgcaatcacatcggtgtgcgtgtaggagaacacgtgacccacgtgcagcgaaccggagacggtgggcggcggggtgtcgatggagtagacggccttgcggtcgcgggtattgcggaatttgtaggtgccgtcttcatcccagacggcgcgccacttgtcctcaagtccgtccacaccgaccttgtcgggcagcggggtgaggttggcgttgatgatggatttgccttcagtcataaagccaaagtttatgcacgttgcatgacaagccgaactgtacagtaaacagcccagtaggctgttcgcaggcgagatacgaacgatcgaacgatagtgagccaaggactatcgggcgtagcccgtccgtgactgaaggttgcctacttcaccgtcaacccggccagcggcatgcgacgattgatcatcgaggtcgggtagccggagaccttggtggacgccacagtgaagcatttgcgggtatacagccaatcactggccgcatcctcgctgatcagccgggcgtacgccttcattcgtgcctcataatcggcgtcattagtggcggcgcgagcatccgcataggcctgttgcgcttcggtatggtcgtaatggaacatggaatcggggtcggcgaatatgccggcatcatccgtgccgtccatgctcatcacggtcagttcccatttgccgtccttgattcgtttggcataatcttcatcggagagcacttcaaggttcaccgtggggcgcggctgccgctcgatctgctgcttgatggtttcggccaacgaccggtattcttcgggaaccaccagattcaccgtagtcagatattgcgcaccgaagtaggagaacatctgcccagcttggttttcgtcatgcggatacagtccggtcaaatcttcgtatccgggttccagcgggctgatggggccgcccaatgctccggctgcgtcgggttgggcggaggcgatgccggctgcgtcgatttgatagcggaaggctttacgcgcctgttcgtcggagagcagcgaatcgatgccgttgttgtaggccagcagcaccttatccgtagtggccccctccttgacggtcaggccatccttgccgttcaaaccggtggccgtcgaagccgaaaccggtgccgccatatcgagactgccgtcggtcagggccttgctgagcgcatcggcgtcggagtattgcataaattcaacgatattgctggccgctttggtgccatggtaggtatcgctgcgcgccagcttcagggaatggccaggctggaaatcggccacggtgaatggtccggaacctatggccttgcgttgataatcggcactggacgactcggaatcgtagacaatgccgagtttgccggacagcgctcgcagcagcgtcggattgggcttggcaagcgtaatgaccaccgtggtggcgttcggattggcgaccgacgtcagatcgcccaattcgtcgacgtccgccaccttgttggtcacgttctgttgcaacgaccacacggcgtccgaggcgtccaacgtatgaccgttcgagaaggtgacgcccgattgcagtgtcagggtgacggtcagtccgtcatcggaagtcttccagcttgtcgccagtcccggctgaatcttgttgtcttgatcgacggtcactaatgtctcatacacattgtcgacgagcaggcgctcggctgccgcagaggaatcggaccgaatatccaaggattgcggcatatcgtcgatgccaatggtcacatcggcatcgagggatgatcccggctggaaccggttttgcatgaacgtccatcccgcaaccacgagtgcgccgagtgccacggcgactccgagaaaaatcccccacttggaccatgtattgttccgcttgctgtgctgcatggttttcagtctagcggtggattcagcctagaatccgcaattcaccatgatgaggtatgagttagcgcttggacgtgctcttgccggcgggcggcgcatagctagggcaggtgtcggacagcgggcagttggcgcagtcgggggtacgtgcgtggcaggtggcccggccgaacagaatcagtcggtggctgagattcgtccactcttcgggcggaaaacaggcggtgatttccttctcgattttcacgggatcagggtgtgcggaccgccaatccgaccgccaacgcagtcgtccggttacgcgcatcacatgcgtatcgaccgggaatccggggatatcgaacgcgttgccgagcacgacgttcgcggttttgcggccgacccccggcaagctggtcagttcatccatcgtgcgcggcaccacgccgccgaaccgttcgtccagtgccgtggccagtccgatgagatgctgggttttcgaacggtagaaccccagcggatgaatgatgtcttcgacttgggccgggttcgcggccgccaagtcacgggcggtggggtaggtggcgaacagttccggggtgaccgtgttgacacgcttgtcggtggtctgggcgctgagcacggtggcgatcagcaattcgagcggattcgagaaatgcagtgcgcaagcgggtgccggaatcacctggcgcagaatgtcgtattcgtcatgcatgcgcgtgagacgcgcggatttggtttctctcatcgtatggacctaagcggcgtaatgtcgatgattgatggtttgtagcgctgctggtctgtcaggcggcggtgttgagatcgggggtatcgtcatcggtgccgatggcggcagaggatgctttggcggcctgctgtgcggcggcagtttccttatccgtctccggcgggtcgaatcggtagcccacgttgcgcacggtgccgatgaggtgttcgtattcgccgccaagcttggcgcgcagacgacggatatgcacgtcgaccgtacgagtgccaccgtagtagtcgtagccccatacttcctgcagcaactgggcgcgcgtgaacacgcggccggggtgctggaccaagtacttgaggagttcgaactccttgtatgccagatcgatggggcgtccatgcagggaggcggtatagccgttggtgtccacaatgaggtcgccggagcgaatctggccatcttccaccgtggtggtggattcggcgggagaaccggctgctgcggctgcgggagcgttgccgcgctcggagaccaatcgcaatcggccctcgacttcagccggggaagcggtggcgaccaccacatccgcaatgccccactgggagttgaccacggtgaagccgccttcggtcagcaccagcacgattggcgtggacaggccggaagcgtggatgagacggcacaaggttttggcggtcgccagatcatcgcgtgcatccagaaacagaatggtgttctccggcatcttcaccaagctggctgcatccatcggcagcacgcggacgcgatgagaaagcagggcgagtgatggcaaaacggtggcggggtcgctggcgaaagtcatcaacgtaagatccgtcacgctaatccccctttatcctgcaatgtgttacgcaattgcttggtgtggctgtacgagtcgtcagcggcgttatgccgctttcgcgcggtttttcattattctacgcgcttgtagtggacacatgggttacaagtttgcggaatatggaacggcagacgtccatcaaccgatgacacggccgagcaccagtgcggttgcggcgatggtcacgcccatcagcattaccggcatcaggccggtaccgatccacggatagcggatatccgggtccggatcggcgtcacgcacccacaacgtggaggccacggccaaggccagtcccaaaacgatgaggatgatcagggcaacggttcccgcaacggtgcccttggcgagcatcgcgcccaaatcaggcaggaagcaccagccggccacggcgagagccgccacacctgaagtcacggcgtgagagagtgcgcggataagatgttcgcgcttctcacgagccatctggcgcccgaaggagaagaccaccagcaccaccagcagcaggcccatggccagtgcccatgaataccaaggaagtaccgagccatccgcagcggtctgatccggcggaaccttgccggtcgggaaaggtacgatgacgaaaatcagagaaatcgcgccaaacaccaaagtgacgatacgatccagcatgctgccgcggaacggccagaacacgacaaatgcggccaacgtcagagcggcgataatcaaagggatgatggggacggtgccaggggagggaatgaccgtggctgcgatgagcagtacataggacgtcagttgggccaacaacatgctcagggctttgttcttccaaccctcctgggtgatctcggtcatgatacgcctctcagataatcgaatttccatcccaatcctacgtcgggcattggaacggtgaaatcaaacaaaatagccctttctggtgaaggggcttatgacactaaatcagaacgcgataacgcccaaatgctccaacagcactttgacgccaagtagaatcagcaccacgccgccggcgatctgcgccggctcctgccagcgggagccgaacgcgcggccaatgtacaggcccgcagcggagaacagtccggtgaccacaccgatgctgaggatggcgaatgccatatgggctttggtgaacatgaaggtcaggctcacgcccacggcgaacgcatcgatgctgcaggccacggccaggggaagcatatgcttccaatcgaactgggcggtctccttggagttttcctcatcttcttcgaaggcttcgtgaaccatgttgccgccgatgaacaccaacagggcgaagatgatccaatgatcgaattgggttacgtatttgctgaatgtagatgccgcgaaatagccgagaatggggaacagcatctggaatccgccgagccagagggcgcttttcgcggcgtcttgcactcgtacgcgggatacggccagacctttgccaatggatacggcgaatgcatccatagctacggaaacagaaataagcaggatttgaatgattatcggaatcatggtgcgacagaaggttcatcgccggattaccgtgcgatgggcctcgaccagcgttcctacacgccgcctacgcctagctgaaaaatacaccagcactatatcacgcgatgcacgtcgaatcaaaaaggcgggaggcctccggagaggtctcccgccgacgattcggaatcgaatcacttgccttcgttggcgaggcgttcgcgtgccgcgatgatttccttctcggcggcgtcagcaccggtccagtagtcgcccggcaggacttccttgcctggctccaaggccttgtactgctcgaagaagtgcttgatttcggccttgtggtactcgttgacgtcgtcgatgtccttgatgtcatcgaaacgaacgtcggcgggcacgcacagcaccttgtcgtcgccgccggcctcgtcgaccatgtggtacaggcccacggcgcggcactcgaccacgcagcccgggaacacggagttcggaatcatcacgagagcgtccagcggatcgccgtcctcgcccagggtgccgtcgatgtagccgtagtcatccgggtaacccattgcggtgaacagggtacggtccaggaagacgcgaccggtctcgtgatcgacttcgtacttgttcttggagccgcgcggaatttccacaacgacgttgaaggtttctgccatgtcatttctccttgaaaatcgacagttacgttatcgtctcaccacaataccctgtttgcgcctgcaaaacaggtgcggaactcaagaaaccgtgctgagattatgccgacactatgtctaaacagacgaaatcctcccctcaaggggaggatttctagcggtttacgcacacgataaacccatgcacgtcaacggcatcgctgttgcattaccgttgcactaccgcatcactgcacggacaggatgtgagccacatccgcccaaggcgccagagacacgtagttgtcccaaccccactggaattcgcggccggtcagctcgtcgcgcacgttgagcgggcggtcggtgggcagacccagctcgccgagttccaggtgaatcatcgactggtgtgcgttgtgtccatcgaggttcacgaccacaatcagcgtgtccgcttggccggtaccggtcagttcggccggcgtgtggcgtgcgaaagccagaatattctggtcggacgtaggcagcacggtgaggttgtggtagctcaacgcggccgggtgggcgcgacgaatcttgttgagcgcggtgagcatctcggccacgccgtactgcttggccttgctccaatcgcgaaccttgacctcgtacttctcgttgtcgatctgctcttcgaagccggggcgctgcttgttctcgatgagttcgtaaccgttgtagataccccaggacggcgagcccatggctgccagcaccgcacgcacgcagtggccggctacgccgttgtctcgcacgtaagcggtgagaatatccggcgtggtgggccagaaggtgttgtgctggtagtagccgtcgtcgccattggtgatcggcagatactcttccagttcgtccttggtgttgcgccacgggaagtagcagtgggactgggtgaagcccacgtagctcagggcacgcatcatgcccgggcgggtgaatgcctcagccaggaacaggatctccgggtgcttcttggtcacggcggcaatcacgtcctgccagaaacgcaccggcttggtgtgcgggttatcgatgcggaagatggtgacgcccgcctcgatccacagattcatgatgcgttcgacttctttttcgatgccgggcatgtcggcgttgaagtcgatcgggtagatgtcctgatacttcttcggcgggttctcggcgaaggcgatggagccgtctggcttgtgacggaaccagttcgggtgggccttgacccacgggtgatcgggcgagcactgcagtgcgaaatcaagcgcgatttccagacccagttcatgtgcacgctggcacagggccttgaaatcgtccatggtgccgagcagcggatccacggtgtcgtggccgcccagctcggagccgatgccgaacggcgagcccgggtcatcggggccggcgaccagcgtgttgttgcggcccttgcggttggtcacgccaatcgggaagaccggcggcagatagacgatgtcgaagccttcggcagcggcgcgttcgaggccggccatcgaggtcttcagcgtaccctgaatgatcttgccggtgttcggatcgatggtggcgccttcggaacgtgggaagaactggtaccaagccgcgaagctggacttcgggcgttccaccttgaaacgctggggctggctgggggagatgccatcgcgcagcgggtgagtctcgtgcagggcggcgatggtagggttgtcgccggcggcgaggcgatcctcggcgctcagcgtctgatcggccatggtctcagcggccttctccaaggtcttgcgatcgcgtgcggtcaggccggcgtccggggttgcggcccaacgggccagcagctcggcaccggaattgagcgcgttgtccacgtcgtccatcacacgcaccttgatacgggcgtcatgcagccaagaaacgtacgtgtcttcccaaccttcgatggtcacggtccattcgccgagctgacgcttgacggccgtgtagccatcctcccaaggcttcagatcgctgtgttcgccgcacttgaccatcacggtccaacgatcgaggccgggatttacgcaggtcatggcctggcgcatggtttccttgccgcgcgggttgcgcacgatggcggtggcacccaccttggtacggccttcgatgaacacttgggcggtcatctcaaacggttcgccgagttccacacgggcggggaagatgccacgctcctcggtgggagtgatgtccatgacattgatgcggccgaactggccgggctcgtttgcttcgatggacggtgcgggggcttcgacagccaggcctttcagcgctgctgcggcgcgtgccgtttcggcgctgactctcttgcgcttggttgcggggctctttcgggcagaagtcgtctttgacttcgtcttcgtggtgttgttatcggtattactagtgcgcgtggtcgcgcgatgttgtactgctgccataaggccctattctagaggcttttgaacatatgttgcgcattgtggataacttgcaggtaaacgttcggtcaaccgcatgaggtggataactcggcggaagagttatccacaactcgccggcaaacggcaagctcggaccacataggccgaaaaatcggctgtagcgaatgaaaatctgccatgatcgtggcctacccgcacacagtgcagtatgcggggaacgtaccaggaaaggacgaatgatgataacgacatggcggcaacggggcatggccatcgtagcgatgctgaccggtctgataataatggtgggagtggtgttcggctcggcgaatacggcgtatgccgcgacgttgacgcccgccgacgaaagatatcacgtgacgtttccatacaacgatatggaatattacgtcggtgtcgcggggctggacgcttcgggcaacaaatactactgcatcgaagcggggaaactgagcgactatgtgataggccccaccacggtgcttgcctccgatgagaacgcccggcgtatggcatggatccttgaccggtaccgcgacacggatgccgccacccatgcggcgatcggcatcatcgtgcaggatcacttcgggcgcgatcgggacgagtgggcgagacagatggcggtcattcaaggccggtatcccgagatcgtggcgaaggcggcccggatatgggatcaatcggccggcaagacgcctgcgggcacgacggtggaacgcaccgatgccgaggctttgcgcagcggtgccatctcggtgaaagtggtgaaccgcgacggtgacgcgatcgcgggagtgccgttcactgtcaccttgcaggggccggcgcggttcatccaaggcggcaacacgttctcgggggtgtcgacgagcgccggatcctcgatcgcgtgggaggcgaccggcgccggcgaggtgacggcgaacaccacatacgagtatgggcggatgcacgtcatggacagcactcaggacatgctggccttcgattcgatggcttccgccggcggttcgtcgtcgacgttccaggtgcgcaaggatttcgttccgtcggtgtccacgcaggtgtccgataaggtgcttgatgcggcttcgccggtgttcgatgatgtgaccagcggcgtgggggacgagggcagtcattgggtgcccgatctgaagctgcaggcgcgtggatactatttcgacgggctcggcaaggacgatctgggcaaggtcatcgcgccgaacgcacgggagagcgcggacgcttttctcgcccggctggcgtcctcgggttatgagccgagtgcttatggcaaggcgtccttcaccggtgtggggcagcgggttcgtgtgcgggccatggccaagccggacggtgacgccgcctatctgactccgaagaccggcggctttggcacctgggtgtgggtgttccggcggagcgagcaaagcaaacgggcgcaggaataccttaccggcgactgggtgagcccgttcatggaggcttcggaaagcaacgtggggcgcgggaaggtcgaagtcatgtcgacggttaccgaacattcggcggatatcggcgccgaactcagcgacaccatcaccgtatcggggttcccggcggaccacggccagttcatgggtgatgaaacctatggtttcgcggcggatcagccgtatgcgacggtgagcgtatggtggtccggcgatcccgacaacccctccaacgatgaggcgtacaagccatccgggggagaggtccccacggaagacgacaaccaccggttgctggccacctgggagattcccgcgatgaacggcacgttcaaaatcggcgccggggcgttggacgcgcatggcgctcccatgcatctgaccgccgaacggcatgggtggtacgtgttcgtttggcggttcgagggggatgaccgtgtttccccggcgtccagccggtatgacgatgcctgggagcgtgtgcgggtgttgcccccatgcgagtcggagaaaccgtgcgaaccggagaaacccgagacgccaccggcgccggcggaggcaaccacgcccaacactcgcccgtcactgcccgtcacgggtggcgatgtgtcgcttgcctcggttctggccgtgtcagctctggcgataggcgccatactgtccatcgtcgttcggtggcgtcgttgctatgaccgatccaagcactggacgatgcgctggccgatacgttgacccgctgcggcatgatgccgatgatgtcggctggatggtgaaccgcactccgcttctgagcagaaggacgggagctgggcacgaagtcgattgtgacatacgacttgtgcccggcttccgcttcgttgagaaacttcacgcctgtcgcctcccgtggattagacaactgaaggtccgcgatgaaaacgacgagacgtttatgatcgccgacttccctgggcaccgtagctgcctgatcgcctttcatccatatcgccccggtcaggtcgtcacctacaacggcggcggcagcgtcgccaccggcagcaacgccccaccgtcccgtaccgtgaccgtccgtgcagaccctcggccccgtatggggctggacgtgggccgatccggccgcgacgaccatcagcgccgtcgccctgaccatcggcgtcgtcatcggcgccagcgtcctcaaggtcaaggcatccaaggccgaataacaagaagcccccgaacctgaaccgtatcacgcggcaggttcgggggcttttcgccgtatatgggtcaggccatcgcgggctgtgcctgattggcggtcaggtatgcggccagtgccttgcggatcagagcgctcttgccgatgtgctctcgttcggcctgtgcccgcacctgtgcgtccatgtcgggcgtgaggtatgccttgtagagcacgtcggccttccggcggggctggtcggcgagggggcggccggcgaagatgtcgtcgatgtcatccatcgtgatcgccctttgcgggcggatggtctcgccgatgatggcgggggtgtgctcggtgtattcgtccgagagctcgtcccagtctgtttcgttgctcatgatgtcctccttggtgttttttagtcgtcgaacttgtagagccattcgcggcggcagtccatcgcgtggaacaccttgcgggtgcgctgggataccagcagctccacggggcgttccctgaactcgtccgggtgtccgaggatcgccatgaccctgtcgccggcgtgtctcgactgcacctcgaacacggccaccggatgccggaatatgtagtcgatctgtggctgtgtgaaccagtgcttgaaggctgacggttcgcattcgatcatgcttattatggtaccataatttagtaccacaatcgagtcggggaaacggaacatcgtgatcctcctaggcggcgaggcgcgtggcttccacggcggcgcgcagctggtcgtcgggcatggcgatgtaccgttgcgtggtctcgaccgaggcgtggccgctccaccggccggggaacagatagccgttggcggatcggatcagcagggcgaggtcgtcgccctccacgtccctagatcgcccttaagcgccctcgacaatgcggacatctggcatcggcgcgtgccgatcgtgttggggggagtagcccgccgccttgagggggtcgagccatagattgattgattctgcccagagcgggcttggatgttgttttttcacaggacatcatcgccccgatcggatatgcggccccgtagggcacgacggcggataaacgaaaagccgtcacgaataatcgtgacggcctcgcccgcagtagcggggcatggatttgaaccgtggacctctggtaacgttgttgcccagaggtccacggttcaaatccatgaagcccgattatttgattttatcctagcggcgtaatgccgccggccgccaaggatgccggccgtgagtatgcacaaaaagctgccccctgctcagtggcgggacgaaatcaccctatggctcgaatcgctcacggcggcgggcctcagtcaggacaccgtcaacacgcggcggtgcaagataggccacgcggcgcggtgcctggataaatcgccctatgacgtgacgtcggaggatctagtgcattggaccgcctcgcaatcatggaaggcggagacgcgcaagggctaccgaaacacgctcgtcggttttttccggtggctgcatgccacgggccggcgcgcggacgatccggccgccgcgctgccgaaggtgcgcaagacgcggccgcatccccgcccgtgccccgacgtgcacatatacgctgccatgtgcgccgcgaacgatgtggaacggctcatgctgcgtctcggagcagaagccgggttgaggctgtccgaaatcgcggccgtccactcgcgcgacgtgctggaaggcgacgccggcccgtcgctgatagtgcggggcaagggcgacaaacagcgcatagtgcccataagcgaggacctggcgaagcggataacggccgcgcccggttggctgttccccggccggtggcggggacacgtcgaaaaatcgtatgtgtcccgccacctcacacggctgctgccggacggttgggggccgcactcgctgcgccaccggtacgccacgcgcatgtacgagaccacgcacgatctgctgctggtctcgaaactgctgggacatagcagcgtggagaccacgcaaatctacgtggcgatgccggacagccgtctgcgcgtcggtctggacgcggtgacgttggccggctaggccgcgtgctgcgcgcgcgacttgggcgtgattgggttgtccttccaccacgcccatagcgcggcgcccacgttccatgtgagggcgacgagctggttaaccgtctcgtcagcgatggggatggtatcgacgccgaacatgaccaggcaagcgttaatcaagccgagcagcagcacggcggcgcgggcgatggtcgcggcgctgacgccgggggtgcgggtgtcgccgccctccacttgttcttcgtattccatggctatccttccttttcggtggtcttgtcggtggcggtcacgctgatttccagcgagtccagcttcgcgcgcacggcgtccgcgacgatcttggatatgtcggccgggttcgctcccagcgccttgctaagcgcctcgatcgcggcggtctgcgccgtcagctgggttttgaggtcggctatgtcgtaacgcgcctggatgacgctatccaacacgttgcggccgtcgttgcccttggtctggatcaacgcgtcggcggcccggtccttgagctcgttccgggtctggatgattccatcgaagagattgcggccgtcgttgcccttggtctcgtaaaggtcttgcgcactcactgttcctgctcctgtcaaaagttggtttgctttgttgattacataatccacgtccagaccattcgcggcccggtcgggacatcctgcgtgatcgctgcctggtatctctcggtgcaaccacacgttgccttttagcccgtcgtgccataggcgcggccagccgtatcggcgcgcgatgtccgcgcacaaggcggcgctagcgtccatgcacgccttggtgcaggggacgccggccatgccgccttcgtgctcgatgctgatggtctggcagttcgacgcatagttgctgtcggtccacggcgcgtcagcttctcgcacatactggtggatcaggcccgtggagccgatgccgtatgtgctggacgcctggcgcaccggattctgaaacgtcgcgtcggtgccggcgagacggcctaccatgatgtgcagggtgatgtgcgtgacctcgtagccgttgcgtcccgcgtagtggttggggctgcctatccatgtgctattgaccattcatttgtctcctttcaatcgtctcgatgctcgaaaagcccttccggtggctcaggcggtggtggcggtgctcgccggtatatgtgatccacgagagcacggttccattgccacaacagggaattgtcggtctgcatctgttgcgcgagccggtacgcctccaaccggtcgcgcgaggcggttgctacggtctggataatcgcgcccagcaccacgccggcgacgccgaccaccgacacgattacttcctcgctcatagctccaccacgttgagatagccggccacgcgcattatgccgctgttgttggagtggaacgagacctggattccgccggtgccgtcggattcgatgacggtcacacactcaattgcgctgaacgcattaccagaggtgcttgattccgccgcactcgggagcagtgacgaggcgcctcctaccgtcgccaccccgatgcttagccatgtcatgtctgcgataccggagaactgcatgtattctttgaccagccatcggccggccggcagaatcgcatacgcgcccttgctattggcagtcgtcttgatgtcggcgcttccggtcacgttggagaacatcatgtatgtgtcgccgttgttcaggatgaggtcgttcgcggatcttttgaaccggcagccccacgtgcgtttctgtcgaatctccacggggtgccaggcgtcgccaagacggtagtacagaccattgcgttgcatggtgtcaccggtgaccacgcctgattgtccattcacgccttccagtgactccaatgtctccagcgtggttgcagtcactggcgatacgccttcgggggtcgctcgcgcgtcgatttcgcgcaagaccttttcgacgccttctgccgtctgtcggaactgtgtgggggcggacgatacgaggtcatcggcctcgatataggggatgccgtacacgcttgtggtcttcatccttgtgatccttcctgtgttggttgtgagaattgtcgaattaacgcgagctcggctagtgtgaaccggcacatgtcccatgtgacgggccatgcacccatatccgcccacgtggtcgcggtatcggtcttgacgggcaacggccataacgtgacctcgttgcggagcaacggccgcccgctcgaccactggtaggtgagcgtgccgccgatggtcgcccacgcgccgcccgtggcgggtatgccgtcgtcgccggtgagacgtgacgacgtggcgccctggatgacgagcggcccggaactggcggtgagatacaggcgcgcgtgcgtggccgggtccagcttgcggccgtcgaacaccaccgttgccggccgtaaccgccggtcgatggtgacgagcagtcgggcgaacgcgtcacgatccgcgtcggtcggggcccacacgctgccgcccgcgcggccccatacgccgcccgactcgtcggccgtcaccacgtcggcctcaacggtgacgctggattgcgtggccttcaggttcgccggcagccggcccatgtccgtcaaagcagtttcgtgctggtcgaactcaagcgcgccgtcggacgctttcgctgtcttgccctgaataacgaactgggtgacgggttccgggatcgtcaatgattgttcgtcgtcggtgatgacgtcggcggcgtccaggccgtccagcgtctcgcccgtccagtcggtcacggtaagtcgggctgtgtcgtcgatgccgatgctggcgggcgcgccgaacggcatgtagtcgatgcggctcgcgtcgcggtcggggtattcataccacagcggccacattcgtgagtgcgcgtagagacggtggagcagggcgagctgtgacgggtagtcgtcggtccggtagggtgccacggatgcggtggtgtcgaggccgttggcgttggcctgtggcgcgtccgcctccttggcgcgtcggttgagctccgtcagccgttctgctgtggtgccgacccagtgcaggcccgtgtaacgtgcatcggatgatacgggcccttgtttctgcaatcttttccacaggatcatgcggctggaggcgctgagctccaacagccagccgccgccatgtggccgggcttcgccgccgttctgcaccagcccgtcgaacaatgtcgtcgccgtgcttgacttgtcggaagggttgccgggcgtgtatgcctggtgcatcgcgtccaaacgcatgcgctgcgccgaccatgcgcccatgtcgtcgcggagcatgccccatgtgggctgttctgagatctgcacgagcacgcgcgcgccgtccagcgtgagcgcgcggccggtgagccaaccggtcgcatcgcgcagccggaaggtcatcacggacgggtcgggctgctggtcgatgccgtcggtgccccactggatgctgaagccgtccaacgcggccacgtcgttgtcgtggtcgttgacggcaacccagccgtcgccccagtcaaggaacatgaaacactgctgcgccatcagttgcctcgcttccggtcgtagtcgcggagaatcttcctgatttcgcgtgccacgccctcgcggtccacgggcgcgttgaacgtgacgttgaaaacggtggtcgtactggccgcctgactgccggcggtggtgccgccgttgaacacgacgttggataggcggccgttgatgctgccgatggtgcggcgcacgtcggtgtcgaagccggtgcgcaggcctcgtgcgaagcccttcatgatgagccggccgttgttgacgagcatgatggcgtcgtaggcgggcggccccttgtgttccttgatccagtcgccgatgccgctgacccagccggtcacgttgctccacatcgatttgaggccgttgaggaaaccgctgatgatgctcgctccggcgttgtacaggatgctgccggcgttgccgaagcacccggctatggagccgggcagtccacgaaaccagccgactacgccgttccacgcgttcctggcaccgttcgcggccgagttgaaaatgccgacgatggttgaaccgagaccggagaagaagccgatgatgccctgcacgcagccggacaggaaacccgtgaagctcgaccacacggccttcccggtgttggtgcaggcgaaaaagtaggtgagtccggccacgagcgcggcgatgagcgtgattaccagcatgatcgggttcgcggccatgaccgcgttgagcagtgcctgagcgacggcggcaatccgcatggcggtggtgacggcggtgacggctgccacggctccgccgacggcggccacgagtggcgtcacgagatccgtgtttcgactgatccagttgcctgcggtcttcagccatccgccgaccgtctgagcggccgtggcgacggcgttgagcacgttgccgaacgaggttccggccggctgtcctccggtcatcgcgttcacgacggccatgatgccggtccacaatgattgcaggccgccgccggccgactgtgcggccgtctgcaatgcggcgaacgctccggtgtccttgacctgtgtgaagaacgtctgcaatccctgcgtgccggtctgcgcgaggttcgtgactgccgccgcggccgcgttgatgccgccggtgacggccggtttgaacaggttgaacgcgtcggtcaggccgccggtgacggccgcttcgaggtttcccatggctccctcgatggtgctggtcgatgtcgcggcctgtttagccacgtcggtcatgccgaggtccatgagcgcctggttgaactcgtctgcggtgatctcgcctttggacatggcgtcgcggaagtttcccgtgtacgcgccgttcttcagcagcgcctcctggagtttgccggacgcgcccggaatggcgtcggcgagctggttccaattctccgtggtcaatttccccgcgccggcggtctgtgtgagcatcatcgcgacgcttttgaaactgtcggcgttgcctccggccaccgcgttgaggttgccggccgcctcggtcagttccatgtagttgccgatgccgtttgccgcgagctgcgcggtggtgttctggatgtcatcgaggccgtacacggtggcgtcggcgtatttgcgtgtttccttcgctgctgcctgcacggctttagtgtcgatgccggcgaagctcatggtgttcatgaacttgtcggtgctgtccgacatgttcaccacgtcgccggcgaagccctttaccgtgtcccacagcgcggtcacgcccttgacggccaatccgccgatggcgctgccgaaagcggccgccttcgtggtggtcttctcgaacgccttgacggcatcatcggcgttgccggtgatgcgcacgctcatgatcgcgctgtgcgccatggttcactccttctgcgattcttccgcttccttgagcagttcggccagtccggtgccccaatccaattcgtcggcctcgttcctccactgccatggcgtgccgccgaaacggctcgccagcaggaacgagagacggccgagcgagtcttggggccatgcggctagtccgtagggtttccctcttccggctcctccttcgctgacgcaaggtcgaaggacgccacggtgtccagccaatgctcgaaatcaggcatggtgcgcccagtcatgcgcagggccgcgtaggccgcgtacgcgccggaacggacgggggactgggtgattggcccccagcccgcgtcgatggcgtgcgcctcggccttgcatgtagcgcgcatcgtgatcggcacgagttcgctggtaccgtccatgtaggtgattctcgtggttgccattattttcctttcacttgcttcaatgtcttgtcgatgaagtccttgtagaccttttgccattggccctcggtggaagcgacgccgttgttgacgaagagacgcggtttgatgcggcgggctggccacccgtagttgactgggcccgcgtatggcacggccttgcggccggcgcggatgacgccggcgcgtttcgtcgctccgacacgcaggctgccggccagccggccggttctgcctcgtggggcgaggttacggacggcgggcagtgcgatctgcgcggcctcgcggttcacttccttcaggtcgtccatgtccgcgccggccttgcgcatcgtctgcacgaagcgtttctggccgacgaccatcaatgccttggcagccatcatttacccgagtaaaccgcgtgtgcgacgttcgtgacggcgaagctcagatcgttcgtgttcttcgatttgacgtcgccgccgatggcgattggcgcgatggtgacgttgaaggtccactggatcttgccggtcttgttcggtacgaactgggccggcagcgtcgcgcccttgtggtcgaagagccagacggccagaccgtcctcgctgaagtcgtcgtcgacggtgccctcgaaggtccatgtggtcgtggtgttcgtttcctctgatccgtccaaaaaggtggtcgggtcgtcgctgctgttcgacgggttcagctgcgccttggtcaggtcggcgctgaagtccctgccgtttgcggtgtcggtgattttgaagatgcctggtccgagcgtgcggatctttccagtcatgattgtgtcctttctaatccaacgggttgagggttatggtgtaggcggctaggctgccccctccggtcaggttgaacgtgcttggtttcgcgtcccgcaagttcacttggcggtcgtgcaagcgttgcacgccgtcggtcaacaggtccagggcgagcgactgcgtggccatggtgccggctatgaggttcaccgtccaagtgatggtctgcatatgccagccctcgaacgtgagttctggcgggtctatcagcaccgctattttgcctggcaacgggcgggcgtcctgcgcgtcgatggtgacgacgcaaacgaggtcgcccatggcgtccgtcagcatgtccataagggcttcgcgctctcgtgttacttggctgctcatgcgatcaccacgctcccggtcaggacgccagccgcattgagtttcggccacaccgaacgcaacgggtctgtgctgacacggaacggttcggtggtgccgtcgccaacgtccatgacgcccaaccgggcgtcgcggctgttgtacaagtcagcagcacaactcacgatgcaatcggccagcacttcgtccttgatggacgtcgcgcccacggcgcttgccacatatgcctttgcggcggccagcttcgcggttagtcgttcatcgtcgccgctgggcacgctcacttcgttgcgcagctgggccaacaactgttcgtcggacatgtcagatcacctcaatcagggtcagatcatccatcagatttcctccgtaacttccacatcatcgatgcggccgaactccgtattgatgatgagccttgccttcgttgtgtttggcggcactttgatggttgctgtgtaacgtttccagatcgtcggtgggtcggccggccataattggatgagatcctgtggagtcccgtcatcgaacaccatttgcacgtgcagggatctggatactgcggcgttcgtgtaccacaacgacacgtgtataacgctgccttgaatctcgaatgtctccgatttcgcgccgacatagagcattcgcgtgccgctgtgaggtctgatgttcgcaccgttcgggtcggtctcgaagacgttggcgtcgctggtgatcttggtccagtgtgcaagaccttcctcgaagccggggttagtcaaaagattcacttctggtgccacccccccccccaatcgctttcgcgtcgagtgtcgcgggcggctgccaagcggtcacggtttccttcatgtccaccagcattggcagcaacacgatgtcgcatggtttgccggcggaatggatcttgccgtagacgccgagcgtgcagtccgtcgcctcacggagcgtgaacgtccggttggcatggttctggaagtccacgtattgcagtcggttgccggactggtcgaagacggcgatgtacacgttgtcgtcggtgaggttgccgcttgattcggtcagcaggtaggtgcccggcttgagcgtgcccaacggccatttgagtcccttgccagcgtcaagggcgtcgcttctgatcctcaatgctccgaggtcggtcacgttggccgtcatgccgttgatcgtgccgctggggccgtaggcgagctggttcacgcttttgggaacgcgatgggcaacaggccgtcggtgaaggtcgcggccacggccatgtatccgtacaccgaatagttgtccacgatcttggtggggtcggtgttggaaagctgggtggggccgccgctttcccacacggtgacggcggtcgggtcgatgaacgcggcggtgccggtcggggccttcggcagcaggtacaccggcacgcgcatgaggttgcccacgacgccggtcaggtcgaacgcgcccaacgtgtccgaacccttgccggaaatgtccaggaatcggctgccagaatcggtgagcgacaccagtgcaagcgccacgtccttggaaacggcgagacgggtcagcgaagcgttgcggtcatccatgacttcggcggcgttcaagatcaggccggcccagttgttcggggtcattttcgccaacgcggcgggggcgtcgatcttgttggcgtcgctggtcgcgtcgcgctgggacttgatgaggttgtacaggtaggtgcgcacggcgttttcggtggccttcgcgtaggcgttgttcagggcgcgcaaggccgtgttcagcattggcgtggtgctgcgctcgatggtctggcgcgaaagcgtggtgtagccgccgtaggtgttgatgtcggcggtcttggtgccgaacttcactttgccgaaggtcagggccgcgccctcggtggtctgcttgtccacggccgtggtgtcctcgctcaccacgttgtattccatgctcataccggtggccggcagtgtgtcatgggtgaggatattggtcaccttgcggcgctgctcgatcagccgcaaatcatccctaatccacgccaccgtgtttcctgtgtcgccggtggcgatgaggtcgcggcactcgtgcatcagctgcacggccgcgtcgtcgccacggtagagtgcctgaagatagtcgcccgccgtgcgatactccgtgcccagcaccttggcctgctcgtggtcagtgttcctggcaatggcggctttcatgttgcgctgctcgtccatgacgccgttcagcttgtcgttgatttccgcaaggtccatttcgtttcctttcctgttgtttccggtttcccgaatgttttcgctgctgcgctgcgaagtgatcttcgcggcctcgtaggcgggccacgacaccaccgacacttccagcagacgcacgcgcttgcggtgggtgacgccctgcttgtcggtttcgccctcaatcggcatgaagccgacgctgagcgagtccagcgcgccgtcgcgcaacagggccaccacgtcccggccgcgctgcgtgtcgctgatgtgcgccgtgatgtgcaagccgtcctcttgggggtgtgcgccggtgatgcggccgataagctccccgtgctggtagcagagctttgccgtgtccgtatcatcgaagacgcagtcggcgtcgaacgtctcggcaccgtcccatgtgctaatcacgctgccgtagggaacggccacaccctccaacgtgcgcccgtcgccctcttcggccgctctcaggcacacgccccgtaatccgatttcacgcttcattccgctgtctcctgtccttgtggctgctcctgtggttccggttgcggtgccgggataagcggcggcaacgcctcccttgcgcgcacctcgttaacgtccatccacccggcctctatcgccgtcttgtaggcgttgaaccggtcggccatgtcggcgcggcggctgctgtcccagtcgaacgcggccgtgcggcccctcggcagcaatcggttgaaaagttcctctatctcgcccgtataagccgccagcgtgtaatcggcgaactcgatccacgattgctcgatattcgagtaagtaaggttgctaccgtcaacggctgccaacatgatgctcgccgggatgcctagaagccgcgagatctgagtggtgtcgaacttctgcgtctccaaaaactgcaaatctgccggtttcatgtccaagggcacgtatttgagtttcgagccgagcaccttcacgtcgccggcctcacccgtggctttccacgcctccttggcgtccttggccacctgcggcgtcaccttttcatccgtctgcaaatagcccttgaggttgctaccgtcgctatagaacttggccttgtaggtgcgggccatctgcgcggcctccacctcctcacgcgccgccgagattggcccaagcccacgcaaccggcccggcacgttcaaaaacttgcaatgaacgatctggtcggccgtgtaatcatggcccagatagctatagcggagcttgggcgcggccgggtcgttgctgtcgtctctcacggtcacgagggatggtggaagcacctcgcaagagaccacttcgccatcgaaacgcaccaatcgcacgaaagcgttcccgtccaataccatgcttgccaccatgtccgcgaggaagtcgcggcggctgcggttcacgtccggctgaagcacgatggaggaaaccgtgtcgagcttcacgcctcccctgatttcatggatgggcaaaccggtgatggcggtttgcagcacttgcacgccacggaacacggttgagaggcttaacgggtcgcagttccccaatcgtgcgggcggcttgatgccgtccggcatgtccgcgtcggcaccgcgtgtcagcacgcggcccgccattctcacacgctcccaaatgttcatgcggccaagtatcaccgccaagcgccaagcccgccacaagcccgccgtccaacgccgcataatgccgccacgcgacgccgaacgccaccggctagtagatttgcagcggccccgtttcctcgggcctgtgggcggctccccaagccgccaacatgcagctttccaacggtgacgttaggccggtgcttccgcgtcggctcacgcgccatgcgtcgccggcccatttgcgcgccgagttcgcggcgctggcgtccaactcggggtctgccgcgtgggttatcgcgtggttagccaagccggcaacgaaactctgtccggtggtcaggtagtcggccgcgtccatgtccacgaaccgcagcagcgggtcgcccgcgtcgtcggtcatgtggcgcaaccggtcggacaaatcggcggcggtgccgcgcgcgtcgatcaccaccggagcgctgtacttcgagcacaagcgggtgagttcggtcggcgcgtacccggtgccgtccaagattctcagcaattgcaccgttatggtgccgtcattgttggcgatgccagccgaaacgctcgtgtgcgtcccgtccacgtccaccgcgacgccgaacaccaccggccggccgtccaagtcgccgggcgtcaccggtgccgttaccgtagccgcccacaacgcctcgtctatcgccctgtcggttatgccctcgtcccgacggttgccgaacgcgcgcgcccaacctgccgggttgccctggaactgttcgcggaagtcggccaactgcgccttgttccacaagagtccggcggctggatgatagcgcatgatgctgtccagattctccggatcttcgtcggctggcaacccgaagtcgaaccaacacgtgcggcgcgactgttcgccagccctgcaagcgtcaagtctacggttgaagaacgtcgattctgccgttccctcggtgctggttatccatagttgcggctgcacgccggtggccttaagtcttgtcgccatggtcggcatgaagccatccaaaatggtgtttccggtttcctcggacaacgaaaacgcctcgtccaacgtgattttgtcgccttggacgccgtgccccgcaaccttggtaacgctctttggcattatcacgctgccattggcgaacggctggcgcaagtcgcccgcgccgagatacggccgtgtggttattgcggcaagcggcgagctgccgagcgttttcagatatttcttgaagtggtcgcccgcgtccttgcccgtctgcgccagataatagatgaaacgatctggtccccactgcgagttgcgcgtgtccaccgcgtccacaagcgtgctttttccacactgtcgcggtgtgctcaatatcaccgtgtcatagaagtaagtgcctgtgtccgggtctatttcacctgctacgtcggccaccaaccgttgccatggcagcagaggcgtgccaagcaaccgggcgaacttggcgactataggcccgtcggtgcggcggtccgggtttcgctgggtgccgccgcgcaatggcgtcatgcctgtgcctcttccagcagactggcaagagcggggtcgatttcctgccttgactgaaactcggttttcaattcctggtaccacgccaagagctgggccatgacacggctcgtgtcgcgtcctttgacgttcagcgcgtcgaaattgcgggcaatgttgatcatggtcttgcacacgtacttggcgttagggtcaagctgcctatcgcccacgaaactctcgataagctccttggtagcgcgttcctgcaagccctcgttgggaccgtaataatcattgaaaccgtccaaggtcatttgcattttccaacctccttaatagctggttttcgttggtattccgccgtttccagaatttttttatccggttcgagagagtgaaaaagtgggcgcggggtcttggtcaaggccgatggcttaaaaaacaggctcaccactccggccttgacgcgactgtgacgcgatcactgcgaagccccaagcgtacgagcatggcgcggcgttcccgctgtcgtgcgtccaccaacgcctgtgagatgtgcaagccgtaccattggcgcaccaaccgcttggcctgctccgtcccggcccgctcccactccacgctgaagccggggtctatcacccgcacgtcatagtccagggctatccactcgtccaacatgcgcggatgcctcttgctgcttggcgtggttcgtgcaagccacacgtcgataggctcctgggttatggcgaactggcgataggcggcagaccacgccatagccaccgcccgccgctgcgccatgctgggcgacgccggtaggcgcatggcctgagccaacgccgaccacgacacaacagggtcgccgggctgccggtgtgagtcaatccactccactgcctcacggtcgcatgcaccgggtggcgtgatgatgatatgcaagcgcgcgccatagccatacagcacgcggtcttggcgactggcgttgcaatgcttgcacgcacgcctgatgttcgccacggtatccatgccgccatgcgagtagggcactatatggtcgtcttcctcacccacgccggtgcaaccgggcaacctgagccaacaagcattgccccacgtctcgatcacctttgccctcacaagagggtcgatggtctgcctacgcgccatggccctgcctccgcttcctcgcaagcacccacatatcaagatccgccagctcgtacaagcaaggcgagttgaaagcgtcgccggccttgaaccatgacggcccacggttctccttcctcatgcgctccatcgtgcgcggcgagacgcccaagtagatggccgcttgcctggtggtcagtttcgcgcgcgggttcatagcatgcccacccaagacttgagcgatgtcaacaaatcggcacggtcgaacacctgcactcccgcgcggcgttcgggctttcgcaacacgcccttgctgataagctcctgcaacacatggtcgccggtcgggtcggcttccggcgcgatcttgttcaggcgaagcaagttgataacaaagaaacgattaaccatatcggttccgacggtgtcatgctccaaccgttcgatgttccacctgatagcgttcttgatgtccttagtacgctgcgctttgttcttcggcaccgcacgcttggcacgcttcctagtcggcctgtaatccaccgaatatcccataatctgcctcacttcctaaagcttgagtcggtctgtcgagttggtctgtagaagattgattccgaagccgcgatgctccgtttccatgtctctcaaattggtgaacagttagaacagggaacctcaaagcgaaacaatggaaacaggcgaagccgcaaggctccgccgtccaaagttccgtaaggttcgcactgcaaagcaagctctcaaatcggagccacagccgtcgcaatggtcagcggcacaaggccgcgcgcaaggtcacggcctgagacccgccacgcatggcggcaaagcaccctattgcgccctcccaatgcgccccaagccgtttagtgaacccgcatggcagaccccgccgccgtcgtaaccaccggcccacagccggtgtgtttgtaacgcgctgggcaaggcgcggtagggtactttcaaaacacgctgggactcacctacggtcgcaatccgtcaaagcgcatgaaattatcggaaagaacgagaacgatcacgcctgcctgtaccttcgcttcaccgcatcgtcacgcgccaacgagtcagtcacgcacgaacgcaacagctccaactgcggccgcgtcaacaccaccggcaacacgaccagaacacacaggccgcgcatcacggtcctacaaagcgcgcgcatgcttcgcctccctaatcgccctggcaatctcacgattgatcgtcgccaactcacccatggacaggcccgtaacctgcatgaactggccgcgaatactcgcgcagataccaaagctgtacgggttccctccgtcggacaccctgcaagacacatcaaacgtgtccaaggttgattcaggcttcagatacggcatgaaatgcctccttgcgttgttgagataaacccttcccccgccggcgtaggctggaagctgcaacacaaacaaaccgtcgaacacgacggaggaaggaagaacaatgcccattgcccaattcggaatcaccatctggcttgacagtcaggaaccgcttgaggtcatcgacccaacgccggatgaatacgcgcgaatccttaacgcgctccagaacaagaccactctcggcggaaccaacaccgccggcatggtccacgtccgcttcaccgatggaaccgaccgcttcatcaccatcaacggcgaagccatcggctggtgggcaatcgacgccggaaacaggagcattctggcctgacccatctgcctgattaaggccgcccctcacaccggccttaatcaactcagccataccgtcatcgatttgccatggaacgacgaccacggaatcagcatcatcgatcacaatgacctcattgcgtaaattggccgcatgcaccacagcaacctcgcccggacggctcacacgcaacatcacgccacctccaaaggcttcgcataattagaacggccagtcaggtagtcgagactcacatcgaagaaatcagcaatacgaacaaggtcgcgcgaagtgtaattagcgcggccatggagctttgcgttaagaagctggaacgacagtccgatttctgaggcaagggaacgttgggtaatgtgctgttgcctcattagctctctcaatctgtccgatatgacaccagacgtacagactaaaaccatgtgttactttctacagccaaaatactgttgtctcaaataagacacgccgtataaaagtaaaatgacgttgtattatgtaactatgacagcaacaatgagcatgccgcaggcaaagataaatgcgcaagatattgtcgccgccaacgtgaatctgatgatcacggcgcgacaccttcagaagaaagacttagccaatgcgctgggtcttgcccctcaaacgattgcgcgtaagctgcgcagtgaaatcacgtggacaatcaacgagacgcaggccgcagccgacttcttgaatacagatgtggctacgttgcttaaccctgatttatcgtccgcagaactccgtggggacaacaaaaaacctcggggtggattaaccactccgaggttgttcgtcaaggatctttatcgatcctcgttggtagcggggcatggatttgaaccatggacctctgggttatgagcccagcgagctaccgagctgctccaccccgcgtcggcttgtctctcagacagctctatctacaataggtgcagattccagaaagtcaacatcggcgtgtcgtgtcattttcccacggttctaaaacgtgaatcggctcacgcagcgaggggtttggggcggagccggagtcggggtgataacgcgccataaatggccgttataggaatgccctgaaccgttatcccgaatattgacataataggaacatgcctatcaagatccccagtggcctgccggccagagatatcctcgattcggagcgcatcttcgctctggagaagcccgaggcggagcgtcagcgcgtccgcccgctcaaactggtggtcctgaacttgatgcctaagaaaatcgagactgaaacgcagctgctgcgtctgatttccaagtcgccgctgcaggtcgaaatcgacttcatgaagacctccacgcatgaggccacgcacgtttccgccgatcatctcgtcaagttctacgaaaacctcgatgcgttcaaagacaactattacgacggttttgtggtcaccggcgcgcctgtagaacatatgccgttcgaagatgtggactactgggacgagttcaagacgattctcgactgggcctccacccatgtgttctccaccatgtacctgtgctggggtgcgatgggcgcactgtactaccgctacggcatccacaaggtggattaccccgagaagattttcggcgtattcccgcagtacctgcaggacgaatactgcttcctgaccaatggcttcgacgagattgatctgcagccgcactcccgcctcgccggtgtgaacgaaaacgaggtacgtgccaaccatgaccttcagatcttgacttgggggccgcagtccggcccgggcctaatcgccacacgtgacttctccgaagtgttcgcgctcggccattgggagtacggcaagtacacgctcgccgaggaatacgagcgcgatatggccaagggcatgaccaacgtgcccttcccgaagaactacttcccgcatgacgatccgaagctggaaccgttgttcgtctggcgtgcccacgccaatctgctgtggcgcaactggctcaactgggtgtaccagaccacgccgtacgacctgaccgaggtgccgcagctcagggctgagaagaagctcggtactgatcgttcgattcggcatgagccgggcgggccgcgccaggatgatttcaagccgttcgcccacgacggatacggagtgatcagagggtagcgcaaatgccgcacatcctcgtattatgactaatagcgcacaacgcttgcgcaacatccgaaaaaccttgcgccgccgccgattccagaagacgcgccggtgtagtattgacattgtctagacgcaggcaaataatcactcttcagtcattcggagccgaatgcccagcgcagactccgtgtccgcgcccggcagactccacaccgaggagacgaaagtaacgagcacgtcacatttgcctgcccggtgggtttaaactgacacctgatattgaagaagcaggaggcgtgatatggtcggttcgctcagcgcaggattgctgttggcggacgagggtgctcatctgccctcggtcaacgacttccttcccccagagattctgttccagggaactccgtttgc

SEQ ID NO: 1596 - DNA, 11728 bp, Unknown
  R221_24m  MAG No. k141_48444
aagggcgagcgctggttcgccacggtcaccgaaaacggtcgtctccgtctggatgacggctccgaatatccgactccgaccgccgcggcccgtgccgccgccggaggacgtcgcggcggtggtctggacgtgtggaagcgcacgcgcaacggtcagaagctcagcgacatctggaagcagttccgcttacaggcgcagtagtctacagtaagccggcacatcattgttggctcccctccgtgaggggagccacacgctcatttattccagcgccgccacgatttcagccggtgttttgcaatattcgggaaaatgactgattaattcggcatccgatgtgaccacacagttggcaccggattgttgcgcggcaacgatgatcagatcatcttcaaaatcccgatgccgtttttgcagggaaaaagccttatcacatgtcgactcatcgacagcgacgatgtcacacatctccttcacctgctcgatacaacgccatggcacccgtgacgacagaaagccgcgagtgaaattctccacttccgattcattcggtttgaattccctacgaatcgccgatgatgataggtatgcgatatccttcagcgacaatgacgcgcacaacaacgtaacgttgttcttcgcgccaagttccataaccgcttccgccatcttggcgtgatcatcacgatggagcaaatagtccaacagtacgttggtatcaagcaaaatacgctgcatggaaacgtcggtcatcaatcggccctcttcatgttgtaatacgcatcaagttgctcgtcgtacattttgtcgcggaactgcttgtaggtaaggccttccatgaggtcggtgtcttctgagatcagtccggccttgaccagttccttgtgtacgtatccggcaccttctcgaatcagtttcagcttgcgctgcttttcctcctcgcgggcttgctcttcggcggtcgtttccaatgccggcacttccttgcggtcggcgatgtataaccacagcgaccggattacgtcactcaccgatacgcctttgcccttgaggacttcttcgacctcgttcttcagtttcgcatcaatgcgaacgttcatttggaccatggtcatggcaacctccatttcgaagatgctatgcagtatagcattttggcatgcgtggaaaaggccggtatccgttggcggataccggccttgctcccctcagtcagcttcgctgacagctcccctcaagagaggggagccaagaagaaggtggttacttcatgaggttgcgcagcacgtactggaggatgccgccattacggtagtagtcggcctcaccgggcgtgtcgatgcggaccaccgcgtcgaactcggtcttggagccgtcctcgtgggtggcggtgacgtggaccgtcttgggggtcacgccctcgttgagcttctcgacgccggcgatatcgtaggtctcggtgccgttgaggcccagggactcataggattcgcctgccgggaactgcagcggcagcacgcccatgccgatcaggttggagcggtggatgcgctcgaagctttcggtgatcacggccttgacgccgagcatcaccgtgcccttggcggcccagtcgcgcgaggagccggtgccgtattccttgccggcgagcaccacaagcggcaccttgttgtcgatgtagtcgcgggaggcttcgaagatcgtggtcggcttcttggcgaggaagtcgtaggtgaagccgccaggcgtcacctcctcgcccacggaggcgagcagctggttgcgcagacggatgttgccgaacgtgccgcgcaccatgatctcgtggttgcctcggcgagaaccgtaagagttgaagttcttcggctccacgccgcgctcggtcaggtacttgccggccgggctggaggccttgaacgcgcctgccggggagatgtggtcggtggtgaccgagtcgcccaggagggccagcacacgggcgccgtggatatcggcgaccgggtccggcgtggccttcatgccgtcgaagaaggtctgcttgcgcacataggtggacttgtcgttccacgcgaacagctcgccttccggcacgtcgaggcccttccagcggtggtcgccgtcgaacacggaggcgtagtccttgaggaacatctcgcggctcacgctgccgtcgaccacggcggcgacctcggcattggtgggccagatgtccttcaagtacacgtcgttgccgtccgcgtcggtgccgagcggctgggtctcgaagtcgaagtccatcgtgccggcgagcgcgtaggcgatgaccagcggcggggaggccaggtagttcatcttgacgtccgggctgatgcggccttcgaagttgcggttgccggaaagcacggcggtgacggtcaggtcgttggcgttgatcgcctcggaaatctcgggcagcagcgggccggagttgccgatgcaggtggcgcagccgaagccgacgagctggtagccgagtgcatcgaggtcgtcctgcagccccgcggccttgaggtagtcggccacgacctgcgagccgggagccagcgaggtcttgacccagggcttgggcttaaggcccctggcatgtgcgttgcgggcgatcaggccggcggcgatcatcacggacgggttggaggtgttggtgcatgaggtgatcgaggcgatggccacgtcgccgttttcgatgtcgaaatcgccacggaagtcggtggacacggccaccggatccttgacggtcttctcggtctcgtaggcgggggcggtcttctcgaacatgctcttggcttcggacagcagaatgcggtcctgcgggcgcttcgggccagcgatggacggcaccacggtaccgaggtcgagttcctcgtattcggagtactgcggttccacgtaatccgggtcggaagcgtcgccccacagcttgttggccttggcgtaggcttcgaccagggcgacctgctcttcggagcggccggtcaggcgcaggtagtcgagcgtgacattgtcaatcgggaagatgccgcaggtggagccgaactcggggcccatgttgccgatggtggcgcggttggccagcggcacggaggcgatgccttcgccgtagaattccacgaacttaccgaccacgccgtgcttgcggagcatgtcggtgatggtcaggaccacatcggtggcggtaacgccctccgggatggagccggtgagcttgaagccgaccacgcgcggcacgagcatggagatcggctggccgagcatggcggcctcggcttcaatgccgccgacgccccagccgagcacgcccagaccgttttcggtggtggtgtgcgagtcggtgcccacgcaggagtcgaggtaggcgagcgtgttgccgttggcctcggccttgctcatgaccaccttggccaagtattcgatgttgacctggtggataatgccggttcccggcggcaccacgcggaagttcttgaatgcctgctgaccccagcgcaggaactggtagcgttcgccgttgcgctggtattcgatgtccatgttttgctggaccgcgtcggcgatgccgtacttgtcgatctgcacggagtggtcgatgaccatatcggactggacctgcgggttgatgacctccgggtcgccgccgaggtccttgaccgcgtcacgcatggtggcgaggtccacgatgcagggcacgccggtgaagtcctgcatgatcacgcgggacggcgtgaactggatttcgtggctgggttcggcgttcggatcccagtcgagcagggtcttgacgtgctcgtcggtgatgttggcaccgtcgatgttgcgcaccagattctcgaccagtaccttcagcgagtacggcagatgatcgatgccgtcgagattggcgatgttgtagtaatcgaagtccttgccggctgccttgagggtagccagctggtcgtcgcgtaaggacatgcttcctccgaaatcatgaatcggcttatgatgccgctgattatccgctacacatggtacgggcacgttaccgaggctctggcgtgtcggcttgaagtatgagacaatcgcgccgccgtctcaatgccgacgcgagagcttgcccgtcagtccgcgcacgaacggcgccagccacaggcacagcgcgaagatcagcgcggaaccggccaacgcgatcagcgtggccaccatcgtggcgccggtcggcagaatcagggcgaagaagttcgccacgaacgggacgaacgcgccgatcacgcccgccgccgcgaacaccgccaccagcacgccacgccaaccgttgagtggtctggccacgcgggccagcacgaacacgcccatcgcgaacaggatgatggcgctggtggcgcgcagggcggacaggtccgcggcatcgccggtcacgttccagcccatgaccggcggcagcacccaagcggccagcagcaccgacagcgcggtggcgatgccgcccggcagcgcgaacgtgaccacgcgcttgaggaatcccggaatatagcggcgcgtgttcggcgcgagcgccaggatgaacgcgggcatgccgatggtgagagcgccgatataggtgatatggcgcggcaggtatgggtatgggatttgcgtcagcactacaccgagcgagatcagcgcggagtacacggttttgacgaggaacaggctggccacgcgctccatattggccatgacctgacggccccgcgccacgacgtccggcaggtgcgagaacttggaatccaccagcaccacctgggccacggctttggtggcgggtgccgcgttgcccatggcgatgccgaggtccgcctccttgatggcgagcgcgtcgttgacgccgtcgccggtcatggccaccacgtggttctgcgtgtgcaacgcctgcacgatggccttcttctggtcaggcagcacgcggccgagcacatcgacgttttcgagcacgcgggccagttcgttcacgtcctcgggcagttcgcgcgcgtccatcgccaccggctcatggtcgcctgtcagtttcactctgcgggcgatggcacccacggtcactggattgtcaccggaaatcacacgacagcgcacaccctgctcacggaaccaagcgagcgtccgctcggcgtcctcgcgaatcttctcagagcacaacaccaacgccaccggctcagcctgcacatccagttgcgggtcgtccgagacattggctccctcaactgcgtccctcagtcgcttttggcgacagctcccctcggagaggggagctgtagaccgcgcaacaagcaacacacggttgccgtcattggcatactcgttaacctgctgcaacaccgacgaatagtcaccctcaagcgcagaaataatcacctccggcgctcccatgtaccaggtctcgccggatttacgcaccgcactccatttgcgcgccgaagagaacgggacacgagactcaaccgcacctgccccatatccttgggccttgagcccggcgagtacggcttggccggtgccgttgggctgctcttcgttgcagcagtcgtagagggcctgcgtggctgcctgttccgcagccgcattggcggaatcgagcatcacgagccggttgaaggcgataccgccatcggtgatcgtgccggttttatcgaggttcagcgcgtccacgcgagccagtgtctccacggattcaagctcctgcaccagcgtattgtgacgggcgagacgcatggcggccaccgcgaagttcagcgaagtcagcagcaccaagccttcgggaatcatgcctactacgccggcgaccgcggaaaccacggcttgccgccattcgccggtggagagtgccgtgccccaaccgccgaccgtatgaatctgcgaaagaatcagcagaatacacagcggtaccacgaggaaggtcatgaatttcagaatcgtgttgatgcccttgttcaggtcggacacggttttcttgtataccttggcctgcgcggtaagcgtggcggcgtaggaatggctgccgaccgcattgaccttgaccaatgccatgccggagaccgcggtggcaccggaatacacctgctcccccaccttgtggcgcacggtacgagattcgccggtgagcatggattcgtcgagttccagtccccaggtctggatgatctgcccgtcggccggcacctgttcgccggcacggatccacagcaggtcgtcgagcacgatctcgttgtggggcacctccacgtccctgccgtcacgatgcacgaggaattcggaggccacaaggatggaaagcttatccaacgtgcgcttggccctgagttcggtgacgatgccgatgcccgtgttgatgatgatgacgaaaccgaacaccgcgtccctccaggaaccggtgatcagcaccagtaccatcgcggcgaagatgatgccgttgaacagcgtgaacacgttggctcgcacgatatcttgaaccgaacgcgaggtggatgttttcaccgcattcgattggccactttcgatacgctgcaccacttctttggaggtaagaccggttgctccgatttcaggcatttccacggctgttgttgcactcatattccccagcctaccgcgtcttgtttcgcaatccgctaaggctcagggatgattcagggtgctttctcagcttcaagggcctgattcggctcaggaaacggtgactttgatctcgcgttcgtggggttcgtcgcgcgtgatggtgagcacggcgtcagtaatagtcattggcttggtatcggcagtgtcgccagaatcggcactgttggtgttgaggtgaaggatgacggcgtacagcagttcatctttgggcgcatgctttggatcaatgagagcgactggaataccggcttcacgcgcattggtcaacgtctggttccagctctcccggttggcgtcggtaacgtcgatgccgctgataaccacgattttgaccgcgcgagctacgaaatcggcaacaccctgctgtgcggtggccgcattcttgtcgacgccagtatgagcatccatactatcggcaccgttttcgctggtagtgccggcgtcagaagattcggtttcaccggatacaccatcagttgcgtttgccgagcttgcggatgtttcgagcgaggcatagtagacattgagtttgtcatcagacagcgcattgatgacggactcgtctgcggcggtgtcagtcgaccccacaaagccgactgtgacatccgtgggatgtgtggaatcgtgggcgacttccggcatgctgtcttgggtatcgccgaccgccctaccggccggcgtgcaggcggccagggacaacacagccgccatgcaggccagcaatccgagaattcgtcgtgtcatatgctcacctgtcagcgggtaaacagggccaccgtctcaacatggtgggtcatcgggtagatatcgaaggcacggatgtctttgagctcgtagccttcgccgatgagtgtcgcggtgtcgcgtgcgaggctggtgggatcacaggcgatgtagaccacgctggatgcgccggccgcggcaatctggcggcagaccttggcacgagcaccggcacgcggcggatcaagcactacgacattcggcttggccagatgcgccggcacatggtccagcgtgcgcgagacgtcacccgcgcgggcgtccacgtcgttcaggttcatggcgcgcagattgcgctgggcgttcttgacggccacacgcgcgccttcaacgctgagcatgcgggtgcgttcaccggtcattgtggccagcggcagggtgaacaggccggaaccggaatacaaatcccagattacggcgtccgccgctgactgcagctgcccgttgaccaggttgatcacgtgcgtaccgagggcgatcggcgcttggcgatgcacttgccagaaaccgttggcgtcaacctgatagtcgaaggtcgtgccgttgatggtcacctgttcggtgagcagctgggagccggcgcgcagttcgccgtccacaagtacggcgtaattgtcgtctgctgccgcggtatcgacgatctcgccgcgcggttcgggcacggaaagacgaatctgggagccgggttcaaagccgccttcccacacgtgttcgcgcttggcgacgtccagcagcgtgcgcgtggcaagcggcatggtgtcgatggccacgcggttgtgtgtgccgcgccggcgcatggatggcatgccgttgtcgtcggcaatcatttcgatgcgggtacgccaattgaggccgccggctgccttgtcgccgggcatgcgctcgatgggaacggccacgtcgatatggccgagtcggctcatctgttcggagacggtgatggccttccacttgagctggccaggcaaagagacgtgcacgagatccgcgccgcccactcccccgcccatcgccaagggaccggcaagtggccatgccggggtgactcggtcttcggacggctcgagaacctcgacgacttcgccggtccagaaccggtcgtcccggtcgtggggctcgtcaagttcgactcgcacgagttcgtcgggcaaggcgaagcggacgaacaccacacgaccgtcgatatgggccacgcagcggccttggtcggcgtatcgttcgatacgaacttcagcttgcatcatcgtcctttccggttgcgctcggttcaagttcggcatcaacagcgacttcagtctgtatcttcctagccgcgaccttatgccggtgcatcggcgtggcaataatgaggtaactcacccaaatcgccaatgcccagaacggaatgcccatgagcaggcgggtcacgccgagtgcagctacatggttggtcagatacagcggcacctgcaccaccagccgcagcaggaacagaccgacccacaggccggtgacaatcatataggcgcgtttcagggccttgtcgtccatccagtcatggaaccatgccttgaaatgctcggtgggcaggctacggatgaattcgacgaccaaacccagtccgggcacgcgcgcaatcagcgacacggcaagcaacgcggcatagccggcattggtaatgaatccgaagatgtagtaattgcgggcctcatgagtctgccatgcccaaatcaggcagatgcctaccgccaccagaccagagaccgcgcccattaccgactggcgctgaatcagtcgcacaataacctgcaataccgccaacacggccgaaaccgcaatggtgagattcagattgctcgtggccacgaacagtacgacgaacaccacgccaggcagcatggattcgatgacgccacgcgggccaccgatggcgtcgatgacggagaaatcctcgccttcattgccggcgtcggctagagcggacaggccggtgcgtttgttgtctgccaagtctcttcctataaatcagcgaacttcggagaacatcgggccgcgagacagcgtggtcttcacttcggtctgctggtcctggctcagcggacccttcggcttgttgtccggaatgtccttgaagtgttccttgccgttctcctcgccggcttcggccgcggccttggcggccttacgctcagcgggggcgaccggcggatgcatcgggatcagatcgcgcggcgccaaaggctcctcgccacgctcgacgacgatgtcggcgaagaacttgttcagcgcctcggtctccgggctgtccggatcgatagcagccttgccggagaagatgccacgcagcatccagcgcgggccgtccacaccaacgatgcgcgtgttcacggttttgccgcccttgacattgaccggcagcttcagttcggtgccgaacacaccgtccacttcagaagcggccttgttggcttcaagcaggtcaccgcgaacgtcatcccacagtcccagggtcttgggtgcggcaaaggcttcgatctccaggctggaggagccgaaggtgatggtggaaccaagcacttgctgggtggcgcggttggccttgatgcgcagctggatgccctggaggaagggcaggtaataggcgccgagatccagataatcgtcataatcgggcacgtcctcatcgttgacatcccacgggcctcgctcttcgccgcggccctggtattcgctggccggctcggcgagcacggtctccgcgctctcggcctttgcggcagcgttcgcttctgcggcggccaccttgtcctcatcgacaggctcaacggccggctcggcttccttcttgctcttcttcttgccgaatccgaacagtcccataattcctcgtttcatgtaacggttgcaaccttgctaacactagcactcaggcttagagaaagctgagcatcgcggccgccggtgtccggttcgattcgtagggaggccaaaatagtatggccgcatgaccatcaccattaccacgtctaacgtcaacggcattcgtgcggccaagcgcaagggcatcgaggattgggccggcaagcatgcgccggatgtctggtgcatacaggaggttcgcgcgcctcagaacgatgtcgattctattttcgatgaatttggtttcgaatacgccaccgccggcaaaatcgacgcgccggccgacctccatgccatgaacgaggtctgccgggtgaaaggccgcgcgggagtcgggctgctcaccgacttggaagtgcttgacaagcgatatggtctgccaggtctgagcgaggatgtggattcggggcgttggatcgaaaccgatgtcaaaacgcctgagggctatacgatcaccgtggcatccgtgtacatacatgccggcaacaccgatgatccgaccaaaatggaacagaagtatcgttttctggacacgatgctgaagcgcatgggcgcgttgcgggacgaggctgcgcatggcggcaaacaggccgtgctctgcggcgatttcaacatcgcacacacgccgctcgatatcaagaacgccaaggccaatgagaagcacgccggattcctgcccgaagaacgtgcctacgtggacaaatggctggacgaatacgagttcgtggatgtgatgcgttcgttggccggtgatattcaggggccgtacacatggtggagccaacgagggcgcgccttcgacaacaatgtcggctggagaatcgactaccagttcgccacgcccgagctggcggagaccgcacgcggattcgtcagcgacacggctcccacgtatgacaaacgctggtccgatcacgccccactcacgatcacatacgaggtatgacgtattccgtgggacaacatccgaaaatcgacgattttcgcgggtcgtcccacgccccacagcatgagtaattatcgaccacactaagaatggcgtaattccgggcttcgtgagaaatctgctgtgggacaacactcatgtctatcgattgatgttgatgttgtcccacaaattgtgggacaacatcgggaaaacaccgatttttgcgttttcgtcccacgcgaaccataatgcaaacctgcacatacgaatattgggttctttccacggatggaaagaacccaatacaatgcgctcaaacgcagattatcagtccagaccgagttggagcttgccgccggggatggcgtcgagcaggtctcgggtgtactgcttctgcgggtggtcgaagacctcgtcggtggtggcgtgctccacgagcttgccgtgctgcatcaccacaacctcgtcggcgatctggcg

SEQ ID NO: 1597 - DNA, 13691 bp, Unknown
  R221_24m  MAG No. k141_48909
cccgaggcccgatctccatcgccgtcaccaactccgacaaccaccacgtgctttccggctacccggaagacctggcagcactcgccctcgaagccgagcgcgagcacaagcaccaggccaagctgcgtgaacagaagctccacggcggcactgtgttcaaccccactctcgaatacctcgaagtcaccctgcccttccactctccgctcatggccgacgccgtcgagcagaccgtggcctgggccggcgcctgcggcttcgaccagaagcgcacccgtgcgcttgccgaggaagtgctgctcaaccatgtggactggaacgcccgcgtcaaggcgctgttcaacgccgccgacccggccaagctgtggatcgtggaccttggtcccggcaacacgcttggcaagctgatcggcaatgtggtgcagggcaccggcatcggcgtggtcgaagccaccacgctgtccgaacgctccacgctctccacgctggaaagcgagcctgagcgcacccagaactggaaggcgttcgccccgcgcgtcatcaacaccccggccggcgccaagctggtcaccaagttctccaagctcaccggcaagccgccggtactgctgcccggcatgacccccaccaccgtggaaccggaaatcgtggccgccgcggccaacgccggctactgggccgagctcgccggcggcggccaggtgaccgccgaagtgttcgaccgccacatcgccgccctcgaagacgagctggaggaaggccgcacggtcgaattcaacgcgatgttcatggaccgttacctgtggaacctgcagttcggctcctcccgcatcgtgcccaagaagcgtgcttccggcgcgccgatcgacggtgtggtcgtctccgccggcatccccgagctggacgaagccgtggccctgatcgagtcgctgcaggcggacggtctgccgtacgtgagtttcaagcccggcaccgtggaccagattcgccaggtcgtgcgcatcgccaaggccgtgtcccccaccaccatcatggttcaggtcgagggcggtgaagccggcggccaccacagctgggaagcgctggatgacctgcttgccgccacctacgccgaagtgcgcgcctgcgacaacctcgtgctggtcgccggcggcggcatcggcacccccgaacgcgcggccgactacatttccggccagtgggcccacgcctacggcctgcccgacatgccggtcgacggcgtgcttatcggtaccgccgcgatgaccgccaaggaggctcacaccagccccgaagtcaagcagctgctcgtcaagacgcccggtattccggccgacgccaagtccgacgacgtgttcgccccgcaggccgcccactgggtgccgtccggcaagtccgtcggtggcatgtcctccggcctgagccacctgcacgccgacatttacgagctcgagaacgactccgccgaatgcggccgtctgctcgtgcgcgtcatgaagcaccccgaagagctcgactcccgccgcaaggaaatcatcgaagccctgaacaagaccgccaagccttacttcggcgacctggcctccatgacctaccttgagtgggcgcagcgcttcgccgaactcgccttcccgtgggtcgacccgacttacgccgaccgcttccagcacctgctgcagcgcatcgaagcccgtgtgaacgacacggactccggcgaattcacctccaagttgttcgccgctgatggcgtttctgctgaagaggcagctgccgctggcctgctgacccacgacgacattctcgccgacccggcccccgcgctcgaaaagctcgcactggcctacccgcagaccgccgaactcaaggtggtcccgaccgacgtggcttggttcccggtgctcgtgcgcgaataccccaagcccatgccgttcgtacccgtcatcgacaacgacctgctgcgttggtggggtcaggaccagctctggcagtccgaagaccagcgctactccgccgattccgtgcgtgccatccccggcccgatctccgttgccggcatcaccaccatcgacgagccgatcgccgacatcctcggccgcttcgaaaccgccgccatcaagcgcgtgcaggacgaacagcaagccgccgatgccgctgagaacgacgatttcgccgcacttggcgaggccaccagcgccgaagacttcatccgcaagtccccgaacatctcctgggtcggccacatcaccgacaacccggcctacggcaccgccctgggcgaccagtactacgaaatccgcgcgtttgacgccgcggccggcaagtacgatctggacatccacctcgacacctactgggacaacgacccggacggcggcacctccaagcacgccgtgcgcgatatcgtcatcccgctcatcgtggaaggcaccgagcccggccgtgtgccggtcgtggaccgcgaacgcctgattccggacgtctacgcgatgctcgccgccaccgcaggcatcggcaacaccgccatcaccggcgacaagctcaccgagatgccgaagcttgacgacaagacctctgacgagcgtccgttcggtaccgcaaccgcaacctacaccctatccgccaacctcggcttcgaccacgaagcggccactggcgccgctctgccgaccaccctgcagcccagccgcatcgcccccgatgcgctggtcggccctgcctggccggcaatctacacggcgctcggctccgtgtacgtcaagggctacccggtgattgaaggcctgctcaacgccgtccacctcgaccacctcatcgaacttgaggtgaacgaggaggacctgctcaagcacaccggcgaaaccatcaccctgaagtcttgggccgaggattacttcgagtccgcctccggccgcgtggtcaccatccacgtgacccacaccgccgccgacggcacgccgcttgcccgcgaaaccgagcgtttcgcgatccgcggccgcgtctactccgatgctttgcctgcagacgcccccgagtatggtggtgccctcctgaataaggaagcggatggctccgtcgccggacagtccactggactgtccgcctcctcgcgcggcctgcaagtagtgcaggccactccgcgccgtctgctgcgccgcgtgaaggtcgtcgccccacacgacatgaccgccttcgcccgcacttccggcgacttcaacccgatccacacctccactcgtggcgctcgcatctccggcctggccgccccgctcgtgcacggcatgtggctgtccgccaccgcccagcacgccgtgcaggcgaccgacgagaagggtgcccactatgagattgccggctggacctacaacatgtacggcatggtccagcttgacgacaccgtcgaaatctccgtcgagcgcgtcggcaaagtgcgccacggcggcatgaccctcgaagtcacctgccgtatcgacggccagctcgtctcccgcggcaccgcactggtccgcgcaccgcgcgccgccttcgtctaccccggccagggcatccagaagcagggcatggttctggacgagcgcgccaagtccgccgccgcccgcgacgtgtgggagcgcgccgacaagctcacccgctccaagctcggcttctcgatcctgggcctcgtgcgtgacaacccgaaggaactcaccgccaacggcgtgacctaccgtcaccccgaaggcctgctcaacctgacgcagttcacgcaggtggcgctcgcgacggttgcttttgcccagaccgcccgtctgcgcgaagccggcgccgacatctggcccgcctacttcgccggccactcgctcggcgaatacaacgcgttgtccgcgttcgccgacgtgattccgctggaaaccgtgctggagctcgtgttccaccgtggttccaccatgcaccacctcatcgagcgtgacgcacagggtcgctccaactaccgcatgggtgcccttcgtccgaaccagttcggtgtggacgacgcgcacgtcaaggaatatgtggaatccgtggccaaggcgtccggcgaattcctggagattgtgaactacaacctcgccggccagcagtacgccatcgccggtacgatcgccggactcaaggccctgaaggccgattccgcccgccgcgtggccgcattcggtggcaagcccgcgttcatgctggtgcccggcatcgatgtgccgttccactccacgctactgcgcaagggcgtgccggaattccgcgacaagctcgacgcgctgcttcctgcttacatcgactaccgtggccgtctggtggaccgctacatcccgaacctggtggccaccccgttcgagatgaccaaggaattcgccgccaagatcctcgaagccgtgccgtccgaacgcatcaaggccgtgctcgacgacccggccgtgtgggattcctacgccgccgacgaccagaagctcggccgtctgctcttgaccgaactgctctcctggcagttcgcctccccggtgcgttggattgaaacccagacgctgctcttcggtcagcgcgaacagggcggcctcggcgtggaagaatacgtcgaagtcggcctcggcaacgccccgaccctggccaacctcggtaccaagaccctacgtctgcccgagttcgccggcaacgatacggtcgtctacaacgtcggccgcgatgaaggccgcgtctacatgaccgacaccgattcgctggttcccgacgacgagccggaagaggctgcggcctcggccccggtcgaaaccgctcctgccggtggttccgccgtcgccaagctcggatcgggtgctgctccggcaaatgccgcgactgaggctgctcagacaacggatggctccgtcgccggacagtccactggactgtccgcctcctcgcgcggcctgcaatcagggcaggccgctgctggcgcaccgtctggtgccgccgtcgccgacctgcccttcaaggcttccgatgccatcggcgtactcatggcctactccgccaaggtgcgcctcgaccagatcggcagcaacgacaccaccgacaccctgaccaacggtgtctcttctcgccgcaaccagctgctcatggacatcagctccgagctgggagtcgccagtgtggacggtgctgctgaagcgacgctcgacaagctcgcccaaatcgtcaacaaggccgccccgaactacaagccgttcggtgccgtgctctccgaggcgctgcgcgaccgcctgcgctcgctgttcggtgccgccggcgtcaaacagcagtacatccgcgaccgtgtggccaacgtatggcagctcggcgaaggctgggtggccagcgtgctcgccgcactgctgctcgacactcgcgagggtgccagctcccgtggcggcgacctggccaagctgcccaccgccgccgtgcagaacaagccggaagccgacaagctgatcgatgcggccgttgaggtcgtcgcccagctcaagggtgttgccgtggccctgccgtccgccggtggtgccgctggtggcgctgtggtcgattccgccgcgctcgacgccttcgccgagaaggtcaccggttccaacggcgtgctcgccgccaccgcccgcttcgtgctgaacgagctcggcgtggccgctccggctccggaagaatccgaggacgagaacgccgccgtcgtggccgcggtcgaagccgaacttggctccgactggaccaagcaggtcgctccgcgcttcgacgccaacaaggccatcctcttcgatgaccggtgggcctccgcccgtgaagacctcgcccgcgcctactacggcaacgaccccgccgccttgaacggcagcttcatcggccttggcaagaccatcgccgccgaagcccagtggttcgccaacgagtcggagagcgaggagcttaaggccgccttccagaaggccggctccgaggccctcgaacaggtcgcttccaacaagaacgcctcccgttacgcgaatgatatcgccatcgtcaccggcgtgagcccgaactcgattgccgctcaggtggtcgaaggcctgctcgcaggcggtgccactgtggtggccacctcgcacagcttcaagccgtccatcaaggcttgggccaagcaggcctaccgcgagcacgccaccggcaacgccaagctgtggctggttccggccaacctctccagctaccgcgacgtcgacgctctggtcgactgggtgggccacgagcagaagaagacctccggtgccaccaccacgattctgaagcccgcgtgggagccgaccctgttcttcccgttcgccgcaccgccggtccatggcacgctcgccgactccggcgacctgttcgaatcacaggcgcgactgatgctgtggggcgtggaacgcgccatcgtcggcttcagccacatcggtgccgacaccaacgtgcagcacaagctccacgtggtgctgcccggctccccgaaccgcggcgtattcggcggcgacggtgcctacggcgaagtcaagagcgcctttgacgccatcgtcaaccgtgcccgcgctgaaaaggtgtggtcgagccgcgtcaccttcgctcacccgaagatcggctgggtgcgtggcaccggcctgatgggcggtaacgacccgctggtcgccgtcgttgagcgtcacggcatccacacctactccaccgcacagattgcggccaagctgctcgacctgtgcactgccgaatcgcgcgagcaggccctcaaggccccgctcgatgtggacctgaccggtggcctcggctccgagcccatcgacatcaaggccctgcgtgccgaagccatggccgacgtcgagaaggaagctgctgcggcctcgtctcaggaaacggatggctccgtcgccggacagtccactggactgtccgactcctcgcgtgggcagcaaatcaaggcgctgcccaccccgatcgtcaccaagcaggcttcggtcgaccttgccgactggaccaacgtcaccgccaagccgaaagacgaaatcgtcatcgtttccgtcggtgagctgggcccgtggggctccggtcgtacgcgcacccaggccgagctcggcatccactcggacggcactgtagacctgagcgccggcgcagtgctcgaacttgcgtggaacatgggtctgctgacttgggccgacagcccgaagcccggctggtacgacaccgacggcaacctcgtgcccgaagaggacatcgccgagcgctaccacgacgaggtcgtggcccgctccggcatccgcccgttcgaggaaggcatgggcaacgactacaaggacggtgccgacgaagaagaagccgaggtcttcctcgaccacgacgtcaccttctctgtgcccacccgcgaagtcgccgccgaatacgtcaagttggacgaggctcacaccaccatcgccccggatgaggaatccggcgaatggaacgtgacccgccacgccggctcgatgatccgcgtgccgcgccgcgccaccatgacccgcacagtcggcggccagttcccgaagggcttcgacccgacccgttggggcatccccgcttcgatggtcggcgacgtcgacaagatcgccctgtggaacatcgtcaccactgtggacgcctacctgggcgccggcttcaccccggccgaaatcctcgagtccatccacccctcgctggtggcttcgacccagggcaccggctttggcggcatgatgtcgatgcgcaagctgtacctcgaccgcttcctcaaccacgagatcccgaccgacatcctgcaggaagccctgccgaacgtggtcgcggctcacgtgatgcagtcctacatcggcggttacggcaacatgatccagcccgtctccgcctgcgccaccgcggccgtctcccttgaagagggcgtcgacaagatcgccctcggcaaggccgatttcgtggtcaccggtgcgatcgacgacatcggtgtggaatccgtgatcggcttcggcaacatgaacgccaccgccaattcggaggaaatgtacggcaagggcatcgacgcgcgcttcttcagccgcgcgaacgatcgtcgccgtggcggcttcctggaatcccagggcggcggcacgatcctcgtgacccgcggtgacatcgccgaaaagctcggcctgccggtcgcggccgtggtcggcttcatccactcctacgcggatggtgcccacacctcgatcccggctccgggcctcggtgccctggctgccggcctcggtggcaaggactccaagctcgtgcacgacctggctaagctcggcgtctcagccgacgacatcgccgtggtctccaagcacgacacgtccaccaacgccaacgacccgaacgaatccgagctgcacaacacgctggcccacgccatcggccgcaccgacggcaacccgctgttcgtgatctcgcagaagacgcttaccggccacgccaagggtggtgcctgcatcttccaggtcaacggtctgacgcagctgttcaagtccggcgtgattccggcgaacgcggcgctcgattgcgtggatccgaagctccagcgcgacgaccacatggtctgggttaggaagcccctgcgcatcggcggtggcgaggacgagttcggtcgcgagaccgctggtcgcccggtcaaggccggtctggccacctcgctcggcttcggacatgtttccggcttcgtggccctggttcatccgggtgccttcgaagcggccgtggccaaggccgatggcgaggccgcgctggaagcctggcgtgagcgtgccaacgcccgcctggccgccggccagcgtcacctcgaggaaggcatgatgggtcgcgccgcgctctacgagccgatcgacaaccgtcgcttccgcgaggatcaccgtggctacgaccaccacgaggtcgaaaaggcgatgctcctcaacccggacgcccgcctcggtgccgacggctactacgaggcctgattcctctggctcccctcggttgatgggagccagtagcgcaccggatctcggctcccctctttgaggggagctcccgcgaagcggatgaggggagtttcccctggagctttctcgctggcacaaactcagtgagagaaatatgcagaacatacgaaagcccctccctcggagtgggctttctgcgtttcaaggggctgatttggcattcgccggaggtctacttccgtttcaaggggctgttacccaagtagacaaggcgtaaaaacggcggaatggcgttggcgttatgctgcggatactcgtggtatggaggatgaccagacccttgaaacggaagtagacctccggaacggtcaaaatccgcccctcgaaacggagatagacctccggggcggggcgcggatgtttttttggacggctaggcagccagcccaagatgtttgcggtattgcgcgaggtcatccagcatagtgaatcttttccccctgaaatggaaatcaggccccaattctgatgaggtgtagagattacgcgcgaagcggtacacaataggaagcatgaatacttgtggtttggggcatgacgtggtggatgtggccgcattcgccgaacagttggcggagccggggtctcgcatgcgtgcgctgttctccgtgcgtgaggtgcggcaggcatccgaccgcgcgcgccagaagaatgatggggaggccgtccatctggccgccaaatgggcgggcaaggaggcgttcctcaaagcctggtgcgattatcttggcgatgccccctatccgttcacgcttgataatttcccgtggcctgaaatcgagatcttgggcgattcccgtggtgtgccgcatgtgtctctgggtaagggggcggcgtcagtcttccaaactgattacgcgaattcggctgccggcgctcgctattcctctgcttattcccctgcttccgataacgggccttatgcagtgatgcaggagcggcggaatgcgcgttcggcgcagcgctcggctctcggtgcggggtcgatgccgcatatccatatttccctgagccacgatggtccgattgcctccgcggtggtgacgatttctgtggaatagcgcccgaggcccccgagtgctacatgctgtacaacgtctccatcatggttaacctgtggagcgcgctcaccggccgcgacgtgcgcctgctcaagaaccggatcgacaagctcgactcgctgcccgaaaactgctggttcgtgattctgaatgcgatgggcgccgacctccaaccatacgagtcccagctcatccatttgtgatttcgacggtttccagctcccctctctgaagggagctgtcgccgtaggcggctgaggggagtcctcggcaaagccacaatccatcaactagattggctggtcctgctgcagccacacgcgtttgccatccccgaagaaatatgtataataactcaagtcgccaaaagcgacgcttaacgcggatgtagctcaatggtagagcctcagtcttccaaactgattacgcgggttcgattcccgtcatccgctccactatttatatgttggtgtatctaattgggaataccggaagggtgagctaccccgagtagtattagtactcatggtgttgagaatcgacgaagctgaactgcgtgccaagctctttgagcacaaagagcagattggtttcgggccgattgccaatggggccgtcatcatcatcgaaggattgttttacattcctgctgctctcacatctggactcgaccaaatgtttcaaggattgctccttgcattgagcattatcttcatattctatggagtatggagtttgattactgcttgcagaaataagtatgatgccataacactgtatgaggatatcgccaacatggatagaaccgaacgaagaagctcgatcattgcggtgaaagacgctaaccgatatcttctgtatcgtgatttaggttggggatgcgactttttccctaatcatgcaaccgcaagcagtactgatgaggatgttcgtcagctgacgacgtattttgccgatgaattcgaaattcctgctaaagactttactctgtctcacatttgtgtgaaggattctgagaagccatccacggagcatgatggagagattcgttattacgaatacacgctataccgcgctagcgtaacggtaatgcctgacgcctggcgttccactgagttccatgttggtgccaaggactgccgctggatgactcttgatgagatgcttgccgaccccggcatcaacaaaatcaatcatgatgtcgttgcgatggtgcgggataacttgtaattgttgccacttcgggcatatgacgattgagccaaagcatgttctatgtttcgataatcatcaaaagcagagcatagtatgctctacggggatttttctataccctgaaaacaccgaaaatcaggatatagggcagtagcacgaattagccaacagcggcttgtctgcgggcaataatgacgttgctcccgcggattcggataaggagaatcgtagcgaggatcatggtgagggccatggcgagtaatcgatcgtatcggagacttgcctaacacacacgctaagatgggcatcgcaataatcggcaatgagcaggtaatcggcgaggcggtgcatggagcaggaatccaacgagcaagaacctaacgaggcgacggaaatcgtaggcggcaaagtagagaccgtcgaggtttccaagcaccccgaggcttccatacccgagaccgatttgtctctggcggatatcgagcgccgtcgttcgcatccgttgcgttgggcgctgattattcttgccgtactgtgcgccatcatcgcgccgtactggttcggccgttcgttggcggtaaataatactgactccattgtggccgtgctcgggggagtgtctccgcaaggcatcgcactggtcggttgggtgaccgtggtgattgcgtacgtcggattggcgatggcggtggtcgtctcgccgtcctggccgtggctgatcgtgttcgtgatcgggttggccggcgagcagttcatcgcgggactcagtatgctcaatctcaatttctggtattccacgtacgtggtctacggcaagcaggccggcctggcgaatgccgcgaatctgggcattatgggtgcggcgatcggcatcgccgtatatgccctgatgttcgtgggtctgctggtgattatccggaagacctcaccgctgaacgtactgaccaaaagctgggcaagtttcattctgtacttcgtgattgaaaccatcgccctgctcgtggtgttgtttggcggattgctcaccactgtgtgagcgcgtgtgccccagtccggcccctgccgtatagttttcacttggcgtaatttcgcccgcggatagagagcgtttcgagcgaacctgcacgaaacaccgcgcaacgacacaataaggaggacgccgtggcactgacggctgacgagaagacccagattatcaacgagtacgcgacgcacgaaggtgacaccggttcccccgaggtccaggtggctctgctgtccaagcgtatcgccgacctgaccgagcacctcaaggagcacaagcacgaccaccactcccgtcgtggtatgcagctgatgatcggtgaccgtcgtcgcctgcttgactacctcaagcgcgtcgacatcgagcgttaccgttccctcatcgagcgtctgggtctgcgtcgataattgaagacttccgcccgagcacctaggatggtgcccgggcgtttacatatcgccagccaacggcaacaacggcaagagggttagaggataggccagcaggtaaggccgacaagagaacccgaatgaaggggttgacacgaggaacgacggccaaggggccagtcgaaacaaggtatgtgacgtccgctgaagaggacagttgcggttcaagcgagtcgccaaaccgcagcacagtatgtaggaataattagaaaattaaagaaggaggaaccctatggagggtcccgaaatcaaggccgttgaggccgtaatcgacaatggatcgtttggcaagcgcacgctgcgcttcgagaccggccgcctcgcccagcaggccgatggcgctgtggccgcctacctcgacgacgattccatgattctgtccaccaccaccgccggttccagcccgaaggagaactacgacttcttcccgctgaccgtcgatgttgaagagaagatgtacgctgccggcaagattccgggctcgttcttccgccgtgaaggccgcccgagctccgaggccatcctcgcctgccgcatcatcgaccgcccgctgcgcccgctgttcccgcacaccctgcgcaacgaggtgcaggtcgtcgagaccgtgctcgccgtgaatcctgatgacgcatacgacgtcatcgccctgaacgccgcttccgcctccaccatgatctccggcctgcctttcgagggcccggtgtccggtgtgcgtctggcgctgatcgacggccagtgggtcgccttcccgcgttggagtgagcgtgagcgcgctgtgttcgagattgtggtcgctggccgcgtgatcgagaacggtgatgttgccatcgccatgatcgaggccggtgccggcaagaacgcctggcacctcatctatgacgagggtcagaccaagcccgatgaggaggtcgtggcc

SEQ ID NO: 1598 - DNA, 14306 bp, Unknown
  R221_24m  MAG No. k141_49379
cagcatgcgcagccacaacgattcgtccatgaaatcatagtattgaaaagcggttttgagcacatctcgcggagagccggaagcggaaacagggtctccctcataagccagcagcgccttgaacagtttccaaccaagctcgaactgcaacccgaacttgtcaataatgccgctctggatgaaatcattgccgagatcctgttcgggagccttgcgcagcgaattcaatgcggaaacgtaattctcatactttttcatacagcacctttccgctacgctcaatctccgccctcagcgatgaagaaatcggctcatccagattgatgacatcaactttaagcagtgaccacagattgtcctgaaggttctgctccaagcgattgaaatcgggacaaccggccacggcaagatcgatatcgcttttaggccggttcacgccctttgcgcgagaaccgaacagcacgaccttgcgagcgccggcatcagcggcaaacgcgcgaatctggtcgtacacgtgctcgataggaaccatgacacctcccgccgcatccaacagtcccggaccaatcccggaccacccgcgcttccatcatacggccgcgtcccactcaccgcacggagcccgaaccacccgaacgcggcgacgtagttgcgggaggcgggctggcgctgtagggcgtgcgggaagttcctgacgtctacttttcaggaggtgaatcctcatgttcaccacgctttctctggccatcattctcgactgcaccgtacgcattgtgctcggcacggcattgggcgcgctgatagggctcgaacgccagttgcgcgcccgaagtgctcggcgtgcgctgggatgtggagcacatcaccacgtccgactgaaacgtccgactgacgctgaccagcaacatcgcaacagtacaacaagccaacaagtgggatggggcatcgagcctcatcccactttgttattatccggcgattgtcagactcactcacgccacggtgaacgtggtgcgcttcaggtcctcacggcgcgaggaggggccgatgagcagttcaaattcgccgggctcgacgatgcggttggcgtccgggtccacgatcgtgcagttcgccaccgggatctcgaaggtgacggtcttggtctcgccgggttccagtgcgacgcgctggaacgccttcaattcgcggtcggtccagctgtaggaggtcacgatgtcgccgatgtaggcctgcacgatctccacgccggcgcgctcgccggtgttggtgagggtgatttcggcacgtacggtgtcggtttcggcgaatgtgccgtcggcgttgcttgcgccgcccgtaatggtcggttcgccgtatgcgaacgtcgtgtagctcaggccttcgccgaacgcgaacgccggatcctgggtgaggtcggcgtaccggtcgccgtgctggccgcgaatctggttgtagtagactggcagctggcccgcgtggcgcgggaaggtgatcggcagtcggcccgacgggctggtcaggcccaggattatttcggcgatggcctgaccgccgcgcatgcccgggttcggcgcccacaggatggagccggtgccggtttcagggtcgctgacgcgcttggcgaacacgccgtactcccccacgatggaggcgggcaacacctgcggcttggagctgatgagcacggtgaccatcggcttgccggtttcgcgcgagacggcggcgagcgcgtcgagcagggcgttctggccaccgagcagttcgagcgtggcggtggagcaggtttcgccgaccagctggaccacgtcgccgaccacggccacgatcagatcggactggcgggcgttggccacggcttcgtcgatcattgctcgatcgacggcggcggaaacgccgattttcgggcgaggctggccgtccgggtagaactcgccggcagggtcaggcacgaggtcgatgacgttcgcgccgcgcgagtagaccacttcgcaatcgtcggaggtgagctgggtcaggccgtcgagcacggtggtaatcatgcctcgaggctggccatccggcatccaagagacctgaccggagttgccggtccagtcgccgagctggttctgggcgtcgtcggcaagcgggcctaccacagcgatgcgcttggccttgtttgcggcgaacggcagggcgccgtcgttgcgcagcagggcgacggattcgcgggcgagctccaggttgatttgctggtgttcggccgaaccgatgaccgccttgatacgttcggcgtccggcagacgcgggtcttcgaacaagccgaggcggaatttcagagctaggatgcgagctactgcgtcatcgatcagggattcgtcgagcagaccggtttttacggcttcgatggctccctcatagaactgtggggtggtcatgaccaggtcgttgccggccttgaccgcgtcggctgcggcgtgcacgtaatcgggcttgacatgctgctcccataccgagcggccgacgttgtcccaatcggtgatcagcgtgccgttgtattgccatgcgccgcgcagcttgtcggtcagcagccatttgttgaacgtgaccggcacgccttcgatggactcgtagccgagcatgaacgtgccgcaaccttctttggccacgcgctcgaacggcggcaggaaccaggattcgagcttgcggtgggagaggtcggcttcggaggcgtcacggccgccttgggtttcggaatagccggcgaaatgtttggcgcaggccaggatcgcgttcttcggcagggcctcgccggccttggcgccgccttgatagcccttgaccatggcggaggcgagttcgccgatcagcatcgggtcttcgccgaaagtctcatccacacgcccccaacgggtgtcgcgggcgatgcacagcaccggggagaacgtccagtgcacgccggtgcaggagacctcttcggcggtggcgcggccagcggcttcgactttggcggcgtcccagctgacggccatgccgagctgggaggggaagatcgtggcgccgggccagaaggaatagccgtggatgcagtcgtcgccgatgaccagcgggatgttcaggcgggtctgctcgttgaccatcttcaccgcgcgcggcaggtcggccgggctggtgtgcaggatggagccgacgtgcttgttgacgatgaggtcttcgaggtcgccgctgcgtgcgtcgagctgcatcatctggccgaccttctcttcgagggtcatgcggccgaccaggtcggcgatgcgctcctcggcgggcagggcggggttcttgtacggcatggtttcggcgtttgcggaggttgcggtgttgtcggtcatgcggtgtcgctttcttcggtgaaatcgaacggttctttagttaccgattggtagtttagcatgcctaatgacgaaacacgctgcgaatacacggttttctgacaatctaatttctgttagatatcctgcaagcaccagaacgcccacctatcgcaagaaagctcagcggtacccgtcccagagcggcgaggggaagatcatgggctccagatcagcccattcgtcgttgagatcgatggccggcacccgcaaccagcgcaactgcaccccgtccatgatctccagggcgcggcgcaacgtggggcggatctcctcgaacgagtcgaattcgggaggcaggttccagtcgtgtatcgaatagtagtgccatatcgaatcccgacggcccgcgaattcgtcatgcagcgggtggtcggggttgaacgattcgacctgcaggatggagaacagctgcaccagcatggggcgtttggaattgtgccacactaggaaccgcaggtaggcgggcagccgcaggtcgccgggtgtggagccgggcagaccggtagtcatgaagtcctcgatgtcgccggacatgttgtagttctcgtggtacaccgcggcgagcagattgtccttgctggggaagtaccgcagcacgccctgcttggtgacacccaccgcatcggccacgtcctgtatggaggtgccgttgtacccgcgttcggagatgaggcgtacggcggcatcgaggatttcctgccgacgctcttccggcaacttgcggattcgcttaggccgggttgtggcttgtgtggacatacccgccagtctatccgcagcccgccctcccgcacgccggcccacacactccagcacggccgaacatacgaaagcggtgcgcagacagggcgttgtgccctgcctgcgcaccgatacgggcgtgggcgctagtcgatcacgaaggtgttgaaggagcgcggggcgagggtggctttgatgccgcgggaggcgtcagccgggtcggcgaactcgaacggcattgcggtttcgagcgcgttctggaccacgacggcaatcgtgccgtccgggttgcggaacgcgatggccatggagttgaagtggccggtggtgccgagcactttagcgccggggcgcacgtactgggagaagtggcgcatcacgtagtattcggggttgcggcgcacctcatgcgtgtcggcggtaatggtgaacagcgagttctgccaccagccccacgtggaatcccggtcgtcgagaatcatgttccagtaggtgtaggcggtcgcgccgttcttgaggtagtggttgatgaggtggaacacgtattccgcgtattcccacgtgttctggccgtcgccgcattcggattcggactggatgagttcgatttccggccaggattcgtgcgtgcggacgatgcagttctggcccgcccactggtaggcgatgcccttgatgtacttgcgggcaccgtcgtcgaagaggatgttgtccacgaaacggttgtagttgttgagcctcatgccgtagccgccaccggtccacgccatgtcttccgggccgttgagcgtgccgagccagatgtcggtatcgagcccggcggcttcgaattcggggcccagatagtcgcggatgaacactttcagggcttcggcgtcccacagggcgctcgggaacttctggtcggcgaacacctcgttctgcacgtgcagctgggtgacctcgatgccgtgcttggcgtactcccgcacgtaacgggccagatacttggcgtaggccttgaggttttccggggtctgcacgagccggccgtagttgtaggccttcgggcgcttcatccaggtgggcggggaccacgggctggagaacagcttcatgtccggctgccattcctgggcgcggtggatgtacgggatgagcgtctcctcgtcgcgttccacggagaagtgctccatgtcgtagtcaccgtcgacctcgtcatagctgtaccagtggtcggcgaagtcgttggcacccacgggagcacggttgaacgtgaagttcatctcttcggggtcgaaaagctccttgatgatctggtcgcgttccgcctcggtgacggtctgcaacggcagccagccgagttcgttgaagcagccgccgaaaccgcgcagcgcctggtattcgttgccgtcgagttgcaaatcaggtgcggtggttgcgccagtggcagttacctcacccgaacgatcgacgagcctattgtcttgagtggtggcaatccatgtggtcatggtgaaccccttatcatgttttccataggctggtcatccgttctgccatcacagcagacaaccagcctatacacagcacattcgtcaggcgaggcgaatgcgattcgaaccgggcttcagagactcaaccggcccaggcacgggatgcgcacctcgtgcgataccggtcacatcgcgattgataacaatcggcgtaccgtcatggttctcataatgttgccagacaatacgcggaacaccgagtttcgccgtatcgatatatgaggtatcaacctcgaatactccagaaggaatctctccttccagccacacagaaccatccgcgtcttcagtcacgacaatatgggcatcaccattgtcagagaatcgatgttcttcgcgatcaaaagattgcgcaccgttaaggtatacgttaccgtccacatacaccggttgcggcacctgttcgaacagctcaagatcgccaatgccctgcgcatgtacgcgcttcatgtattcgttttcactagtaggtgcaccatcataagtctcagtaccgcgagaggtgacacccggcagataggcatcgccacccacaaaaatgttctggtagatgcgatcgtcaccgctgtatacgcaggcataaccagcgacctcagtggagtgaggcagatgatagggcgtaaaccgattgagcgtggcacgacgttgcgtcgagccacagaataggttatggaccaaagcggtgccttgggccacattgtcgaagttgtaatcagacccgaacacattgttgtccacgaggcacgggccggaggtcacttcaatcatcaaatcacgaatattggaatggaatacattcgaagacacgcgtgtgccttgagcctcccaatccaaccaaatgcccaatgagcagtcatggaaatgattgttgcgaatctgcgtgtcaatggcagcgtgcagtttgacaccggcgatttcatgaccgaagaattcatggcgctcaccgatgttgtagatggtattgttctcgataatcgaattaacgcatcccaaatgaccgaccacaccattttgcccgcaatcgtgcaaagtgttgttgcgtactatatgcgacccaatcgttcccatgtcccatccgttgtgccgcgccctgaacacagtttccaattgggtctgataccctggcttgcgcccccatcgagttgcttcgttatctccagtggagtcttcctttcccaagctaatggcactgcatcgagcatcgtggatatcgttgttttcgatgatccagccttttgcccagtgcgggccaatcagaccaatctgatcaccagtcggaggggcccaaggacaagcggcctgcgccatttcgaaaccacggaccgtaatataattcagcccagttcgatcagggaagaaacatgtgcgacgtacattaatctccaccaattccgcattcggatcatagtcatggaagttaacccagaattcggtagtgcaatcccctacttcagcatgccactgataaatggtctcctccgggcgtgccaccggttcagtgatattgacccaatcggggccgaatccggtatcgcgccgctccgccgccttcacagcttccacgctgggagcttcataaagggctttgccgttgagatacacattgcccaaactaagtttccaatcggacggacgttccaaccaatcaccttcgagaggcaaggcataaggattgcagccatgaaaaacgtcattggctacgctggcatgccatatggtgccgtcgaccagatcccaattacccagtatctccgaccctttgatgatggcatgctcaccttcagcaaccgtgtaagtgatacgtgaatattcatcgtatccgccacgcttgggattcacgttctcgcgatatacacccccatgcacgatgacgacatctcccggctgggcaatatcggctgctgcttggatggtattcaccggcgtgtcgcgagcgccatctcctccttgcaaggcattgcaatcgacgtggatttccttgatttttgcggcgtccgtcatattggttcctttcagcactcaccattgatattcggcatagtatgtcaccaagcgacttgcacttagcaactactaagtatatagtataaccatcttccgaaaaagggagacacacaattccaatgacggaagatgcaccttaagcaaaaaggaaatggactcaaggaggagatccttatgaagtcaatgacaaaagccattgcagcactggccgccacttcgatgttggtatcgcttcccgcatgcggcaataagcctggccagaccggcaacactcaggccacgggcgccaatgtcaccacttgggcaatgaccgattccccatgggatccgatcaaaaatgcattcaaggaatggaacaaagctaaccccgatgctcagatcagtgaggaaagcttcgccaatgatgcttacaaggagaagattcgtaccgccgtcggctcaggcaatgcaccgaccttcttccccagctggggtggctctcctctcaccgactatgtcagttccaaggccgttaccgacctaactagcgatcttaaggacactattgatagcaaggtgttcgattccgtttccgccgaaggctaccgagacggcaaactgtatgcagtgcccactggtcaggcgcagccggtgcttttcttctacaacaagcaagtgctcaaggatgctggagtcgacgaagctccccagacttgggacgacctactcgatgcagtggccaagctaaaggctgccggcaaaacgccgattgccctagccggtggtagcaagtggccgtatctgatgtgggccgcatatcttgtggaccgcatcggtgggcctgaagtcttccaaggtgtactcgacggcaataaagatgcttggagcgatccagccgtaacccaggcgatgtccatgattcaagatctcatcgatgccggtgccttcggcaacaactaccagtcgttgactgctgacgaccgcaaagataccgcgatgattgcgaccggcgaagcaggtatggaattgatgggctcttgggtgtacgccgacctcatctccatcaatgacagcttcaccgcagacgaccttggtttcgcaccgttcccctccgtcgatggaggcaagggcgatatgggcgatctgaccggaaatctgtcaagctactggcagctttcttccaaagcgacagataagcagaaggataccttcgtcaacttcatcaaggaaaagaattactctgacaccatggtggatgccatgttggaacagggacaagttcctccggtcaagggcattgaagacaagattgccgcagctgacgatggttccggctattacacctggatctacgattccgtcaagaatgcaccgaactaccagctttcttgggatgttgctcttccgagcgaccaaggacaggccgtgctgaacaacctcgagcaggtgttcctcaagaccatgaccccggaacaattcgtcgatgccatgaactctacgctcaagtgattcacgcaatgaagcaatagataggacgataaggaggatgccatgagttccaaggtttcgaaaccagctaacaataagccaaccgtattgcataaaggaccgtcagtctggtatgcggctcccgcactggttctgttcggaatatttgcaattattccgctgatcggtgtggtggtactgtccttcatgaactgggatggtctcggcgcagttaccttcaacggtatcggcaactggaccagaatgcttaccgaccccttggtcctcaacggtcttcgactgacgattatcctgacgattgtcagctgggccgtacaaacccccatctgcatcctccttggcgtttttatggcggggaaacagaagtatcgtgcattcttgtccgtcttctacttcattcccctgctcttcagctccaccgcagtggccattgcctttaagaacttgttggacccacaattcggcatcggcaaggcattcggcgttgactggctggcccataactggttgggcgacccaaataccgcgctgtgggtacttatcatggtggtctcctggtgctttattccgttgcactctctgctgtatcaaggcgcagtccgccagattccgcaaaacctgtatgaggccgcgatgatcgacggcgcaggccctatgcgccagttcttttccattacgctgccgcaaatcaagtacacattcgctactgattccacgttgatgatcgttggttctctgacctacttcgatctggtctacgtcatgacgcagggaggaccaggcaacgccactcgtattctgccgctcgacatgtatttgaagggcttcaaaagctacgacatgggcggagccagtgtggtcggtgtcatcatcctcgcgatgggcattatcatctcgttgctactgaacaagctctcaggatcagacaaaatggaaagtcagatggaaggcgtgtgattcgaccatgattcgtatcaagaacaagcaatataacattctcggcggcttccttggctgggtatggctcgccaccgtcatcgtaccggtgtattacattctgattacttcggtcaggcaacagaatgatattttcactgagaatccgctctcgctcccctcaaaccccacttttgatgcttataagcgcgtgtttgagaacgatttcctgttgtatgtgggaaattcggtattcgttaccgtcatgaccgtgcttattatcctgatcgtctcgttcatggtctcctacatgattgttcgtcgcaatgacgcatggtcgcgcggcatatacaaagtcatcatcaccggcttggccatcccgatgcaggccacgattattcccgtgtactacatcattattcagattgggctctatgacaccttatgggcactgattctaccttcggcggcattcgctattccaatcagcgtactgatcatgaccaatttcctacgcgatgtgccactgtccctgtttgaagccatggctgtcgatggtgccagcgagttcaccactatggttcgactcgccatcccgatggtgaagcctgccattatcaccgtggcaatctatgacgcactgaacgtgtggaacggattccttttcccgctcatccttacccaaagcgcatccaaccgcgtcatcccgctgagcctatggcttttccagggccagttcaccgttgacgtgccgggcatccttgctgcagtcgtcatcagcgtactacccattctgacggcatatatcttcggtcgccgtcaaatggtcgcaggcctgaccgccggctttggcaagtaatcacgccccctcaaaacctgatccacaaacctcttccgaaatcaggccatgagcgtccgagcggagtcccgcccagacgctcatgtaatctcagaggatgttttcgctcgaatgcgcgttcctgccatatcgttaagttcctactaggacgtaacatatcgaagaataacggcttatccacgccaccctaatatcgcctctatgtgctgtccaaagaaaggaacgtcatgcgtcgtcgtaccggaacagacgcccccaaaaaaatgagcgcagagaatcgtcgaaaaagcatcctcgaaaccacgatgacgtttatctcccaattcggcttctggggattcactattcgcgacgtggcccaagcccaaggcattaccgaagctggcttgctgtactacttcaagaataaagaagatcttatggtcgaagcgttaaagtacgccgatcacgtcaatcagattgccattgccaaatatttgggggtagaaggcgtttctggtgatatcaatgacggcattacttatcactgcgattatggtctcagaaccatttccacggctacagcagaaaccaacgccaatcgtcgtcagttagtgagtctttatgtgctattacagggtgaagcattaagtgaagaccaccctgcacacgagtactttcagcttcgcgagaagaacgtcttgaaagaatatgccgtcgccgctgcacgagaccatgtgtccaatccggaacgcactgcgattcaggtgctgggagccatggacgggttgcaactgcgctggctcagcagcggctgcgcactcgacttcgcagaggaatggcggcagcttatcgagctaataattcccgacccgacacattgaagtgtgagtacgtcaaataaaaacaatgcaacgaggtggtgacgttttcttggactccctgaccgggaggagaacccctcatggcgacgtacggcagggagcagcgcgacagggccgtggacctgtacatcaaatacgaacgctgcgccgccgacgtgatccgcgagctcggccatcccggcaagggcgcgttgctgtcgtggtacgcggaccagtgtgttttgatgctcctatacattgtcaagcgtttgggtgtgttgttttgggttggttgtcgagtgtatccattggatggcccgttgctcgagttcgggaaggtcgcgtgcgccgcattcgatctcgctgtggattggctataatgtattagacggtccgatgagggacgattgacatgaggttggaggccgacgatggccggcccgaagcatccccgccactacgatgaggcgttcaaacggcagatcgtgcagtcgtaacgggagcggcaagccatcccgggagatcagggccgagtacgacatcgcgcgatcgaccctgcagcgctgggtccagggcatccgcagcagcggctccacccgggccgcggacaaccgcacgcccgagcagaacgagccggccgggccggggaggcgtggccggcggttggagatggggggtgggcgtttcagaacaagcggcgccggtattcgcacgaaggcaggcgtgatacgggccaacgccgcccgctgcccgatatcggcgcgatgcgggatgcggggcgttccccgctccacctactactggatgaccgggcatcccgagacggagcgtgcggatccgatcgccggcgacgtgcgcgcggtccggcgcgacggcctcgaacgctacggcgccaggaagatcaaggccgctctggaaaggaggggcgtcaccgcgtccaggagacgcatcggcaacatcatgcgcgaacagggcatgacgagcgcgtacgcgcgcagacggtccgaaccgcacaagacgcgggccgacgaggccaggctcgcgaacctgttggaccgcgagttcgacggctacgccccgcacacgcacctggcgagcgaccttacctacgtgagggtcggcaacgggtgggcgtacgtgtgcctgctggccggcctggcgaacagggacatcgccggccattccgtcgggcggacccgggacgcgagcctggtattgggcgcgttcgccacgctcgacttcccgctgacggacgtccaggtgttccacacggaccgtggaagcgagttcgacaacacgaggatcgacgagctgctcgacgtgttcggcatcaaaagatcgctgtcacgcaagggtaacccctatgacaacgccgtggtcgagccgacgaacaggctgttgaagaaggagctcgtgtaccggaacagctacgccacgatcgagcagccggggcgcgaccccgacgactacgtgtggcagtccgacaaccagcggctccactccacccccggataccggagcccgaaggaattcaccgaacaagggctcgtcctctaaggaactgtccaacacaccgttgccaatccaatcatgaggctcatgaccaggcacggcctagtgcccctgttcaagagcgcgaagcggtacagctcgtacaagggcgagctgaccaaggcgccgaagaacctggcgaaccgcgacttccacgccgagcggccgaacatgccgtgggccatgaacctcacggagttctccatccccgcgggaaaggcctacctgccgcccgtgatcgactgccatgacggcatgccggtcgccgcaccagcccggactcggcattggccaacggcatgctcgccgacgtctgctccacgctcaaggacggagagaaaccaatcatccattccgaccgcggccgccactaccggtggcccgagcggatccgcatccgcacggacaacaacctgacgcgttcgacgggcgcgaaaggctgttctccggacaacgcggccgcggaggggttcttcggccgtcccaggcaggagttcttccgcaagcgcagcttcgcgggcgtctcgatggacgggttcatcgacatgctcgacgactacatggtccggtaccgggacaggcggatcaagacggagcccggacacgggcatcatggatcgtcgacgcgagctcggtcttgtggcatgatcggtggtgatggaatcaatgacgagtccaacaaaacgtcaccagcccccaatggcagattagttgtacatccacaagcaatctgccattgcgcaacatagtaaccgacttctttcctcgatcgccccaactacttctggaacacgtcggggtgcttcgggtctccggggatgtcggacagaaggccctccagccccaggaattccttccagaagtcgagcggctggccgtacggcgtggcttcgcggccgtgggcctgaatgttggccttggcctcgaacacctcttcctcgctgatgccctc

SEQ ID NO: 1599 - DNA, 39753 bp, Unknown
  R221_24m  MAG No. k141_49727
ccaagtcgtcgtccggctccgtgtcgtccaccacgatgatccggcgtccctgcgccttcaacgcgctctccaccagtcccgcgttcatgcgggcgagcctgtccctgcgctccacgatcagcgtgcccacggtcgggtcggccaatagccggttgagcttgcgccgcttgtcgttcatgcccgagccggtctccgtgaccacctcggggctcttgacgcccatgttgatggcgaacgccttcaaccggtcggcctgacgttgcaaatcgtctttttggtcggacgagctgacacgcgcgtaacacaccgtcctgccgttcgctgtgggggcggcgggctggttctcgtatttcgggtcgtggatgataatcgtgcccgtgttcatgcgctcgaacgggacgggcatacggttctcgcgacaccactgccacaccgtctgctcgttgaagccctcacgcctcgcccattccctgacacgcatgacttaattatatcacacgaaaacaaactaaagcaaataatcaatctagcaggttataaccccatcaccatctactttttaggaaacatcttcgctgagacctataagttgatccgagagtacattctgctgttggggagcaggattggcgtttattcctcgtccgccctgttctggcgcagctgctcaatgagatcgatgacggtttcgagttcaggagtcacatcgtctgaaggacgaacgttatcctcttcgtcgtccatctcatcatcctcatcatcatcggcaacggtgttgttgaggatgtcctcttcggtggcctcgtcgtcagcatcagacttggactcgtcgctggaatcagctgcatcaacatccataacggaatcggatgcgttctgtgcaacagactcatcaccggcagactgggattgcgaggtcccgtcgcctgccgcctcctcagcgggctcagtatcgacggcgttcccgtcaacagtcttctgtgcttcgatatcatcaccggcaggctcgcctgtcttgtcggtttcgccttcggcctcgtcctgggcaacctgctcctgcttgcacggacggttggcaaccacgtcgatatgcagatcgtcaaaggctggcttggactgcacccacagctggcttggctcgggaggttcgatttcggaatgctcaccgcagccgtggtccagggagaccacgcggccgtcatccggactccacttgttggcgcacacgccgaacatacggtcgagttcgcccgcgagcggcacgaagaaaccacaggtggagcacaggttgccttcggcggttttggtgctcaacgctttggggcctcgcggaccttcataccagcgcttggcagcctgcgcacgacccaacgaggtcagcacgtgacggcgggtcagtcggaaggtctcgacggcatcgttgacatcctgcagcgaggattcctcgacttcgccttcctcgatgcgctcgtcatccggatcggtaccgatcgaatcggtgggagccagatctgtgggctcaaggcgatctttccaaggaatccacttgggcggcatcaacgcgccctcagtggggatcaaggaggattcgttgacggtccaggagtcgatctcctcgtcgtgatacagcgtcaccgaccattgccatccttcgtagccacggatattcgcggcgaagcggaagtcagtgacgtgatcctcaagatcatatgaggtaacgaaatcccccacctgatcgctctcgtcggccacttcgagcagcacggcgcgcgcgatggcgtgagggtccggtgtcacgatggtttcggtggtatcagtcatagatcagatcagtcctgtacatcgaattgatccgccaccgcacgcagcaacgtggccagctttttgctgtcggcagcagatgggtaacggtgacggcgcaacgtattgccggccgcatcaagcatcttgataaggtcctcgcagatggcggccatgtcatccgccttcgggcgggtggccttgaccaagctgggagtggaggcgatcaggcgaacatccatggcctgcggcccacgacggccgtccaccacggaatactccaccttggcccccttgcgcaacgtggtggcgccagtgggtagggcctgagccggcaggaacacgtccttgccttcctcactggtgatgaagccataacccttggctgcgtcaaaccaacgaactcgaccggtgggcattgcgaaccttccttaatcctcaatggaaatagtaaaccgaaggtacagtttacctcacagggcttgacctcacgctttgggctgagtcgcctgagtcttacgctcagagctgaaccaagaagtcttctgtttggcgtccttggttttgccggtgggccgcttgggctcaggagcgacgatctgctcaatcggcagcaccacggtgaaggtcaggcctcccccatcggtgccggtggcgcagataaagccgtgatgtgctttgaccacggattgcgcgatggccatgcccaaaccggtaccacccttttcgcgggcacgggatgggtccgcggtgtagaagcgttcgaaaatcttcgagcgcgattcaggcggcacgccggggccatggtccacgaaacgcaatacggcgtatcgatagccggtctgcatcgaggcacctacttcggcggcgtcgatgaaccgccgcattgacgcgtcgctggcgggcatgcgagcgagctgtcttggatcgatggcggccggcatcacaccgagcgcggcctcggcaggcgaatcggcaggcgtgtagcggtggatgttgcccacgatgttggtcaccacctggcgcagtcgagaggcgtcgccgggcagcacgacctcgggccaatcgccttcggcaaggttgaattcggcgggatggttcaaatcgcgcgccggttcgagggaaatctgcatgcggcgaacggcacggtccgggtcgagcgcatgcaagtcgtcgacggcgtcggtgaccagcgacgagagtttcaccgtgccggtcacatcgatgccgcgcccctcatcgagacgggccaaagacagcagatcctcaacaagaacagtcatgcgctggctggaccgttcgatatgttcgatggactcgtccgcacgctccaaggcaccaggcatatcgcgctgcatcttatacagctccgcatagccatggatggcggccaacggggtgcgcagctcatggctggcgtcggagacgaaccgtttcatcttgtcagtggtctcctcctgttcatggaaactggattctattcgggtgagcatggagttcagcgaggcggccagggagccgacctcggtgttttccggcgcggaaggaatacgttggctcaggtcgccggcggcaatctttgcagcggttttctcgatgcgcttcagcggcgtcatcgtgtgctggatgatcagcgtggacagggagccgccgagcagcaccacggcgatgccgaccacaatgcagtatcgggtgagtgtgttgacggtgtcgatctggtcggccagtgacaagccgatgtacaccacggcacggtccttgccgttttgctggaaggtcaccggcagaatacgccatggtgccctcgccgtgacgatggcggcatggttggcattgacagtggggttggccagtaccttggcgatggtgtcagaggaattggagtttccgttggccggatcgttctggctgtccgcactgtcggactgcaccgtgatgatctgcttggccactgcctgcgtagtgaatgcctggccgagcgtgatgccactggtatcaccataggtaggaagaatcggcaccgatacgataccgtcctgcatctgcggcatcagcggggtcacgaccagaggattgccctctttgtctttggtgccgtcggtatattgaatctgcagaaagtacgagttcggccccgatgagtcattttttgacagcagatcgatattgttgaccaccagctggctttgcgagcttaactgggtgtcggttttctgcagcatgtagttgttcaccaacgcgcggatggagaaggaaatcaccgacacgccgataagcagcacggcgatggtgcaggccaccagcttgctgctcaacgagatacggtcgatatgccgcatcagtatgtttttcttacgctcgcgccgctcttggaaatgggcggcgaacggcggcattgcaggcatgggattcgtgttcggggcggcgttcggcgtgctgctcggcggtacgccgcctgactgcttatcggggatactcatgagattgcgatgcgttatggatggggcgactagttcttcggttcgcgaatcatgtatccgataccgcgcttggtttcgatcagcgaagtcaccttgcgcttgccgccttcgccgtcgtcgacctcgatgccgtcgactttcttgcgcaggtaggagatgtacgattcgacgatggctgcgtcgccgccccagtcgtattgccagacatggtcgagaatctgtgccttggacaatactcggccctcattgtccatcaggtagcgaagcagcttgtattcggtggggctcaggtcaaccggctgccctgcacgggtcacatcgtgggagtcctcgttgatttccaagtcggcgacgcgaataatcgggtcgtcttccacctgttcgcgggtacggcgcagaatggcgcggatgcgagccacgacttcctcgaggctgaacggcttggtgacgtaatcgtcaccgccgacggtcaggcccatgatcttgtcttgggtgtcgtcacgagcggtgaggaacagcacaggggcgttaatgccttcctggcggatgcggcgggtgacggtaaatccatcgatgtcaggcagcatgacgtccaacacgatgagatcaggctgcactttttcgataacctcaatggcttcggaaccggaagcggcggtgtttacctcgaatccggcgaagtgtagggaagcgaccagcagttctcggatggacggctcgtcgtcgacaacaacaatcgatgcttcaataggcttactcatgcttcctagagtgtcgcgctcttctgggcgtttcctgaatgtcatcttggagttcggccttggaatccttcttgatctccttgcgccgacgaatcaccaccatgaccacgatgatgatgaccagcgccaccaacaccacacccatgatgattatgcctacggtcaccgtggatgatgaggtggaggcttttttggatttcacgatttgatccatcattgccgttgccgcgccagaccagctcggcgggttttccagtaacggctgctgtgcggcttcggatagcttatcgacggttttgttatcgagaagccacttatcggagttcttggacacgacgaccaccaggttgccgtcattcgaggccacggcaagcatcactgtgttcggcttgggattcatggactccatcacggttgccgcccagtcttccggtttctgttgactattgaaactggaaagatacagcagatgcacgtgtacaccggtttccttctcggttttggcgatggcatccgcgacttcggccgcatgggagcccaggagattttccgtatccgtgatgttctcggtgatggtcacgccgctgtcggtgctgctgctggagctgtcagagctgtcgcccgagttatccccataggcatttgcggttatccacattgcgttcatcgctactgcagcaagggcgcaaatggcacaaacaagccattttcggaccatattcccgaaggccgaacaggacggctccgaagataggaccacaatagttgtttttccgtcttcccgattcgttgttgacatatcctccaccttagcggccggtattggcaagcggccgccatacataccattaaccctctagaaaaggagcaacgatgccccaatatcaggtagattccgagcgaatccaatcatcctcggccgcagtggccacttcgatctcgcagatcaggcaggccgtgggcggcatgtacaccaatctcaatgccttgcaggacgcatggcgaggttcggcggccacccagttcaccgcggtagccgaacagtggcgtgcggcccaacagcagatggaggcctcactcgagtccatccaacgctcgctgacgcaagcctccaccgtgtacgctgacgccgaaatccaagcttcgcgcctgttcgccagctagtttcttggctctcctccctgaggggagctcgatcgcgaagcgaaactgagggagtatccctacaccgcagctccccttagtctcactgcgttcgacagctcccctcaaagaggggagccagaatacaaaaaaggggactcccgaaggagtcccctttcagctcaatcagctagcgatcgcttgcggatcagtagcccatgtcggcaccggcggccggggcagcaggcttcggctccggcttgttggcaacgacggcctcggtggtcaggaacagaccagcgatggaggcggcgttctgcagagcggagcgggtcaccttgaccgggtcggtcacaccggcggccagcaggtcttcgtaggtgtcggtggcggcgttgaagccttcgccatcaggcagggagcggacggtgttgatgaccacgtcaccggacacgccggcgttctcggcgatttgcttgatcggggcttcgatggcgcggaacacgatggcggcaccggtagcctcttcgccggtcagggaggcgacggcctcggccttctcggctttggcagcagcctgaacgagggccacaccaccgccgggcagcaggccttcctcgatggcggccttggcgttacgcacggcatcttcgatgcggtgcttgcgctccttggcctcaacctcggtggcagcgccgaccttgatgacagccacgccgccggccagcttggccagacgctcctgcagcttctcacggtcgtaatcggagtcggtgttctcgatctcagcgcggatctgggccacgcgagcgtcgatgtcttccttggagccagcgccctgaacgatggtggtctcgtccttggagacgatgaccttcttggcgtggccgagcacggaggtgtcgacggactcgagcttcaggcccagttcgtcggagacaacctgagcaccggtcaggatggccatatcctgcagcatggccttgcgacggtcgccaaagcccggggccttgacggcgcaggacttgaaggtgccacggatgttgttcaggatcagggtcggcagtgcttcgccgtcgacgtcctcagcgatgatcagcagcggcttgccggtcttcatgaccagctcggccacgtgcacgatgtcctgctgggaggagaccttgccggaggtcagcagaatgtacggatcttcgagcactgcggtctggtcgtcagcgttggtgacgaagtacggggcgatgtagcccttgtcgaaacgcatgccctcggtgaagtcgaggtccaggccgaagcggttgttgtcttcaacggtcacaacgccgtcctggccgaccttgtccagagcctcagcgatcttctcgccgacctcagggtcggcggcggagatggtggcggtagcagcgatctggtccttggtctcgacgtccttggcggcggcgacgagttccttgacgatgacctcggtggccttctcgatgccgcgacgcagggcgatcgggttggagccggcgaccacgttcttcagaccctcgtgaaccagggactgagcaagcacggtcgcagtggtggtgccgtcaccggcgacgtcgtcggtcttcttggcgacttccttgaccagctcggcgccgatgcgctcgtacgggtcttcaaggtcgatttccttggcgatggacacaccatcgttggtgatggtcggagcgccgtaggtcttgtcgagtacgacgttgcggcccttcgggcccaaggtgaccttgacggtgttggcgagcttgtcaaggccctccagcatgccctgacgggcttcctcatcataagagatgatctttgccatggttgcgtattcctccaaatggctaggtataccggttatcactcgcaagcgtcgagtcgtgacgaccagccgtcagctgccgattatcactctcgacctccgagtgctaacccagacattagcactcgcgaccgccgagtgccaacatcatcggcggcgattgcgctttgggcatgaaaaggccccaaccgtcgaaacggtcagggccttcaatgcacatccttgcgtgcgtgttgctcactcggagcgggcttcacccgaagacagcttgacaacatcctttgcctgcgtgcctttgccggacgaagcgggcgtatactccacgcgatcgccctcgtacagcatcttgaacttattggtgctgccgtcgtccttgatttccgcgtagtgcacgaaaacgtcctcgctgccgtcgtccggctggatgaacccgaaccccttcttggcaaggaagaacttcacggtaccttgtgccatatctgatctttcctttgttcccttaggcgtcgcgacacaaaacctatagggaacgtagaaagaaccgcatcgcgctcccctacctcgcgactagatgacgattgtacagtgacgagggaacaatcccaaccgcagtggcacattttcggtacgaattatttcatagacgtgagaacgctcacagttttcgatgtattccacgccgatatcaggggcgcatcaacaacgctagttgagcagcaccaccgtaatgggaacggcgagtccttgcacctgctccacagccgaaatgccaagcgtggtcgccacatcttcggcggtggctttatcggcttcattctgataccataccacggaagaagccggcaatgtgccgcgcggattggtcgcctcgacgctggtgtaaccggcggtctgcagcacatcggcctgctgacctgcatatccttggattcctgtggcgttgaccacacgcacctgcgtggccttattcacagtcgcggtggctccggactgctgagactgctgatcggagtcttgattctcattcgaggatgtcgtatcactgttggtatcggattttgccgaatccgaagtcgagtccttggacggatcggtcgaagtggacgaggaatcatccttggtgctgtttttggtctcagccttgctggacgaatcggacttggaagcagtcccggacgtggtcgcagtctgggacgatcctcctattgcattcctgtattccccggaaatccatgcccagaccccgacaccgcacagtgcggccaccagaataacgacgatgaacgggcagaggcgggccactgccgaacgagcgccacggtgaactcccaccggtcccttcggaggattgtcgaaggaatccggttcataggattcgtaggtcatcatgtcgcgtgccataatcgccctttcttcctgtcaaaactacccatgagtgtaatcggcaaacaactcatcagtccaccacaccacgcctcgtgcaccggatatgcacgtttgactacagtggtgagtcatgatcaaaccattgagcgaactggtagagccggggtgggcccatgccttggccgacgtggagcccgccatccaccatatgggcgattttcttcgtgcggaaaacgccgccgggcgcccgtggctgccggcaagccacaatattctgcgcgcgttcaccatcccgttcgattccatcaaggtgctgattgtcggccaggacccctacccgaccccgggtcacccggtgggtttgagcttctgcgtggcgccgaatgttcacccgctgccgaaaagcctggtcaatatttataaggaattggttgacgaccttggggtgcccatgcccaccaacggcgatctgacaccgtggacggaacgtgaggtgatgttgctcaacagatgtctgaccgtcggcgtcgggcggccgaattcgcatcagggcaaaggctgggaggaagtcaccgaggccgcgattcgtgcgttgaacgcgcgcacggacgccgacggcaagcccaagccgctggtggcgattctctgggggcgtaatgcgcaaagcctcgagccattgctgaccaatgccttcattatcaaatcgcctcatccgagtccgctgtccgcttcccgcggattcttcggctccaaaccattctccagagccaatcaagccctagtcaccatgggtgccgacccggtggattggactctttagacagaccaacagtcattgtgagtagttacagtgagggcatgactttgttccccacgcaaccgaacataccttcgccgaccaccgccgcacgaccggtcaccgttcccgcgcccggcgtgtcggctccgctgggtgccgatgacgccaaacgcgcacgtatcctggccgacgccattcgggcgaggttcgcccagacactggtgggtcaggataatctacgcgaatcgcttatcgtgaccttggtggccggcgggcatattcttatcgaatccgtgccgggcttggccaagaccacggccgcccagacgctcgccacctgcgtatccggctcgttcaaacgcgtgcagtgcactcctgatctcatgccatccgatctggtgggcacgcaggtcttcgattttgcgtcgcagaagttcaccacgcagatcggcccgattcacgccaatttcgtactgctggacgagatcaaccgttcgaatgccaaaacccagtccgccatgcttgaggccatggccgagggtgccacgaccatcggcgggcagcgtatcgccttgcccaagccgttcatggtgatcgccaccgagaatccgattgaggaggagggcacgttcaacctgcccgaagcccagatggatcgtttcatgatgaaggccgtcatgacctatccttcgcccgacgaagaggctcgcatgctggccatgctcacccaccgtggctccgatatgatcggtcccgacaccatcaccggcgaacgcatttccgtgtctgacgttgattttctgcgcaaggcggcacgccgcgtgcatgtttccgacgcgatcatgcgttatgcggtcgatatcaccgccacgtcacgaggtgccggctcccgccccatcaagggactgtcgtccttggtgcgtttgggtgcctcgccgcgcgccaccatcgccttgacccgtatcggccaggcgaaggcgttgctgtccgggcgcgactatgtggtgcccgaggacctcaaggcgttcgctcatgaggtgctgcgccaccgtattatgctgacgttcgaggcactggccgatggcgtggtcagcgatcagatcgtcgacaagatcgtcgaaacggttcctgttccgtgagttccgattccgttcgcaagaaaatcgaggcccttggcactcagctgagcctgcctaccgtaaggaaggctttgggcgtgctggagggcgaacacgcatccggacgtcgtggcggcagcggcgatgcgatggatgtgcatgcctatgagccaggcgacgaatcccgtcttatcgattggaagaccagcgcccgccaaggccgccccatggtggtcgagcgcgagcgcctgtcgacgtcacgggtctggttgctgatggacgtaggcctggagatgactggcgtatgcccttccggagaacgcgcatggcaggttgccgccaatgcgctgcgtatgttcgccgcactgtcgttgcgccggtcggacgatatttcgctggtgttcggcgatgagtccagcatcacccgcgtgccgttcaacggtgggttcgcgcagttcgaacgcacgctggacaaggcgcttgatcgtgattgggatcatcaccgtaatatcgacgcgctgctggaatatgcgcgccgtatcaaggatcgtgaggcattgatcgtattggccaccgatgagcatgcgatggaggagcggcatatcaccacgatccgtcgtattacccgcacccatccgatggtgctgatcgatgtggcgacgatgaatccgttcaaggccgtctcatcccgccacgctcccgccgacggcttgagtgcacggcgtgtgccggcattcctgcgcaacgccaaggcagcggccgaggtcgatactcatcgcgcgtatatggccgcggctttggaacaggagctcacccgtgccggttcccatatcattcgagccgcatccagcgaatccatgttcgatcgtttcgtcgccctggtgtcccgggcattggcccgcaccacacccaatagactgggcactgcacccgaactggtcggactgactttggcgggtgatctatgatgcacagcatgttccccatcatcccgctcgccactgatcccggcgatctcaggcccgtggagtcgttggccttgaccactcccctggtgatggccatcgtcgcatgcctgttgctggcggtaggtctgatcgcgttgatcatcatgctggctcgccccgcacgcaaacctcggaacagcgaccgtgcgcgtggcactcatagcaatgccagctccaaggccgagtggcgtgcccgcatcgacgatgtggtggcccgtcatgaatccggagcactgccccggcatgaggctttcgtcgaattggccgtcatcgcccgtgatttcgccggtgccgcatcaggcaaggagcttagttccagtacgctgaccgatttggcgtacctgaatcgcacgcccgcgaatcgccaaggattggacgcattgaagcagaccattagcgcgttgtatccaccggaatttgccgatgatgcccgcaaccgaatcgcccagacgaccagcgtgcagcaggccgccgagtgggtggcgaatctggtggaaaggtggcgttcatgatgctggcatggcattggccttgggccgctctggccggcgtcttggcagcgctggcgattatcgtgctgattgtcgtgttcgcccgccgtaacgccgccgacgacacccctgtattctcgatggacgacgatctcaataccgagcacgcttcccgtctgttccgtcaatggcgcgctttgggccgtctcgccatcagcgtgctggtgcttgcgctggcgctggccattgtgctggtggctcgccccagccaagtggatgccggtgacgaacgcgcttccagccgagatatcgtcctgtgtctggatgtgtcgggatccacgctcccctatgatcgcgaggtcatcgatacctatttggaactggtcaagcatttcgagggggaacgtatcggtttgagtatcttcaactcgacctcacgcacggtgttcccgctgaccgacgactacgaactggtcaccaaacagttgacctccgccagcaaggcgctgaaaggcgtcgagtcgcaggatgacatcgataagatgtccgatgccgaatatcaggacatcgccaattggctcgaaggcacgcagaaccgcaaggacgccacctccttgattggcgacggcgtggtgtcttgcgcggcgatgctccccggtttcgcttatggcgaagccaatcatgcgaatgccgaccgtcagcgtgcggcatccatcgtgctggccaccgacaacgtcgtgtcaggcaaacccacctattcgctgaccgaagcgttggacttgacccagcagaccaaaatcaccgtggacggcctgtattccgggccgaaagccagtgaatcggaccaaaccacaacggatatgaagtccgcgatcgagtcgcatggaggcatcttcctcacccaatcgaatggcgcgtcgatagatgagctggtacgggatattcagtcgcgtagagatacggatgtggagaacaaggcgaaatcctcaatggtggacgctcccggtctgtggacgcttgctctggccgtgatactcattatctggatcgtatgtgcatggaggttgaggcgatgaacggattcaccttctcccccgccttgggctgggtcgccgacggactgctggcggccgggctcgccgtactggccattctcgaaatcgtattgtttgttcgccgccgtgcttccagtgacgagaccgtgtgggcttgcatacgacgtacgcttatgctgctcattgtcgcggtgatggtactgactcccagcgtggtatcgtctaccacctcacaggtcatcaatgccaccgacgtcatcgtggcggtggataccaccgggtcgatggcggtggctgatgccacatacgggtccgagaagaccattacccgcatcgatgccgcgcgtcaggccgtgcatgatgtgaccgctgcttacccggacgccagtttcgcggcgttacggttcggtgcttcgggaacacttgatgtgccgctgaccccggatgcgccggccatcgataattgggccaacacgttggcggtggaagccacatccgtgtcggcgggatccagtctggatgctccgatcgatcaattgctgctgaccgcgaagtcgattcgtgaagcgcacccggatgatgcgattgtgctgtacctcatcactgacggcgaacagacctcgaatgtgacgcgtcgtacgttctcgtcactgcgacagtatctcaatgatgggtttaccgtgggcgtcggctcgaccgagggcggcaagattcccgtcatcgccgatggcgtcagtgccggcgattccaacaccacggaccactgggtggtcgacccggataccggcgaacccggcatctccaagatggatgagaagaaccttaaagacattgccgacgagatcagtggcacgtatgtggccgtggacgcttcacagactttggcggattcggtttcggccaggtcgtcgaagcagtggcgcatgaccaccacggtcaaggagcgcacacgcaccacgccggtggtatggccgttggccattgcgttggcgatattgcttgccatggaagtcggtgcatggatcgcgacctcaaggaggctgctgtgaggaacagtaacgaaatccacgagaacgatggctcggcgaatattcggatgcgggcgaaatgcccgctttgggcacgtatcgtcctggcttgtggcaccgtattgctgctgctggttgccggcgtggcggcagtaaacctgtccgcttcgattacgttcaatcaggccaccgcatcattgaatgccaatatcaaagcggctcaggatgagtcgacggatatcaccacgctcaaggcgcaacagcagcagaccgatgcgcaattcgccgaggccgggcgaatgcgtacgcttctgttgccgcaagtcaaggacgccatcgacaccaatgcttcgatttcttccgagctgacgaagatcaccctgaaacaggccgaggcgcagaacagcggttccgattccgggcaagcccagtcggcgcagcaatccgagagttcctcagccaatgccaaaaagggcggcgcgttgaccgacgagcagaagaagcaggtcgaggagctgatgaaggccaatcagcaatccaccgatacccagtcgaacaccacccaatccaagcagaaggcgacgcagaacaagggtaccggggccaccaagccgtggtaagcagtcgttcacggttgctctttttctcacatcctcacgggtcatggccttatcgcggctgtttcccggtttcggctgtcggctttggcgtttgtctgatcccgctagcccatggctgatccaaggtgtgcccaaacaggctatttgtggataatcgttacggctatacacaacacttgtgaataacttcgcccaaaatcggcaagctagaaccacattggtcgttccggctggacaagcatgagtcctgtccttttagctggatatatgaatacctacaccagcaccccagcacccatcgatcccgccggcggctttgccggcaatacggtgacgccgttcgattacggcacttgcccttgccatgcggcggtacagcgtagtcgcgacctcgtgtccgtccaacgtgcggccacactggcgcaatcggaccagatggcggtggccgtgaaccgctctcgcaacatcgtgtggaccggtaaagccgccgacctattccgatcgcggctcagtcgcaccgcacagtattcggccagtctcgcgcaagacatggagaccacccaccgattggcttgggggtcatcatgagcgagcacgattactggcaggtggaatcgtccgtttacggcggagtgggatatgcgccagccactcttgaagaatatgccgccatagccaaggctctcgatgacgaggcggcaggatttgcggccatagccacggcttgggaatcggccgcattacagttgcagtcacatcggcatagtgcgccgatgtgcgtcaccttgcagtcgggcgatccgagcgccgttgttcccggccatgtcactgcaccatatgccgcgctgggcaatcggtgttatgaccatgcaacggcatgtcagcggttgagcgatgacctgcgtggcgcggccgatctgctgattcgcgcacactctctgtattctcaggcggagatgacggctcggcgcatgtttaccgaattattgcaggccggtacacaggccaaaccgggatatgccgcggtgggtgttgccgctgtggcggcgggcggctttctggccggctgggctattgacggcaaaccgaacccagcatggatgtccacgttcacctatccgttccaggaaggagtgctcagcggcgcgggcggaatcattggcggcgtacctatcggcaagagcattgcgcacaccgatgaggtcaacaaggctgcggggaaaatcgccaatttctccggcccggcgaaagacgtcgtccaaggcaatcatctgaacgtgcgcgaggtgcaggcgaatgccgacgtcgtccgtgcaagcggatcggtggccgagtcaatggagaatctgcgcaggctcgccgaagaacggctcggcaaaatcgagctgaacagcggactcgaatatgggaccatcgccattcaacgctatgaacgggctgatggaaccaactcctggctggtcaccatcccgggtaccgatggacaacctgactcaccattcggctgggcgcagaacgtggaactgatgagcgccgatcaggagcgccgcaggaaagcggacagcgctcgcacggttgccgaggcgatgcgtcaggctggtatcggcaaggacgagcccgtggcactgatcggccactcccaaggtggcatcgttgccgccacgcttgcctcggattgggcagaggaatataccatcgagcatgtggtgacagccggatcgccggtggccaatcatccgattccgcaacgcacgtgggtcaccagcgtggagatcgatgatgaactggtcgccgcgctggacggtgccgccaacccggtcaccgataattggctcaccgtgcaagggcatgtatcgcccgcgcccgcggcaacaccatccacagtgcattcggacgtctcatgcactcccggcgcaacgcccatcaacggtctgaccccatatgacgccgcatccgtggctggttcgaccaacggcagggagttgtcgcattggctcaaataccatcaggccgcttatcagaacgccaccgacctcggctcccccgccgtgcagcgccacgaagcgcattttcaggaagtcatcaacggagaactcaaggaaacccgctattaccaaggccgcatgacccagtccacaaccattgctcccggcgagcgcaccaccgagttcagcacgttcggcggttaaaagtaaataccacacttgacagagttgtcaagaaaggagttaacaatataatgacgagtaggagatggctcatcaaactgatgaagcaagcggcgaaacgcaagaatattacgtttgagagtatcaggcaaagagggagtcatgagatattccaactcgatggactcatgattcccatcccacgccataacgaaatcgacaacgacctcgcgaacatcatttgtaaggaagcagaagccaaactcgggaaaggctggtatcagcagtgaaaacatatcaggtcatcgttcgtcctggcgaaaaatactggattctcgagattcccggtatcggtttcacgcaggcaagaacaacagcagagattgaaagtacggcacgcgaccttatcaccgtcatgacgcaagatgctgatttcgcactcaccatagagacaaaactgccgcaatccgtacaagagcaccttgatgaagctcggcgactgcgcaaggaagaagcggaatgcagatcgaacgcagcgcgggaaactcgcgccgcggcacaagaactacatggcatgggtctcgccctacagcaaataggcgatatactcggggtctcacggcaacgggcacatcaacttgtcaatgctgtcaatgcttagcatcaatcggctaccccccacaatgcaatcaccgcagagacgcggctagcgccactttcccgggattgttgcgctagcatgcccgaaaccccctctatcagcgcaaccttcccgggaaagtggcgcgcaaagagtgtcaggcgcgtcgctcgatgagtgcgcggccggatgcgaggcggtcgagcacaccggttttggcgatggccagcatcagataccaggccatcacgccgctgataagcacgccgccggtgacctcggaaatcatgtgcacgatgccacgcgggctgacgaatgacacacccacgtagcgaaacagcatcagatatgtgccgtattccaaggcgaccaacgcaccggatgcaatggaaatcggcagattgaacatgcggtaacgggtcaaagcgaacggaatctcagcgaaaacaccctgcagcagcgccgagataatcacgaagcccaaatcgaactggctaccaatcaccgtttcgaccagcgtgccgataaggttcacgtacagcgccgctccgggtttgcgcagaatcagcaccgccagcgtaccggagaaataccagacggcgtgcacgatgctggcgaaaccgggcagaatcgcaccaaacaccgaagagatcggcatgtacgcgaagttgaatccccagaagatcacgccgcaggccgcgcccagtgtggcaccgaccgcgatgtccaacggctgccatttcagcgacgatacggcgaccgaacgtttcggaagagtatgaatggtggttgcaggcatggtgatctcctagccttaaaggccgcacacagtaatcgaatcacgggcgttccttgacctgtgcggctcgggcgggaacgccacaccacagtgtagccgctcggttcacggctggaagtacccttggaggttatgaagcttaccgatatttcccccgcaatcgcattgaccccgctcgacggccgttaccacaaggccaccgccccgctcgtcgaatacatgagcgaacctgccctgaaccgcgaacgcatgcgtgtcgaagtcgaatggatgattcttctggccaacggctttgagggcaacggcaaccagccaatcgttgacggcgtcaagccgttcactgccgaagagcaggccttcctgcgcgccattcccgaggacttcggcgccgaaggcatcaagcagcacgccgctcatgaggccatcacccaccacgatgtgaaggccgtggagtactacatcgatgatcagatcgacaaggctccggccgagctggccaacatcaacgacgagctgaagaccctcgtgcacttcgcctgcacgtccgaagacattaacaacctctccatcgcccgttgcgtcaagaacgcgatggaaaacgtgtggaccccggagttcaagcgcatcatcgaccacctcgccggcaaggccgaggaattcaaggatatgccgctgctctccctcacccacggccagccggccacgccgaccacgctcggcaaggagctcgccgtctacgtctaccgtctgaaccgtcaactcaagcacatcgaaaaccaggagtacttgggcaagatcaacggcgcgaccggcacgttcggcgcccacctggccgcatgcccggatgtcgactgggtcgccgtctcccgcgaattcgtcaccaaccgcatgggcctgacctggaacccgctgaccacgcagatcgaaagccacgactggcaggccgagctgtactccaccgtctcccacgccaaccgcatcatgcacaacctgtgtgtggacgtgtggatgtacatctcccgtggagtgttcgcccaggtgccggtcaagggtgccactggttcctccaccatgccgcacaaggtcaacccgattcgtttcgagaacgccgaagccaacttcgaaatcagctgctcgctgctcgacaccctctccgccacgctggtggaatcccgttggcagcgcgatctgaccgattcgaccacccagcgcaacatcggttccgcgctcggctactccttgctcgccctgaccaacctcatgggcggccttgagtccatccacccgaacacccacgtcatcgagcgtgagcttgatgagaactgggaggtgcttggcgagccgatccaaaccgccatgcgcgcctgcgagctcaagggcctgccgggcatggacaagccgtacgagaaggtcaaggagcttatgcgcggccacaccatcaacaaggaacaggtcgagcagttcatcgaccagcagtccttcgacccggaaaccgccgctcgcttgaaggctctgacccccgccacctacaccggtgtggccagccagctcgtcgctttcgaccgctgaaataggtgcgatgcgagtccctcgagcccatcgcatccaccacactactgcgctgagtcacaaaccaaaccacaaactgaaccgaacaaggacaggcgtcaggtaaccatttcatgactactgaacaggagcagtccactacggaagatcgcccggacaaggcgacctcctccactaccgaccggccgatcgcctctggtgacggccggtcggccagttttgctgtcagcggaccggacagcccggcaaccgacgacagcaacgattccggaccgtacatcgacgacatcgctccgcgccgcacgcgcgacttcggcgatctgacccgggccggtctgtcgctgttgatggccgccgtggtcatggtgttcgccgtgtatctgggcggcatgacgcgcggcgtcgaatccgacgcacacaccgcagcccaggtcatcaactggttggctgacttcccctccaccgtgctgacgcagctggccaccatcgtcatcgtgatcatcgtgctcgctcaattgctactggcccgggaatggctgcaggccgcggtgtccgcgctggccatgttcgccggctacggcatggtgtgggtcgtatcgacggcaatcagcagtctgaacgatttcaccctgccaatggcactagtctcagccgccacctcatacggctccgggctgttgcccgacatctacgccggcatggcgtccttcctgaccgccgccgggccacgccgcacccgctccacggtcaaatggagctggaatatcctgtatgccatcgctgcggtgatggtggtgctgtcgtggcattcggtcaccggcatgctggtgtcgatggccgccggccgcacagtgggcatgctgatccgattcgtggtcggcacgcagaacaagggcgtgtggggccaagatctggtcgccgccctgaaaggcatcggactggacaccgcctcgctgattcggcatcaggagcccggcgtcggccacggttcactggccgtcacgctggacgacgatctggccgaaggctcgcgcatctacgatctggataccacggacaaccgtcgtttcatcgtttccgtcatcgacgcgcagacccataccgtcggctatctgaagcagttgtgggactgggtgcgtttcaccagtgtgtccatccgacgtgaccgttccgtgcgtgacgccgtccagcatcatttcgccatgctgctgggtctgcacaatatcaaactgcccgcgcccgcaccctacggcatcgccgataccgacgaatccgcgattctggtgctggatgcacacaccatcgaactgcccgccaacctgaacacgcttaccaaggcggatgccgtggcctacatgcgctacctgtccgtggcgagccggcgcggctatacgcaccggcgcatcacgccggacacgctcgcccggcttgaagacggcaccgtcgtgattgccggctggctcaacggcgacaacgcttccggtccggccaacaccgcgctcgacaaagttcagctgctagtgctgttcgccgcgctgatcggcgtggaaccggcggtggaggccgcccgcgaggcgtggggagacacgactctgacggccttggccccgttcattcagaaggtcgcggtcccctcccccacgcgcgcgctggaatcctgggacaagcagctgctcaagggcctgaggagtcgtatcaccgcgctggctgacgaggagacggtggaatccgccgaaccggtgacgctggcccgattctcctggcgttcgatgatcaccatgctgctggtcatcgtggccgtggtcgtggtcttcacccaactgaagcccgaggagatcatcaccgcgctgaccaacgccaacccgttgatggcggtggtgacgctcgcgttcggtgtctgcggctggatcggctcgtcgatttcgctcggttccctgatggcgcggcacaagcgtgacaatatgggcgtcttcatgagccaggtggcaggcggcttcgccaccgtatccatgccagccggcgtgggcccctcgttcgtcaacctgcagttcctgcgcaaatccggctatcgcaacacccaagcgaccgcaattatgagcgccgtgctcgtggtgtattacgccgtgtacttctccatgctggtcatcatcggcctgttcaccggccgcaacatgttctccggcgcaatcccgacaaacacgttggttatcgtgctgggcgttgtggtcgtggtgctgtccattgcgatgatgattccaccgttgcgccactgggtgacccgtcgtcttatgccgctggccaagacgtatatcaaccagctgctggacgtgctttcccagccccgacagctcacagtcagctgcctgggcgcgctgttccagaacgcgaccactgggctcgctttctgggcggccctgcaagcgttcggccattcatcgaatccgattgaaacgacgttcgtcttcctgctggcctatgcattgggttccgcagtgcccactccaggcggtctgggcggtgtggaagcggcgctgacattcgcgttcgtggcggtcggagtgccgcagggcgtggcgctttccgccactttgctgcaccgcgtggtgttctactggctgcgcattccgctgggcgcggcggccatgaagtggcttgacaagcataatcttgtctgattcgtctattttcatacccccttcggggaaatagatgtgaaaacccttataaaacgcgggttttcgctgaaacatgcgctagtatcattgatgacaacatggactaagcaaaagtgcttgtcccctgacccaagaaggatgctttatggcatacaacaagtctgacctcgtttcgaagatcgcccagaagtccaacctgaccaaggctcaggccgaggctgctgttaacgccttccaggatgtgttcgtcgaggccatgaagtccggcgaaggcctgaagctcaccggcctgttctccgctgagcgcgtcaagcgcgccgctcgcaccggccgcaacccgcgcactggcgagcagattgacattccggcttcctacggcgttcgtatctccgctggctccctgctgaagaaggccgtcaccgagtgaccttctgctcgtagcgattacttcgagcattactgacgacaaagaccccgaccgagatggtcggggtctttttgttgtggtgctgtgacgtgttgtccaaccgtattattccggactagttcagcgcttccataagctgctcgaatcccagggtgggctcggcctcgaagggatcgaggagtatggcttcccggcgttcgggggcggtcagggtcaggtgggtccagtcggcggagaactgggctccgacgttcaaggccgcgtccacgaaccggccacgcagggcggcacgggtgtcggtcggcggattgtgcacggcgtattccacgttgtctcctgtcagcagctcacgcatctggttgcgggctacgagcgaaccgtacaggcgaccgttggcgatgtcgtggtagtcgagctcaagctgttccatctgggcgaaggtgacgtccgggcgacggcgtttgagcgcgtcgaacagacgcttcttggcagcccagtccacgcggtcggcgagcgcatcgtatgcaccacgctccagcgcgtccagaacgcggctccactcccccataatcgtgtcgatcgtggtggccggcagcgaacttgccagcgcatcgccatgggtttcgatgaaggccttgaccgccgcataataccggcgctgcagacccagtgcggacacggattcgcctgattcgagcgtcagttcggcgcgcggattgtcaaggaatcgactgaccgtgcgattggcggcagccggatcagcaaaggcatactgctcgaatccggacggaacgccatggcggaaggcgtcttcgatcgcgcacagcacaaggtgcgtgacggcaagcttcatccatgtggaccattgcgaacggttcgagtcgccgatgatcacatgcagccggcggaaggagtcggggtcggcgtgcggttcgtcgcgcgtgttgaccatcgggcgggagcgggtggtggccgaggagacggcctcgtccaggaagtccgcgcgctgggtgatctggaagccgtccggggtcatgcggccggcaccggtgtacagctggcgggtgatgaggaacggcagcagctggtgttcgatggtctccaacggcacgaagcggcggaccaggtagttttcgtggcagccgaaggcgtggccggcggagtcgacgttgtttttgaacacatggatcgtggcgtgtgcgccgtaggattcgcgcagcttgcgctgggccttcagggctaggttgcgcatcacgtgttcgccggcgaggtcctgggccagggcctcgcgcgggtcgcgcgcttcggcggtggcgtattcggggtgggatccgacgtccagatacagacgtgagccattggccagatacgtgttggtggagcgggaacgggagacgatgggctggaacatggtcatcgccacctggccggcgtccacggggcgttcggcaccggtgaccgccacgccgtattcggtttcgacgccgaaaatacggcagaacccgtccatctcggcggatggtacgggttccgtggcgtgcagggagcgggtgccgctgtcacgcagttggggcatcactcgccgcctttttgcacgaagctgttgacgtattcctcggcgttggtttccaaggcggattcgatgtcgtcgaggatgtcgtccaacacgtcggcttggtcggtggactcggtttgggcggcggcctgcgtggtggcgagggcgtcgtcttcctgggtcgcggcctgctgtgcttgaggttgttcgaattgttgtggcatgttgtcttctttttgggctgtcaaactcccctcagtcagccttcggccgacggctcccctcacccgaggggagccggaggagtcaaaaaattatcgctggttgatggagtcgagccacggatactgctgcaggtaatgctgcagttcgcggatgatgagtccattggaggccactacatcgttatcgtgacgccagtggatgcgttcgccgtcccaacggctcagcgtgccctgtgcctcccagaccactacggtgccggcggcgatgcccgcgatatcccacacgtgcagcatcggctcgaagtaggcgtcataggtgccgtcggccactttgcacaggtcgagcgagacggggcccacgcgcttgatgtcggccgggcgtccggcgagcgaggaggccacgtcgagcgcacgctgcgattcgctggggatgaaggacatgccgtagctcagcacagaaccatccagcgaggaggtcatcgacggcacgaccttgtcgcgcttctcgccgaccgcggttttgtggatgcgcacggcacccgctcccctggcggccaggtaggtcaggccgagggccggggcgtgcacgatgccgatgatcggcttgggctcgttgtccgggccgaattcgaacagggcggcggtcaccgtccattcgctcatgcgacgtacgtagttgatcacaccgtcgatcttgccgatgtaccagtaacgctggccagggcggctttcggcggggcgggtggtccagaagccgtcgaagtgggcgatgtcggcgattctggcgctcatgaagcgcatgatcttgttgtccacttcaagcttgtagcgggggccacggtccgcgttctcggtgctcggctgggcgaggttacgcggattgagttggtcgtggagggcatgctggccggcttcttcgagcaggccggcgactttgagcgcaaggttgcgcaggtcctgtggggtctcttcgcgtgtttcttccatagctaccaagtctatcgttcggcgttgatggccagcgacttcagcagatcgatggcgtgttcggctgaattgagttcggtttcgcagtgcgccttggtgaaggcgagcggatcggagatgtcgagggagaacaggtgatggtcggtagcggccatatggccggcattgccgtagaattcgaccgcctcgccctcgtctgcggcgcgcgggtcgcgaacagtgagtcgggaccagctggcggcggccacctcatcgccgaattgcgccacgagttttgccctgagccaggcgcgggtgtcttccggcggttcggtggtggcgcgtgcgatgtcggcggcgctcaccacccgttcggtgcggggttcgagtttggtgaagatgctgtccgcggggtcgagcgccgcccatttcaggtcgatgaccttcagtcgcggatcattccatccgttggccacgccgggtgcggacgttgtggtgattttgcggcgcagtttttcgagcagctgccatttgagcagccattcgatgcggctggcctcgccggtcatggccagacgttcgtcatcatcggcggcatggcggatggaggcgcagtcgatgagcgcctgctgccacatcgccataatggatgtggtggatttgtccggccaggcgggttcgccggcggtgtcggtgccttcgaccagtgcggcaacctggtagacggcttggcgcagtttgagctggataagccatgcgttggtttcgccgccgttggccagcggcaagattgcccccagcgtcaggtcgcgggaaacggtgtgtatggcctcgactgggtcagacagttcgagttcgtcgaggaaggcgttcaggtcgaatccggcctcgtccgcatgttcgagcagccacagcagcatgctcgtggtgccgagtttcagtgcctgcggcacctccatgcgattggcgtcgccgacgatgacgtgcagacggcggtatgcatcggtggagtgggattcgtcgcgcgtattgatgatcgggcgttcgaaggtggtttgcaggccgactttggcgtggatgtagtcggcgcgctggctgagctggtagcccgggatctcgctgttctcgccaatccctacgcggccggagccggcgtagatctggcgggtgacgaagtggagggtcatcaggcgtgtgaccaagtcgaatggcaccgcgcgggccatcatatagttctcgtgcgtgccccagcaggagcccttgccatccacattgttgcgatgcagggcaatgggagtgccagtctgtttgcgggcgcgttcggtggcggcctgcatgatgaggtctccggcgtggtcgtatcggaccgcttcgaacgggtcggtggtttccggcgccgagtattcggggtgggcgtggtccacatagacgcggccgccgttgggggcgatcacgttggtgatgttgagctgcggggcgtcggtgagcatgtccgggcgggcggcggcgcgttcgagacgggtgccgcgcgcgtcgttgaccgggtcctcctgccggtagtcccagcggatggatttgctgtggctgtccgcggcgccgttcaccacgtcgaaggacagttgcaccggattgtagcggtccggggtgttcagggataccgcgtattcggtttcggtgcccatcactcgtttaacggtcatgtagtgctccttgagcttgagctattcggcggtgcggatgcggcggatcgggtccatgccgttgatgcgcgaccattgttcggggtccacgtcggccatggaatcgcgggtctcgcggtattcgtcttccacggcggcagcgagcagcggcacggtgagtgccacgtccaagccggtttcgatggattccttgaccgctcgggtcttggcccggtccacgatgttcttgagcatcgcgccggagaccacgtcggccaggaacaacgcatgccactggccgttctcctcctgcacgtcgcatagatggcggcgttcggaggttccgtagatgtcatgcaccagcacggcggacaaggcgtgcgcgtcgacgccatcttccagaggcaggtcgtcggtgaggtaatggtccacgatggcgatggcctgattggttttgggccggccgacgcgaatcttgacgtcgagacgccccggtcgcaacacagccggatcgatcatgtccacgcggttggaggcaccgattaccatcacattgtcgagtgattccacgccgtcgagttcggagaggaactggggcacaatcgtggtctccacatcggaggagacgccggagccgcgggtgcgtagcagcgaatccatctcatcgatgaacacgaccaccggattgccgtccgcggcgcgttcacgggcgcgctggaaaatcaggcgaatcagtcgttcggattcaccgacgtatttgttgagcagttccgggcccttgacggacaggaacacgcccttgacatgggtttcggccggactgattgcgccgtcgccattcgaatcgtaaccaccctcgcatagggcgttcgccacggccttggcaatcatcgtcttgccgttgccgggcggaccgtacagcagcacgccctttggcggcttcaaatcgtagcgctcaaacagcgcacgatgctggaacggcagttggacggcgtccctgatacgaccgatctcactatccaggccgccgatgtcggcgaacgtgacatccggggtctcctccagcaccagatccttgtcgccctcggcgggcagcacttcgatggcgaggcggacggacggatcgacgataatacggtcgccctgattgatgcccgcatacgcgagcgcgccggaacggcggatgagcacgggattgccggaggcgtcggtaacgatcagtcgaccgtcgtcaagtacctgcttgacactgcgaatctggcccacggtgtcagcatcgcgctgctcgaccagcacgagcttctcgttgagcatcacggtggctccggcggtcaggcgggcggcgttgacgttggaggccacaggcaccaccatgcggcgggtgccggaaatgacttcggccgacgcgtgctggatgccgtcttcatcggtgcgggtggaatcgaccttgaccatggtggcgaaggtgagcggcggctgagcgagctgggcgagctgtgacttcgccttggtcagttccttgccggcgcggctcagcgcttcggcgagcgcatggttcttggccatcaggcgatcgttcagcgcggcgagatcttcggtgtcgctcatgcgggttcttcgcttcccttctatccgggattttcggcaacttatggcagtcggcagaccctattcgttgccgtcggcggatttcctgttacgtataacagtacgcacttttcgcaccacgaaccatacgatgaccacaatcacggccgcgatgaccacgtcctcgaacacgccgagcgcgccttgaatcgagcaccactggtcgccgagcaggtaaccggcggaaacgaggatggtgttccacacggccgagccgagcagggtccagccggtgaagtgcaggaagttcatgcggttgaatccggcgggaatcgaaatcagcgagcgtaccacgggaatcacacggccgatgagcaccgaccatgtgccgtatttggtgaaccagtcgttggctttgctcacgtctttgcggctgacgccggggattttgtctgccgcgagattgatgcgatgcaggcccacccagcgggagatgccgtacaaggtccaggcacccagtacggagccgatggtggcccagatgattgcgcccggcagactcagggtgccgcgtgcggcggtgaagccggcgagcggaagaatgacttcggacgggatgggcgggaagatggattcgagggcgatggccaaggccacgccgataccgccgatggtttccatcagcatgatcagccagtcggtgatggtgccgatcaggccgggttcggtggtggtgcagatgggtgtggggtcggttgcaagaatagtggcggctgccatggaaaaactcatagagagcattgtcccaaggttttcccagaatcagaggcatgacgcaagaagatgtgcattttattgacaagtccgccgagagcgaagttgggaacccggttggttctgcggtttctgtgccgacgctgagcaagcccggcctgctggttatggatgtggactccacgctcattgacgaagaggttatcgacgagttgggcgtggtggctggctgcggtgaggagattgccggagtgaccgcacgcgccatgcgcggcgaactggagttctgcgatgcgctgcgcgcacgagtggccctgttggagggcctgccgatctccgtgttcgacacggtgcatgacaagctgcatttcaccaagggtgcactggagcttatcgacacgctgcatgaacacggttggaagatcggcgtggtgtccggaggcttccatgaagtggttgacatgttggcggccgagggccatatcgactattggattgccaaccggcttgaggttgaggacggtcatctgaccggcaaagtgcttggtgagatcgtatgcaagaccgtgaagctgcacgccttgcaagcgtgggcggaccgtttgggtattccgatgagccagaccgtggctgtgggcgatggcgccaacgacattccgatgattcaggccgccggtctgggtctcgcgttctgtgccaagccaaagacccagctcgccgccgacaaagccatcaacgaccgcgacctaacccacgtgctcgattatctgcgccggtaaaattttaccgacctcggctccggcacttatagttgagccatgactacttcaggcgcagaacagttgacgcttgcggggctggctccccgcaagcggcgtaaacgtgcgcctgcggagcatacgccggccgagcagcatcccatagcgcaagtcgtgttggatgtgcaggcgctccacctcggccagacattcgattacttcattgatgaaaaagacagcgaggccgcacaaccgggtgtgctggtgcgcgtgcggtttggcggtcaaagggtcagcggcgtgatctgggcacgcaccgataccagcgataccccgcgctcttcgattcgctatatcgaacgggtgttgagccccgatgtgctggttcccgcatcgatgcgtgaggatatcggtctgattgccaaagcctatggcggcacacgggccaatattctgcgtttcgctgtgccaccgcgcgtggccaaggtggaggccgaacagcggttagccgcgtcgttccgccgaccggtcggcggctccctaccagataatacgcaaggcggttttgccgggcgtggcaccaatcccgatgggaccatgcctgctggctctacctttgccgttgccagtaccgtttcggagggggctgcgcaggggtatcgtcgtctgaccgccaattacgccgacgtcaatgtgcttcatgatgcgcttaccggtcagcgtttccaatcttttgtgtttgattcgctgcccggtgcacaggagtggcaacggaacatggcatggatggtggccactgcgctgagtgccggtaaagctgccgtggttgaattgcccaccatgcgcgaggtcgaagacctgatgcctatgctgcgcaattatgggctcaaaccgttcgcccctgctccggccggcggctgggtgggcgacgtcgccgtgcttaacgcggagaccatgcccgcggccgaccggtatcgcacctatctggctgtggcgttgggacaggtgaaggtggtgatcggcacccgtgcggtgatgtatgcgccggttgaaggcccggcgctgttcgccattctggaggatgccgcctatcagaacatggacggtatgatgccatatccacaggcccgtggcgtgatgcggctgcgcgccaagtcccatggcggcgtgttcgtggccatggccaatgcgcgcaccccgcaaagccagtgggaaaacaccggcccggatacggtggagaccccggtgagcggctattccaccacaattcatccgctcgcctcgccgctgaaggacgccactccttgggtgcgttggctcaatcgcgatgaacttgcgcgtcttgccgacccgtccatcggggcgcgcgtgccgcatacggccgtccgcgtgctatctaaggctttggagagcggccccgtgctgctgtccattccgcaagacagcgtcagtgagactctgagttgtgcgaaatgccatcgtcaggcgcgttgtgccaagtgttccggaccattgcaactaccggccgaccgccgggactccacaccgcgatgccgctggtgcggggctgccgccatcaactggaagtgtccgggctgtgggcatgaacgtatgcgcgtggtgcgcgtgggtgctgcaggcactgcggcggagctggccggattgttccgtggcgtgccagtagttttgtccagcaagacgcagggcctggtgcgcgatgtggcttgtcagccgatgatcgtcatcgccactcccggtttcgaaccgcgcgtgcgtccggtcagtgccgagcagggatcggctggccatgagtatcgtgccgtggccgtgctcgacgcttggaccagcttgtatgcgttgggcgtggatgctcgcttggatacattgaccgcgtggatgcgtgcggtgtcgttgtgcgcgccgcgttcccgtggcggccaggcgttgattctcggcgaaaccgacccggccatcgcccaatcgctgatgctctgggattcgaggattcttgcagccaaggatcttgaggagcgtgtggagaccggtatgccgccggccgtggccgccgcctgcgtgtggggccgccgtgatgcggtgatgatgctgatgcagcgtatcggcgccctgggcggcgattggacggcctgcggcgagctgcccggcatgttgggcccggtgccgatcgcgcaaccggacacggtcgacgcccgggagctcgaagccacggccgaccgggtgaaggcagtaatccgtgtgccgcagagtcggcgagccgagctggcggcccgactgcaccgggaaaccgctcgtcatgtggcgtcccgcgaacccggcgagcttcgcttccgagtagatcccaaggacctgatctaatcgtcttcaacacgtgaaacgataattacagaatgaacatcgctagaaggaggacactatgaagggttggcctggagagccggatatggattacgacgtgctggtcgcggatggcgaggccgctgcgaacgccggcaagccgatcaccgacgtgatcttcgatttcggcaacgtgctgatttactgggatccggtcgccgtactcatcccccgctacagccagaagaccatcgacgaattcctcgacaacgacatctccggcttctacgatgtcaacgacctgatggacggcggcaccagcaccgacgaggccatcgccatcatgcgccgtgacaagggcgataagtgggcggacatcctcgactactacatcaagaacttccgcgactccctgaccggcatcgtgccgggcgcgcgcgtgctggtcaatgacctgaaggctgccggcatcggcgtgtggggcctgagcaactgggaatccagtctgttccacgtggccgaggaacagtgcgatattctgcagcagcttgatggcaagctcgtctccggttttgtcaagctgcgcaagccacacaaggaaatctacgaggccgcgttgaaccagttcggcatcaaggccgatggcgcgttgttcatcgacgacaaggccatgaacatcgtcggctcgaatgcggccggcatccgtggcgtacgtttccaggatccggtcaagctgcgtgaactgctcatcgccaatggcgtgaacattccggccgtgcagtgagcatcgacatttcaaggaggaccatgctcaaactcgtgttcgccggcacccccgacgtggcggtgccctcgctcaaggcctttgccaccgatccacgttttgatgtggtcggcgtcattacccgccccgatgcgcctaccggtcgcggccgcaagctcacgcccagcccggtcaaggctacggctctggagctcgggttgcccgtcatcgatctcaaaccccgctcccccgaattcatggaggcgttgaacgacctgcatgcggatatcgccgctgtcatcgcctatggcaatatcctgcccaataacgtgcttgatgcggtgcccatgggctggtacaacctgcatttctccaacctgccgaagtggcgtggcgccgctcccgcccagcgtgcgatttgggcgggcgacccgaccaccggcgccgacgtgttcaaggtgggcgagggtttggatgatggcccgatcgtcgcttccctgaccatcgaactgaccggccgtgagacttccggcgaactgcttgaccgtctggccgaggaaggcgcgcccatgtatgtggatgcgctggccgccgtaggtgaaggcaccgccacattcaccgcgcagccggccgagagcctggaatacgcgcacaagatcacggtgaaggacgcccgcatcagttggacggacgaggccgaggccatcgaccgtcagattcgcgcctgcacgccacatcccggggcatggaccgaactgtttgcggaagggccaatcgccgataatgacgagtcaaccgctaaatccctcgccctgcatattctcgccgcacaaccggccgaccagtccaatcccaacactccggccgagcttcagcccggcgagctgaaggtgggcaagaagaacgtgtgggttggtaccggcagcacgccgctggaactcacccaagtcaaggcgcaaggcaagaaggccatgcgcgccgccgactgggcccgaggcgcacgcctctcccccgccgcctgcgtgcgataacaaacaatatcgctcccgccttcggaagcacagtaaaggcccggcatcttcataaagaagatgccgggcctttcagctatgcaatcggcgatcagttgagaccggagagcttgttgatcagctccgggtcacgcgtcgcacccttgtcggccgagcgggcgaaggcggcgtacgccttcagcgcctgggagacgtggcggttgcggtgagccacgtagccgtcgccagcctcaagctcgcgacgacgctcgtccagctgctcgtcagtcagttcgacgttcacggaacgggcttcgatatcgatatcgatgatgtcgccgttcttgatgagcgccaccgggcccttgttggcagcctcaggcgccatgtggccgatggccagaccggaggaaccgccggagtagcgaccgtcggtgagcatggcgacctgtttgccgatgcccttgcccttgacgaaggaggtcgggtacagcatttcctgcatacccgggccgcccttcgggccctcgtaacgaatcacaagcgccatgccaggcttcagggtgtcgttcagaatgacctcgatggcctgctcctgggagtcgaccaccagagccggtccacggaacttccagatctccggcggaacaccggcggtcttgaccacgcagccgtcgggggccaggttgccgcgcagcacggcgaggccgccttcgtgaatctccgggtggctgatgtcgtggatggcgccgttggtgcggtcgcggtcgagcgagtcgaacagggtggtgtgcgtccacggctccggggagatgatgtggccaggagcggccttgtacatctgctgggcttcctcggtgcaggtcgggcgcatgatgtcccaatcggccagcttggcttccagcgtcgggtagtcgatggaatgcacgttggtgtgcagcttgccggcgcggtcgagctcgccgaggatgccggtgatgccgccggcgcgatgcacgtcggaaatctcccacttgccggacggcgaggccttgcagatgcacggcacggtgtgggaaatacgctcgatgtcgtccagggtgaagtccacgtcggcggactgggccatggcgaggatgtgcagcacggtgttggtggaaccgcccatggccacatccatggtcatggcgttctcgaaggcttccttggtggcgatggagcgcggcagcacggaatcgtcggaatcgtcgtagtactggtgagcgatcttgacgacttgcttggcggcacgcttgaacaggtccttgcggtaggagtgggaggcgaggatggtgccgttgccgggcagagccaggccgatggcctcggtcaggcagttcatcgagttggcggtgaacatgccggcgcaggagccgcaggtcgggcagacggtcttctcatagttgagcagttcctcatcggagacgctgtcgtcagcggtggcgtacatcacgtcgataaggtcggtgctcttgactgtgccgtcggcgagcaccgtggtgccggcctccatcgggccaccggagacgaacacggtcggaatgttgaggcgcagggctgccatcagcatgcccggcacgaccttgtcgcagttcgggatgcagatgagggcgtcggcgcagtgcgcgttgcactgatattcgacggtgtcggcgatgatgtcgcgggaaggcagggagtagagcatgccagtgtggcccatggcgatgccgtcatccacggccatcgtgttgaactcgcgcggaatgccgccggcttccttgatagcctcggaaacgatgcggccgaccttgttgaggtggacatggccgggcaggaactcatcgaacgagttggcgatggcgatgatgggcttcttgcccatgtcgtctccgctgacgcccgcagcacggtagagggctcgggcgcctgcaaagacgcgccctgacataatttttgcagatcgcatttcagtcatggttctattcaagcctttgcgagggacacgccatttgtcaagagtcgaataatggaatatgcaaaaacgtaacgtttctcacacatttttttggaatacattcctctggcgagagtccggtatagggctgacagaagtccccccaaacggctacacttgcttcggttgagatagattttccaatgtttggagataagaacaatggcttttggtactgacccgacacccgacggtcttgcgaacccgccgatcgacgatctgatgaagcacgccgattccaagtacgcgctggccattttcgccgctaagcgcgcacgccagatcaactcctacttcacgcagctcaacgagggcctgctgcagaacgtcggcccactggtcgaataccagaacaacgagaagcctctgtccatcgccttccgcgagatcgacgagggtctgcttgaggagaccttgggcgaggacgacgccaacgagggcaactgatcgattcagacgattcgtttggattgtttggacagttcgtcgccgaatgatggtgtgagagttctctcacaactgattttgagcgacacgcttgcctgagttatcgcaatcagctataactcatcatcaggagcgaacaagacgtaaggctcgagccaccgcgctggttggcacgagcctttatttatgcccgcttccgcagtgacaagtaaaaattgacaccgtatcattgtgcctcgcatcccgcggggcgataagtcctgaagaaagggatgatatgacagaagaacatcggcttatttccgccgaatccgtgaccgaaggccaccctgacaaggtctgcgatcaaatctccgacgccattcttgatgatctgctggcccaggatccgtccagccatgtggccgtggagacctccgccgccaccggcgtgttcctggtcttcggcgaagtcacgtccaaggggtactgcgacgtgcagtccaaggtccgcgaaaccctgcgcaacatcggctacgcctcctccgaagtcggccttgacgccgattcctgcggcgttgtggtggccatcaccgagcaaagcgccgaaatcaaccagggcgttgcccgtctgactggcgatcaggagaccgccgccagccgcgaagaacgttacgaagcacagggtgccggcgatcagggcgtgatgttcggctacgccaccgacgagactccgacgctgatgccgcttccgatctatttggcacatcgcctcgccttccgtctgaccgaggtccgcaagtccggtgaagtgccgcacctgcgcccggacggcaagacccaggtaaccattgagtatgacgataacgataagcccgttcgtctggacaccgtgctgatctccacccagcacgatcctgaggttacgcaggattggcttgctgttgagctgaagaagcacgtgattgacccggtgcttgatgaggtgctgggttccaaggtgccgcatgacaactaccgccagctggtcaacccgaccggttcgttcatcctgggcggcccggcggccgacgccggtctgaccggccgcaagatcatcgtcgacacctacggtggcgccgcccaccacggcggtggcgcgttctccggcaaggacccgtccaaggtcgatcgttccgccgcgtacgccacccgttgggttgcgaagaacatcgtagctgccggcttggctcacaaagtcgagatccagatcgcctacgctattggcgttgccgacccggtgtccgtcaacgtggagaccttcggcaccgagcaaggcgtgacgcgcggccagatcgccgccgccgtgcgcaaggtcttcgatctgcgccccgctgcgattatcgacgagctggatctgaaacgtccgatttatctgaagaccgccgcgtatggtcacttcggccgcacggacgttgagttcccgtgggagaagaccgacaaggtcgaggagctcaaggccgcgattgctgcggagtgaggtgctctaattaggacagagagatcataagaataccataagaatagggtgctttccgctgttgatggcggaaagcaccctatttgtttttcgcagtgtcctacgaatctgttcttatttcaatccacgcaccccagtggggtgcgacctcaatggcatggccggtatcatcggcggcagcttatttcaatccacgcaccccagtggggtgcgacacaggcgttgaacgcatcctgtttgagcacggtgaatttcaatccacgcaccccagtggggtgcgacgcggaagccaaggcgcggtaatccaatactgggacatttcaatc

SEQ ID NO: 1600 - DNA, 10279 bp, Unknown
  R221_24m  MAG No. k141_50948
cctgcgagaagcctgatttctgtgcgatttccttcatcgtgaccatagttgagccttccacgcctcagtacgtaacaatacgcagtatttcagtaaataactttactacatagtgtaactcacgcccgctgtctatttagaagtgcaacgcccttgttcgttggttaattccagcagttcgtcggcgaatgcctcggggattgttcatatacgcggcccctaatgcaatggcctcaaccagcacgaatatgacgtgctggttgaggccattgagagaaactaccgaaaaccggtcagggcacaaatagctcacgaatctgggcggcggaaccgtaagacgcttgggcacccagaccggtagccgcatatgcagaaacgaacgaagccagctgagccgcttcacgcagctcaaagcctgaggccagtcctgccagcacggcacccatgaacgagtcgccgcaaccggtggtgtccacggcttcgaccagaaccggtgcgatgcgggtcaccgaagcaacagcacatgatgcatccagcaccatcgagccatcaccgccgagcgtcacaatcgcccggtcgaacccgagctcccgcatacgatcggccgcagccagccagtcgaatccggaccagtcgccgtcttcgggttcggcgataccgaacatctgcgccatctcatgctcgttgacgagcaggatatcggcaagctgcaccagctcgtccggcagcaccggcgtaaacggtgaattgttgagcagtaccggtacaccggcttcatgcccgatacgcgcagccgcggtaacggtctcgatcgggctttccaagcacaggccaagcacattcgccgaagtcaattcaccgcgcatcgcctcgatataatcaacactgacctgcgcattggagcccggagagtagacaatcgtgttctctccgttcgcgtccacggtgatgaccgtggtaccgctggcccccggtacatgacgcacgtgctgggtatccacgccggcttctcgcaatgcaccaagcaggaactcggcattggcatcggaacccaccgctccaaacatgtaaacagtggcgccaatacgtgccgcagcagcagcctggttgccggatttgccgccgggcaacacttgcagcgggccgccggtgacagtctcccccggtccaggcagacgctcggtgaccacggtgtaatcggcattcatcgaaccgacgacgcaaaccgtgccttggattcgatcaagtgccgcaagaatgtcagatgctgtcatagcatttcctttcgttgtcgttgacgaatagagccaacgatcactcgccgatctttttgcggatgacgagatagtagatcacgccgataagcggcacacaaccggcgaatacatgaggccacagcccgtatagaacacacaggcgaacagcgtgagcaccacgaagcccgagttcacggtgaaacctgcgccaataaagccaatggccatcgaattgctggtcttcgggtccgcccacggatcggcggtcacagttgcggtattggttgacatgcgaagtccttttactcggcgtgctcagcgagcgcggtaatacgggtcatgaattcgttcagggacttccggatgatcgagcagttcggtgatggcgagcgcgttacgcacacctttggtcaagcggcacgttgccgtaagtaccagtgatgccgatgagttcgacttccgggctgttcagcgcataggcaatggcaagcgcgtcgtctacaccggtgtcgagatcgagaatgagtttgttcatggtgtctgccctttcttggcaactgtctgttctctccattgatgacatattcctgccagcgtcatctggcaggaatatggggggcagcagctgcgaaaacgactactggtcggctcgttcaagcttggggatggcgaacgaagccagcagagcaaggcccagaagcacggccgacgcgatcattgccgccgagtaaccggcaatgccgcccgagaagctcgcgaatgcgttcatcacggcatatagcactgcatagctcaagcctgcgccgaggttgaacgcgcccgcattgaggccgggcaagtatcctgggttgtcgtccggcgacagcacaatgcccaaaccgttgagcatgatgttcgccgtgcccgcgtatgccacaccaagcaccaccgagataaccagcaaggcccatacgctcgggaagtgtgcaacgtatacgccgaacagcacgccgaccaagctgaccagaatgcccacgcggagcatgcgatggtagccgaacttggaggcaagcacaccggcgaccacgccgaagaccagaccaaccaaagcatatggggtcagcgtggcgaacgacaccacgtcggctcccaatccggtgccgaacttaccgtcctgagccaaggccggcacaacgccattcatgatggcgaacacgccggtcatggtgagcaatgtggtgagcagcaggccccaggtgcgcggctgcttgagatagtgggtggtgaccatcggtgcgggattgcggttctcgaccttccagaagatcacgaaggcaaccgcagccgctaccacctcgatagcgacgagcacccaattcgcgtcgccgagtttctggatttcgttgatggctagatagactgccaggaaggagatgccaagaacgattgcaccggcccaatccatcttcggggtctctttggccgtgctttcatcggcgaacatcgacaccagcacgattgcgaccacggcgacaccgaccatcacccagaacacggaacggaagccgaacgtgccggcaagccagccgccgaggatggcgtcaacaccgccaataccgccgttcaccgaggtaagaatcgacatcagtcgcgcatatttggcatcctcagtcaccttggcgtgcagcatgatgagcgtcatcggcaccaccggtccgcatacgccctgcatcacgcgaccgaccatcagcatgggcacattcacggccaacgccgagaccacacagccgatggcggtgatgctcagcatgcccagcaatactttcttgcggcctgcgagatcgcccagtcgaggcaggaacagtgagaacagcgcacatgcggtgaagaagaccgtctgggtgaggctgatctgtgaactgctggtgttcagctcgcgctccatagtggtaagcgccggcgaaagcatggaagcgttgagctggaaagcgaagatcgccgccatcagcgcagccatcaaagcgacaatggacttgccgccctcatcaagcatttgttcggatttgactgtcgacatgactattcccttgtccttttacgcattcttcttcgtccgtcagccgatagcaacgatggcatcgacaatgagatcccagaacttatcgaagtcgagtttcaccgcgacctgcgtatggcattcctcggcggacggttccgggccacgcaggtcggcaacggtcatgcccagtgtcaggtcaccgtggatttcgacatccagcgggcaacggcgagtcgacaccacgctcggatcaatcagataggcgaccgtgcagggatcatgcaccggcggatcgatgaagtcctgattatcctgataggtcttgcggaagaagtccataagtccgctggcgaagtgcgacaaatcagtgccgatggcatcaatgcgatgctgaacctccggagtacacagcgcctgatgggtcagatcaaggccaaccatggttagcttccacggctcgttgaacacgatgtgcgcggcctcgggatccaccttgatgttgaattccgctacggcgctccaattgccgacgtggtatccgccgcccatcaggacgacttccttgacgcggtctacgatacgcggctccatacgggcggccatggcgatgttggtcagaggaccggtcggcacaagcgtgattgttcccggctcgctggccataatcgtatcgataatccagttcacggcatggccggaatccagaggacgggtgggaaccggcaattcaacgccatccaaaccggtctcgccgtgaatcgatgcggcgacctcctgcttgcggacaaggggcctatcgcaaccggcgtgcaccgggatgtccgtggccttcgccatttccagaacggaccgggcgttgtacgtcaccttttcaaggctctgattgccgcccaccgtggtcacacccactaggtcaattttggggttgcctacagcaagcatgatggccatggcatcatcatgaccgggatcgcaatccagaataatcttttccaccgaagtgctcctttgcttccataacagccgctgggtcatctctgactcccgatgatttaacgtttcatcatcggcttatctgaggataaaacgttaaatcactattgtcaatgcctcatctacctgcgtgtcaaaggtatccgcgcattcctctcgaagccgcttgaatcacacttccgctgattgattggcgacggacgcggaactaacctcacccacagattcgcgtttgatgaacatcgtgggcacggaatgcgtgatgccgccatccatggatcccgaacggatgcgttgcagcaatagctccacaccctgcttccccatcagatccgcctgttgggaaatcacggcgatgcgcggcgtcatcacggtaaacgccgaaatatcatcgaacgacaccaacgacatgcgttcgccaatcgccaccccgcggtcatgcagcagtccaatcaccgtgaacgcatccggcgaatatgcgcacaatattgcgctcacccctgcacccagcagcatctctaccgcagcggcacgcgattcataagtggagtcgcaagctgcgacaacgccatcgccgtcggcaagcaaatcggcggcagcctcccgaaacgcggtctctcgttcgtcaatactgaacgattcgagcgaaggatgagacatatagcccacacgtcgatggcccagacgcaccagttcttcaagagcctcacgaatgcccgtatatggatcagaaaccacaaacggcaccgactcgacaccgggaacgcgacgatcaacgaacaccaacggcaagtctcgttgtatcaacgattgcactccgggggatttcacaccctgcggtacgacgatagccccatcaatgcgttggcccaaaagattctcgataaacacatcctggcgttccacgctttccgaagacgtgccaatcagagtggagatcccatgccggtagagttcatcctccatcgaagcaaccaaatcggcgaaatacggattgcacaaatcaggaaccagcaagccaactgttttggtacccgacgaacgcatggaccgagcacgctggtccggcacataccccatttcttcgatcgttttcagaaccaattgccgggtctcatcagagaaacggcctttatcgtgaagaatctgggagacggcagcggctgatacaccagcccgctgcgcgacatccttcaacgtcacgaatgccatctcggcctcctccttgcgactcatatatcatcagaccacaatccaatgtacccttcccctcaccaatactcgcaattcccaccaagacttatgcttctcatgcacaacaaaagcggcatatgtcccctgagacatatgccgctttgtaatctcatcagcaaccaggcgaatttgccgtcaacctactccagctccaccgcgccggtgtagagctgatagtactcgcccttttgcgcgatcagctcgtcatgcgggccacgctcgatgatgttgccgtggtcgagcaccatgatcacgtcggagttgcgtacggtggacagacgatgggcgatgacgaagaccgtacggcccttcatcaggttatccatgccggcctgcacgacttcctcggtacgggtatcgatggaagacgtggcctcatcgagaatcagcgcgggcggatcggccaccgcggcgcgggcgatggaaatcagctggcgctgaccttgggacaggccggatccatcaccctcaagcaccgtgttgtatccctcgggcagcatacggatgaagctgtccgcattgaccagacgcgcggcctcaatgcattcctcatcagtggcgttcagacggccataacgaatgttgtccatcacggtaccggtgaacaggttcacgtcctgcaacacaatgcccaaagacctgcgcaaatcaggcttcttgatgccggccacggagatgccatcatacagaatctgaccgtgctgaatgtcgtagaaccggttgatgaggttggtcacggtggtcttgccggcaccggtggcgccgacgagcgcgatcttctggccgggcttggcgaaccaggtgatgtcgtgcagcaccggcttgtccgggttgtagccgaaggtcacgttggtgaagcgcacgtcgccgcgcagcagcgtataacgcccatcaggcgaggtgatcgcctgctccttggccttcatcgccacctcgcaggcggaaccgcgcagcttttcggcggccttcagagacctcgtaccatcgtcgccgatctcacgcttccacgcccagtggccggtctcatggtcgacttcggtcatggtgcggccgtccggcccaagttccacgttcacgagcgtcacggtgcccttgtcttcctcgatgggttcgtccatcaacttgaagatgcgggaggcgccggctagcgccatcatcaccatggtcagctgctgggagacctggccgatcgggttgatgaacgagcgggatagggtcagcagggagacgagcgtgccgagggtgagcggcttgacaccggtcagaccgatgtcattgacgccggccagcgaaacggcggcaccgacgatggcgagcaggatgtagagcagatagcccatattgccgacgaccggcatggtcacattgccccaagtgttcgcctcggcggacgcctcaaagagttcctcgttcttctcatcgaaggtcttctgagtggcatcctcatggttgaagaccttgatgaccttctgaccattgacggactcctccacgaaggcgttcacgtcgccgatccactgctgctgcttgacgaagtagcggccggaacggctcacgatcttgcgcacgatgaaatacagcagaacggtgaacacgattacgaacgcggtgaatggaatggacagccacagcatggacagcaatgccgcaatcgcggagataatcgaggagaacatctgcgggaacgactgcgagatggcctggcgcagcgtatcggtgtcgttggtgtagtggctcatgatgtcgccgtgctcgtggctgtcgaagtagcggatcggcagcttctgttggtgggcgaacatatcgtcacgaatcttcttgagcgtgccctgttcaacggtgatgatcagccactgccaagcccaggatgccacgataccggccacatacaggcagcccatcagactgatggcgcgcagcaacggagcccagtcggggttcgattcccccaccatcggcaggatgtaggtgtcaatcagcgattggaggaacagcgcggatccggcctgcgcggcggcaccgatcaggatgcacactacgatggcgataacgcgcaatttgtattggaagatgtagctgaagatgcgcttgatggttccggggtcggctttgcccatgtcaggcttgcgattcttgaaactctggtcgttgctcatcgtgcttctccttccttggtatcggctgcattggtatcagctgcgctggtatcggccgtgggcatggtcactgtcaccttcacggtttcggacggctcagcggtagatgactcagcagccggtccggcagcggccagttcttcggtcttagcctggttcttggtctgggattcgtaaatggaacggtattcatcacaagtggtgagcagttcctcgtgcgcaccggaggccatgatacggccggaatccatcaccagaatcatgtcggattcctgcacggaagccacgcgctgggcgatgatgatcttcgtggtgtccgggatctcgttgtggaatgcggcgcggatcagcttgtccgtcttggtatcgacggcgctggtcgaatcgtcgagaatcagaatcttcggcttcttcagcagcgcacgggcgatgcacaggcgctggcgctgtccaccggacacattggtaccgccctgctcgatgtacgtgtcgtacttatcggggaattcctgaacgaatccatcggcctgcgcgagctgcgcggcatggcgaatctcctcatcggtggcgttcgggttgccccacctgaggttttcggcaatagtgccggagaacagcacgttcttctgcaacaccatggccacctgatcgcgcagcgcctcaatgtcatagtcgcgcacgtccacgccgccgaccttgagcgagccagagctcacgtcgtacagtcgcggcaccagctgtaccagagacgactttgccgaaccagtaccgccgacgatgccgatggtcatgccagaacgaatcttcaggttgatgtcgtcaagcacgggcttttcggaactgtcggagtagcggaaggtgacgtggtcgaattcgatggagccgtcggccatgtcagtcaccgggtgagccgggttctgcaccgtgctttcctcctgcagcacctggcagatacgctcggcagaagcctgagaaataatcaccatgacgaaaatcatggacagcatcatcatggccataagaatctgcatggcataggtgaccagcgaagtcagctcgccggtggacaggcccaacgccgcattattgccggaagcgacgatctgctgcgcgcccatccatgcgatgagaatcatcgaggcgtagacgcacaccatcatgatcggcatgttgaagctcatgatgcgctcagccttggtgaagtccttgaagatgcgctgggagatgcggccgaacttggagacctcgaaggattcgcggttataggacttgaccacgcggatgccctgcaggttctcgtcgaccacgttgttcaacgcatcgtaggtgtgaaacacgcgctcgaacacggggtgcacgagcacgaccagaccgcacaggccgatggccagaatcgggatgcaggccaggaacaccatggaaatcgacggggagatacggaacgagaacagccaggctacgaccaccatgatcggggcacgcacgcccagacgaatgatcatcatgtaggcgttctgcaggttcgtcacgtcggtggtcagtcgggtcacgatcgaaccggtggagaaccggtcgatgttggtgaagctgaagccctgcaccttctcgaactggtccttgcgcaggttcttggcgaagcccgcgccggccacggccgcgtactttccggacaggaagccggcacccagcgaaaccatcgcgcacaccagcagaatcacgccgaacttgacggtggccggcatgctgccaccggtgataccctcatcgatcagcgaagccatgatggtcggaatcaggatttccagaataccttcgaccgccacgaacaccggagccaggatgctggctttcttgtattcacgaatcgaatgacccagcgtgcgcagtacatgcttaggtctaccgggttcggcggctttgcgcgcctgcgcgattgcctctgcggtatcgctcattcgttctcctccttcgtgttagcaacctccgctccgtcttgatcgggagccatcaccacaggtgactgagggagtgtttgatgttcaaattcataatcaagagacccatatacaacagttgtacatacaacaatcagcgtgttgtagtatttccggctcttccgattttggcgtgtaagggcatgtgtcagaggtgggtttggatggcgtgtctgaagccgccggcgtgcagcaggcttctggtgatggtggcgtcgaggttgcggaagcccagggccatgcccctgagggtctcgagccttccgctacggcaggtccttacgttcgaacacccacatggtctcgtccgtggatctgttgtcggtaagaatcgtcaacatgaaccgctcaccgtcattcttcacgtaaccgcattgcactgcaccttccgacttgagccggctacggacgacatcgtagtcaagcagtcgcaggagaccttcttgatattcgggagcaatcctcacacagcaaaactcacgtaatgcttcgcggaaggaaccgccatgaccatcaagcatacgctgaaagaaatcgggcaccatgatcgaacgctgcgtatcggtattcagattgactataaatgac

SEQ ID NO: 1601 - DNA, 4584 bp, Unknown
  R221_24m  MAG No. k141_51038
ggccacatgcggccggttcggcgcctccgcctcgaacccgcgttccacgaggtcgggcctgccgcccgtgcccttcgccggtttggtggtgacgggcgtcctgccgcggcgcacgccgcggattcccgattcccgcatgacgctcatcaccaggccgcggccgatctcggccggatcccagccccgcgccgacgaccgggcgtgcgtcttgcggtacccgtacacggccatgaagaaatccgagtggaccagaaggatgtcgcgggccggcacctcgtgccttttgccatggttccatcatctcccatcgagttaggggaaatgcggaacaaaaatcagttcatgccacagtaacagtaagcttaaatgacattggtgtgagcgatatcgcgatagcgtaatcctgaatccttccagatgcgttcctgcgtgccatagtcgacacgtacgatgccgaagcgtttggtatagccaagtgcccattcgaagttgtcaagcaacgaccaggcatagtagcccgtcactttggctccagcatcaatggcacgggccacagcacgtatatgagcgtcaagatacgccacacgcttcggatcatgcacgatcctccccggtaccacagaccaggatgcggcatcatccgccaccatcggacctggaactccggcaaccgaatcatccttcgaaacctcatcatcccaggcagaaccgttctcggtgaccataagttccagtccaggatatcgtcgcgtaagctccaagaggatatccgtaagtccctgaggatcttgattccaacccatggctgtcaactcgccctcaggcggcagcgtctccacgtgttcctgcgctggaatgggattgtgatggacatcaagaccagctggagtcgttgccgcaggtgcggtttcatcggatgtaacactggtggcatcggcacggtaccgcacggtattggtggaataataattcacgccaagcacgtcaatcggctgccggatggcctcaaggtcaccgtcatgcacaaaattccaatcggtgacccgcgccgtcgccgtaaggagttcagaatcatatctgccttcaagcatgggaccgagaaacacttcattattgaataggtcagcacgtttcttggccataacgtcctccttggaatccgtcgcggcgcgggtgaccgacaggttcaatgtcactgaacagcgcgctttatcacctagttccgcgcggatcgcccgcacgcccagcccatgcgccagattgaggtgatgcaccgcggccaatgcctgtgcatgatccttgattcccggggcatgatcgccacaaccatagccaagatatgccgcgcaccatggttcgttcaacgtggtccatgtatccactcggtctccgaaagccttggcgagactggccgcgtattctgcgaaccgcagcgctgtatcgcgccgaggccaccccccacggtcctgcaggtactgcggaagatcccaatggtatagcgtgacaacgggcctgataccgttatcccgcagcatatccagcacgcgacgataatgatccaggccctcggcgttgacggttccgtctggagtgggttggatacgcggccacgcgatcgacatgcggtacgcgccaatgcctagttctttcatcaaactgatgtcttgtggatagcgatggtactgatcacatgcgttttcaccggaagacccatcgaatatggtgtcaggccgggcgcaaaacgtatcccagatggacggcgtgcggcctccttcatgaatggccccttccacctgatatgaagcggttgccgtaccccaagtgaatccttcaggaaaccggtagttcatcgatgctccttcgcaataagttttagcttcatgttgccgtagcattaaagcggtgaggttaattcgagtttatagccgagccaacctcaccgcagtttttattacgcacgagtgctacaatatattgacccatgtgtagggttcacgctgaattccgaattcttactgaatcaattgtcacagcaccaccttgccattctgcgcagcaactgttttgccgaacccaagtcgtgcagtaaacgcacgcccgtcggaactgacgatttccatcccaataggtgttctgcacgcagtaaatgtcacggaagaaccatccgtttctgttactacggcctccgcccgatcgtcatgatcaagaaatactgagatcaacgcgtccttgccgtactcgtaatccggagtctcggcatctggcttggtgaccaacacgctgccgtcacgcacccacagcggaatggtatcgaaaccgtggcgctcgttgcgccatataccgtgttcggttgttatcttctcgccggtgaaccaattagtccaagtgccggacggtagatagtactctacatctccggaataggtgaataccggagccaccagcaaatttgggccaaacatgtattggcggtcgagtgttcggcaggtgagatcgtcaggaaattcgacaaacatcgaacgcattaccggagtaccgtacagatgcggttgcagacctacctgatacaggtacggcatcagactcaatttaagctcggtgaaggtacgcgccacatccacagcggtctggcccggtgcgttgaccacgccgttcttttcgtccgcttcatcgaacaaccatggcacacgatacacagaggacccgtgcatgcgggaatgcgaaccaagtaagccgaaagcgacccaacgcttgtacacggcaggatcagggtacgcgccctcaaaaccaccgatatcatggctccagaatccaaagcccgaactggtgatggatagacctgcacgcaaggtctgcgccatgccattgaatgtggattcgcaatcaccaccccaatgcaccggctcctgctgaccaccgaccgtggcggaacgtgcgaacaggcacgccttgcctttgccgtaagtctcctcgatagcctcaaacaccgcctggttgtacagctgggtgtaccagttgtgcatggaaagcttcggtgagccgtcgtaccagaccacatcgcgtggaatacgctcgccgaaatcggttttaatggcgtccacgccttggttcagcaggtgcttgaccttatccttaaaccattcacgggcatccggattggtaaagtccaccaacgccatgccagcctgccagaaatcggtctgccaaatcccgccattgacttttttgaccaaataccccttttctttgccttccttgaacatggaaccacgctgaccgatgtacgggttgatccaggcacagatatgcaggcccttgtccttatgcagacgtttgagtgtagattcgatgtcaccgaagaagcgcttatcccattcgaagtcagtccaatggaattcacgcatccaataacagtcgtagtggaaggcgcttagcggaatgccgcgttcggccataccgtcgatgaaggagttgatagtcttctcgtcatacttggtggtgaacgaagtggtgagccataagccgtagctccacgccggcacgttggctgggcggccgaccagcttggtatagcggtcaagaatctgcttcggagtcggcccatagatcacgcagaaatcgacactctccccgggcacggagaactgcacagcctcagtgttttcggaaccgacttcgaacgacacgtgcccacgattgttgaccagcacaccgtaaccgttggaagtcatgtagaacgggatgtccttgtacccctgctcggaggaggtacccccatcctcgttccagatatcgatggtctgaccgttcttgatgtacgagccaaaacgctcaccgaaaccgtatacgttctcccccactcccagatgcagctggataccggtgaatacgtcggattcgtcgtatgcggaaccgtccatactcacaccgaattcgcctacaggctgcgcggtgacggccgcacgcggctcaagcttgaatcgggcgagggacttaccgacagactgtgtcagcactttgccgtcctcgccggtgaatgtcatattccaaggcgagcctttgactacttttatactcagcccaccggatgtcagcgttgccgaggcgccaatctgaccgacctcgccgtcaccgttgccatcctgaactgcgtcgatgtagtcgcggtcgccaggctcgtcagcgttcaatgggaatcccggatattccgtcgcgccctgccagtggtcggcagtcacacggatcacgccttcagccgggctggtgatgttgacctcgaatgccggcagattcagcgtgttcgcacgttcacgaaccggcgctaccggtgcgagcacattcagactttcgccgtcctttccgatgccaacctcatagacgtcacgcgcgtacagggcttccacgcccggtcgggtaagccagtaaccattggtgaacttcattgttgctcctgaattattgtgatgatttgtctgaaaacgacttgcatacagatacaaatggctgttctccgtatgaaggagatcacagcggagacagccacagatttaatgtcacggccgggggaagggaaccggccgtgac

SEQ ID NO: 1602 - DNA, 27682 bp, Unknown
  R221_24m  MAG No. k141_51695
atctcgttgccttcaacggcagcggtgatgccttccggaaccacgtaggagtcagaacccttagcgcccttggcggagaagttctggccttcaatcttgacttcaacgccagcagggatggcgatggggagcttaccaatatgcgatgccatgtttcagctctcctttctcaccacacgaaggcgacaatttcgccgccaatgcctcgatcgaggcattccttctgagtcagcagtcccgaagaagtcgagatgatggcgatacccaggccaccgagcggcatcggcagggagtcggacttcgcgtaacgacgaaggcccggcttggagatgcgcttgatgccctgaatggaacgctcaccgttcggaccgtacttgagggtgacctcaagagtctggccgaccttggcttccttagcggtgaagtccttgatgtagccttcgcgcttcaggatctcggcgatgttcgccttgaacttggagtacggcatatccacggtttcgtgcttggccgcgctcgcattacgcagacgcgtaagcatgtctgcgatcggatctgtcattgtcatttgggcttgttgccctttctcgctatggtttccgccgccctcacgcttcttctagaagcgttcgggccgcggaccttcagcgtcgatgtttaccaactggacttcgtaacgccgggcagttcaccgcggtgagccttctcacgaaggcagatgcggcacaggccgaacttgcggtagacggagtggggacgaccgcagacctggcagcgcgtgtaagcgcggaccttgaacttcggcttgccggccgccttgttcttaagagcggtttttgccatatcagttctccttgaaggggaagccgaggtgcttcagcagcgcgtaggcttccttgtcgtccttggtggaggtcaccacagtgatgtccataccgcgcacgtgatcgatcgaatcaggatcgatctcgtggaacatggactgctcggtgagaccaaagttgtagttgccctggccatcgaactggtggccgttgatgccgcggaagtcgcggatacggggcagcgcgagggtcagcagacggtccaggaactcccacatgcggtcgccacgcagggtgacgtacgcaccgatggcctggccttcacgcaggtggaactgcgcgacggacttcttggccttggtgatcttcggcttctggccggtgatcagggtgaggtccttgacggcaccttcgatgagcttggagtcgcgggcagcggcaccaacacccatggagacgacgaccttctggacacgggcaacctgcatcgggttggagtacttgaactccttctcgagctcaggaatgatctgctcgttgtacttgaccttcaagcgcggggtggccggcgcttcgacagtagtatcggtcatgccagctcctttccggacttcttggcgacgcgcacgcgcacggtcttcaccttgccgtcacgcgcctcttccttaacggtgatgccaacgcgggtcggctgcttggtctccgggtcgatgaccatcacgttggagcgatggatcggagcctcagtggagacgatgccagcctgctggccctgctgcgttgcacgcacgtgcttcttgacgatctgcacgccttcgacgatcagtcgatcgttggagagcacctgcttgacggtgccttccttgccgcggtccttgccgcggatgaccttgaccaggtcgccgctcttgatcttggctgccatgtcagatcacctccggggcgagggacacgatcttcatgaacttgtgctcgcgcagttcacgaccgaccggtccgaagatacgagtgcccttcggttcacggccggagccgagaatgacggcggcgttctcgtcgaacttgatgtaggaaccatccgcacggcgggattccttgacggtacggacgacaacggccttaaccacgtcgcccttcttgaccgacccgccaggaatggcgtccttgacggaggcgacgatcacgtcgccgatgccggcatagcgtcgcttcgatccgccgagcacgcggatggcgaggagttccttcgcacccgtgttgtcggcgacatgaagccgcgtttcctgctgaatcattgattctccttagccgagctggttctccccatttaccggggcatcgtggttgcccataatgccccggtaaatggcgagccttgccgaactttacttacttggcgcgctcgataatggattcgagacgccagcgcttggtcttgctcagaggccgagtttccataatactcacgaggtcgccaatgtgggcgtcgttgtgttcatcatgggccttgaccttgctggtggaacgaacgaccttgccgtacagcgggtgggtcgaacgctgctcgagctcgacggtaatcgtcttgtccatcttgtcggacacgacgtagccgcggcgaaccttacggaagttacgctcttcagccataatcacttctccttggattcggtagcggccggctcctggctgatgccaagctcacgctcgcgaagcacggtgtacatgcgggcgatgtcgttcttgacagccttgagacgggcggtgttctcgagctgaccggtggcgtgctggaagcgcaggttgaacagctcttccttggacttcttcaggaagccttcgatttccgcgttggtcttctcgttgagattcttgatggagtaatcagcggtaccgactgccatcagatatcaccaccttcacgtgcgataatgcggcacttcatcgggagcttgtcgatagcgcggcggagggcttccttagcgacgtcctcggacacaccaccgatttcgaacatcacgcgaccagggcgcacgttcgcaatccagaactccggggcacccttaccggaacccattcgggcaccgagcgggtgcttggtcagcggacgatccgggaagatcgtgatccacacgcggccaccacgcttgatgtagcgggtcatggcgatacgcgcggcttcgatctgacggttggtcacgtaggccggggcgagggactggatgccgaaatcaccgaagttgatctcgttgccgcccttggacatgccagaacgcacagggcggtgctgcttgcggtacttagtcctcttggggataagcattcttgctcactccttcgtttctgcagccggagcggcctcggcgggagcctcagccttgggggcttcgacggcctgcggggcggcggaacggttgccacggcgcgggcggcgatcgccaccacgacggcccggacggttgttctgctgagcctgctgctcttcgaactcggattcggtcatgtcgcccttgtagatccagaccttgacgccgatacggccgtacgtggtcttggcctcgaagaagccgtaatcgatgagggcgcggagggtctgcagcggaacgcggccctcacggtagaactcggaacggctcatttccgcaccgccgaggcggccggagagcttgatgcggatacccttggcaccggcgcgcatggcgtcctgctgggccttgcgcatggcacgacggaaggtgacgcggttggtcagctgctcagcgatgccctgagcgacgagctgggcgtccagcgcggcgttcttgacctcgaagatgttgagctggacctgcttgccggtcagcttctcgagcttggcgcggacgcgctcggcctcggcgccacgacgaccgatcacgatgcccggacgggcggtgtgaatgtcgacgcggacgcggtcgcgggtgcgctcgatgacgatgcgggacacgccagcgcgctcgaggtccttgctcatctccttgcggatctgatcatcctcaagcacgaagtcgcggtagcgttcgccggccttgttggagtcggagaaccacttggagcggtggttctcagtgatgcccagacggtagccaaacggattgatcttctgacccatctttagcgggctccttccttgttagccacgacgaccgtgatgtgggaggtgcgcttgttgatgcgagcagcgcggccctgggcacgagcgcggaagcgcttgagggtcacaccttcgtcaacgtaggtctccttgatggacaggtcgttctcgcggaacggctcgccggccttgtcggccttcacgcgagcgttggcgatggcgctctccagggtcttgcggaccggcagggccgcagcctgaggggcgaacttcaaaatggtgacggcttcggtcgccttcttgccgcggatgaggtcgaccatgcggcgagccttgcgcggcgtcacgcggacgtgacgagcgattgctttagcttccatgttctattccttatccttagcgacgggccttcttgtcgtccttcacgtgacccttgaaggtcttcgtgggggcgaactcacccagcttgtgaccaaccatggcctcggtgacgaacaccgggacatgcttgcgaccatcatgaacggcgaaggtgtgtccgatgaaatcaggggtgatcatcgaacgacgggaccacgtcttgatgacgttcttggtgcccttctcgttctgctcgtcgactttcttctgcaagtgggcgtcgacgaaggggcccttcttgatgctacgagtcatcttctcgatactcccttacttgcggttcttgccggacggacggcgacgaacaatcatcttgttcgaagccttcttcggacgacgagtacgaacctcgcccttgccccacggggagaccggcggcttaccaccgcgggtacgaccgccgtgcgggtggtcgaccgggttcatggactcaccacgggtgatcggacggtggccgatccagcgggcgcggccagccttgccgagctgaatgttggcgtggtcctcgttgccgacctcgccgacggtggcgcggcagcgcgcgtcgacgttgcggatttcgccggacggcatacgcagctgagcgtaggcgccatccttggcaacgagctgaacggcagcaccagcggaacgagcgatcttggcgccacccagcgggcggagctcgatggcgtgaaccacggtaccggtcgggatgttcttcagcggcaggttgttgcccggcttgatatcagcctgagcaccggtctcgatgacgtcgccctgcttgatgcccttcggcgcgatgatgtagcgcttctcgccatctgcgaagtgcaggagggcgatacgggcggaacggttcggatcgtattcgatctcggcgaccttggcgggcacgccgtccttgtcccaacgcttgaaatcgatgagacggtactggcgcttgtggccgccgccgcgatgacgggaggtgatacggccgtaagagttacgaccgccggtcttggacttcttgcgaaccagcgacttctcaggcgtagaacgagtcagctcggagaaatccgagacggacgcgttgcggcggcctgcggtcgtcggcttataaacgcggatagccataatgtagttcttcctttaacttttctcggctagccttcagttaccaaagatgtcgatcgtctggccctcggcgacggtcacgatcgcacgcttctgggaagcgcgctggccgaaaccggtgcgagtgcgctgcttcttgccagcgcggttgagggtgttgacgttcgtcaccttgaccttgaagatctcttcgattgcctgcttgatctgcaccttgttcgcatccggagccaccacgaaggtgtactggccacggtcggaagcggcgtagctcttctcggagacgacgggcttaagaatcacgtcgtgagcgggcttgtgaatagcgaccatctaaatcaggcctccttcggctcggtcttggcagccacgaaagcctcgaaggcttccttggtgaagaccacgtactgcgaggtaatcacgtcgtacgtgttgagctgatcgacgaaaatcgggtgaacggtcgggatgttgcgcacggagagccactcgttgatgttgtcgcgagtgaagacgaccgtggtgaacttgtccgcggtgatcggggccagggcggcgacagcggccttggtggacggctcggtgataccgaactccaccacggcaacgcgaccggcgttggcgcgatcggacagggcgtagcgcagagctgcggccttcatcttcttgggggtgcgctgagagtagtcacgcggctgcgggccgaacacggtgccgccgtggtaccactgcggtgcacggatggagccctgacgagcacgaccggtgcccttctgcttccacggcttcttgccgccgccggaaaccatgccacgagtcttggtggcgtgggtgccctgacgagcagcagcgagctgagcggtgacaacctggtggatcagcgggatgtgagcctggacatcctcggcggaaacgccgaagagagcctcaggagcttcaacggtgccggtggcctggcccttggcgtcggtgacgttcagagtaacgtttgccatggtttatcaggctcccttcacagccgagcggacgagaacgatgccgcccttggggccaggaatggcgcccttgatggcgaggatgccgttctcgacatcagcggagacgacggtcaggttctgggtagtggcggtcacatgacccatgcggccggccatacgcttgcccttgagaatacggctcggagtggcgcatgcgcccacagaaccgggacggcgctcgttcttgtgagaaccgtgagtacggcggtaggacttgaagccccaacgcttgatggtaccggcgaagcccttacccttggtggtgccggtcacgtcgacctcagcaccctcttcgaacaggtcagcggccagttcctggccagcctcgaactgatcgacgtcgtcggtgcgcacctcaacgaggtggcgacgcggggtgacaccagccttggcaaagtggccagccagcggcttggtcaccttggtggggtcgatggcgccgtagccgagctggacggccttgtagccgtcagactcctcggtcttcacggcggtcaccacgttggtggacacgtcgacaagagtgacgggcacgaagaagccgttctcgtcccacacctgggacatgccgagcttcttgcccagcagagccttgcgattagacataatgcttcctcctcccttacagcttgatttcgatgttgacgtccgcaggcagatcgatgtgcatcagggagtccacggccttgggggtcgggtccacgatgtcgatgaggcgcttgtgagtgcgcatctcgaagtgctcgcgagaatccttgtacttgtgaggagaacggataacacagaagacgttcttctcggtcggcagcggaacggggccaacaacagttgcgcccgcgttcgtcaccgtttcgacgatcttcttcgccgattggtcgatgacctcgtggtcataggacttaagcctgatgcggattttctgtcccgccattgccgtccgccctttctagcgatgttcgttgtactgtttaccaacctgcttctagggcaccggcgcgcatggcctcccttggacatacgtcctctggcggtcatccgacatcagtgcgcggtttccggctgtcacttcacttgaagtggctcccggcccgcgctcgcttttttaattccaatttgcgagcccaaatcaggcaacttgtttattcaagcattgaggtgggacagcgcggaggaattcgcgcgtgtcgcgctcatgccgttcgtattacctcgcggcatagccgctcggcgtcgcctaccaacatccttctgagacttacctatatatagtggcacagctcacgttggcgaatatggattgattaattgagttggacggtaacgcgaattactcttaaggctcgtgacacaatcactggcaaagaacatcaaacctattcgtgagcacggcgccaacgtgttatatcagcacggcactctggccttactcgtgccggggctgctggaaggcaccaccaccatcggcgaattgctcaagcatggcgacaccggcatcggcaccggcgagggcttggacggcgagctcatcatcctggatggcgtggcatacaagataggccaatccggtgtggccgaacgcgtgccggacgacttcaccatgccattcgctaatagccatcgcgcggccttccagtaccagtgcgagcgtcatgatatcggcctagaagagctcaacgaaaagatcgtcaaggcgaacggccgcgcgaacacgttcttttcggtaattgtgcgcggcacgttcagcttcatcaagacacgcgcggtcatcaagcagcaggccccctaccccacgctggtagaggtggccgaccggcaggccgtgttcctgcgccacgacgtcaagggcaccatgctcgggtacttctcccccgtgatgtttcacggcgcggctgtggccggattccacgagcacttcctgtccgacgacaagacgttcggcggccatgtgctcgatgcggtgctcgagcgcggcaaaatctacagtcaggtgttcgataccttggtgcagcatctgccggtggacgaccctgattatcgcaaccacgacttcagccaagatccgatagccgaggccatttccagcgccgagggcgatactcaacgagattagtctcacataaacacaatgtgagccaaatgaacatttccgaacaatcgcacatgttgcataatggcggaagcactggcttctcgcacttcctatgttcgattgtcgcaatgcaggtctcacatctttcttattgagaaccattcgctgcgatatcatgacagatatggcttcccgccgcaagactcttaaacgcgattggttcgacaaccaacctggcgcatgggtaatggttatgctgcccgctgtggctggcttctttatcggcgggcctaatcttgatacgctttggctgttggcgacgtgggccgtgtgctattgcgtgcagttcagcgccgcgcactggttcaaagcacacttttcacgccgttatctgccgccgatgctcacttatgccgtagcgctcatcgtcatcggcttgccattcctgattacgcataccggcatactgcgttgggctcctttatatatagtactggttgcgctgtcgatgctgtcctcgtggctgaggaaggagcgctcgctgtggggcaatgccgtgtcggtgattgccgcatcggccatggccacggtgatcgcgtcgtttggcaacgctgttgagacggcatgtgttattcccatcaacgcagcacatgcctcgtgcgcagccgctgatgtcaccgccgcacgcgccgcgattcggaatatgccggatttgagccagatattcgaccttcacgcctggtggcctgcgggttcattgcccgtgaacgggctgattgccaccgtgctgtttgcgctgacgcagtatgggtcggttttggtggtcaaaaccatgatccgggaacgcgggaagcgttcgtacgtggcggcttcgtgggtatggcatgtggcgctattgctgctagccgccgtgccggctggacgcagcccgtatctgattgcgatgactgtgctgctgttggcccgcgccgttgtgttgccggtggttacacggcgcacaaccttgaagcccgtggtgaccggcattaccgaggcgtttgccagctttattgcttttggctgcattattgcggtgatttagcgacgctcagcgattccatggggcggtaattccctcatggggcggtaattagcccatggggcggacggtaaaattttaccttccgcagaatagagccgttttcgtacaccgccccatggggttttcaccgccccatgggcaagttaccgccccatgagtaggttaccgccccatggaggcacctgccggctgagggagcgccacatatgcaaaggagcccggcccctgtaatggggtcgggctccttgtgtccgctatgcagccactaagctgcaacaccgcggttggtggctactgctggtgccagcagccgccaaccgcctgcaatcagcgctcggaggcttcctcagtggcggcctcaccctcgcgctcgatgcgtagcttgtggccttccgcctgggagacgccgtagtaagcaccgacggcgatgtccttcatgtcgttgatcagcgggatgcgcgggttggccggggtgcactggtcctcgtaggcgcgcatgccgatctgatcgagcacggaccagaagtaatcctcgtccacgccgcaatcctggaagctcttgttcataccgagcttgttatcgcggtagtcctcgacagccttcgccaggttctccacggcttcggccggggtcttgccggtgtcgatgccgaggttgcgggcgatgtcctggtagcgctccggggcgatgtacttgttgtacttcggccaagaggtgggctcctcaggaatctggccgttgtagcgaatcacgtacggcagcaggatggagttggtacggccgtgggcgatgtggcacagggcaccgatggtgtgggccatgccgtggcacatgccgaggaacgcggagccgaatgccatgccggccatggtggcggcgttgtgcatcttctcctgagcgtcggtcttggccaggccgggctcgccgttgacggactcagccaggttgtcccagatgagcttggccgcgtgcagggccatgccgtcggtgaagtcgttcgcgtacacggacacgtatgcttccatcgagtgggtcagggcgtcgaagccggcgtcggaggccagcttgcgcggctgggtgcgagccagcaccggatccacgatggccacggacggggtcagcgcgtagtcggtgatcgggtacttgtagccggtcttgtgatcggtgatcacggcgaacggggtgacctcggaaccggtgccggaggaggtcgggatgcacacgagcttggccttcttgcccagcggcgggatcttgaaggcgcgcttacggatatcgaagaacttctcgcgcacgtcggagaaggcgatttccgggtgctcgtagagcagccacatgatcttggaggcatccatcggggagccgccgccaaccgcgatgatcgtgtccggctcgaactcctcgcgcatcatctccgcgcccttttcgacggtctcgacggagggctccggctcgacgtagtcgatgatgcggaaggtcacacggttggagcgggcgcgcagctggtcgatgaccttgtcgacaatgccgagctgctccatgaccttatcgcacacgatgacggccttctcgatgccgtacatgtcgcgcaggtacttgatggcgttcggctcgaagtaggtcttggccgggatcttgaaccactgcatgttgttgttcctccgagcaatgcgcttgatgttgacgagattcacggcctgcacgttgccggacaccgagttgccgccgtaggagccgcagcccagggtcagcgacggggcgatggcattgtagatgtcgccgatgccgccaagggaggaaggctggttccagatgatgcggcaggcgtgcatacggacgccgtactcacgcacgagctcctggttgttggtgtggatggcggcggtgtggccggcacccagcttgagcatcttctcgcacatctcgaaggcctgctccttgttgtcggccttgagcacggcctgcaccggagcgagcttctcgtgggtcagcggctcgtcgtcggagacttccttgcactcggcggccagaatggtggcgtcggccggaatctcgaagccagcagccttggcgatgaactgcggggacttgcccggcaccacggagttcagcacgggcttgacgccggaaccggcggtgcagccgaacatgtactgctccagcttggccttctcttcagcgttgacgaagtaggccttacggaccttgagctccttgatgagctggtcgtagacgtccttgtgggcgatgatggcctgctcggtggcgcagatcatgccgtaatcgaagtgcttggagagcaccagatcgttggcggcacggacgatgtccacatcggaatcaacataggccggggcgttgccggcacccacgccgagggcgggcttgccggaggagtaagcggccttgaccatgcccggaccgccggtggcgaggatcgtggccacgcccgggtgctgcatcagcgcgccggtggcctggatggacgggtgctcgatccactggatacagttctcgggagcaccggcctcgatggcggcgtcgcgcacgatcttggcggcctcgacggagcacttctgcgcgccggggtggaagccgaagacgatcgggcagcgtgtcttcagggcgatgagggacttgaagatggcggtggaggtcgggttggtaaccggggtgacaccggcgaccacgccgacgggctcggcgacctcatcgatgcccatcacgtcgtcttcgcggatgatgccgacggtcttctggccggccaggtagttggtgacgtgctcacaggcgaagatgttcttggtggccttgtcttccacgagaccacggccggtctcgtcgacggccatcttggcgagaacgaggtgcttgttcagagcggcgatggaggccttggcgacgatacgatcaacttgcttctggtcgaggttctcgaattcgtcgagagccttcttggcgcgggcaaccagcgcgtcaacttcggcctcagctgcggcctgcttctcttctggggtcggattggcagcttcgactttcttctttgcttctgccacttggggtcctcctcgatcttcttggggtatatggcaaagttctgggccatcgccttgtcacctcagttgcaccagcgggataccgcctcagtaaccgaaaatgaccggtgatgcgttgtcacattgcatatgtgacttgagtcacaatataccgaacggtccggcgcgatgcatacgcacaaaatcgacggcgtttcacgtgcgatattgaacagtttttgttaagagttgtgcgaaatatcgaacaaatcctcactttattcggcgatttggtactttttgttcactttttaccgaaaatcacatgcttgcaaacaacgcaatccgacaactttcttaaatcaagtttccaaaagtactcattttccccacatttctagaaaattggtttaaaaaagtgcccaaaatcgcctacaaatatacgattgttgcctcataatctccgcgtcgaggcacatgaaagccactttcataaagtatacttacatatatctcatcgtacaaaggggtaaatatgagggcaatgccatcgaccgcagtgaaagcgcacaaccgcagtgccatgacccagtatctgtatggccatagccatgtcaccaagcaggaactggaacgcgaactcggcctcagcctgcccaccatcacccaaaatctgcgcgccctagaagatgacggactcatccgcaaaggcgaactgcaggattccaccggcgggcgcaaggcgcaaaattatgagttcaatcccgatcatcgcactgccatcggcgtagtgatacggtccaacgaactgcgcctgtgcgcgattaacctgtacggcaacgtcatcgaaaaacgcaacgatgccctgccttaccgcaacaccaacgtttactaccagcgtatcggcggcatcatcaacaacttcgcctccgacgtcgaaaagaagcacggcaaagtgctcggcgtctcgttcgccatccaaggcatcctctcccccgacgccaccaccatcaccttcggcaccattatgggcaacacggggcttacgctcgaaaccatcagccagtcggtccattacccgtgcatgatgatccacgattccgatgcctccgccatggtcgagctatggttcgactccacgctcaccgatgcggtgtgcgtctatctggagcgacgcccgggcggcgcggtgatcgtgggcggcaagctgtatcagggtccgaatatgtgcaatggcgccatcgaacacatgacgctggtgccgggcggccgcgaatgctactgcggccagcgcggttgcatggacacctactgctcgccggagaccttgcccgaggattacgaaagtattcccggcttcttcagcgtgcttgagcagggtgaacggcatcatcgcgagcgcatggacgaatggctggattacgtggcgcaggccatcgtcaacgcgcgatccatcatcgcgggcgacgtgattgtcggcggtgaagcagcccagcatcttgaagacagtgacatcgaggatctgaaggcgcgcgtcatcgcacgcagtccgttcggcaccgaccatttcaatctgcgcaagagctactgcgccgaagaccagaacatcatcggtgccgcattgcgattcgccgagaattatctcgacgatatctgtggtgctgcggaacgcggcaggaaatcaagggcttacaccagaagtgacaacacgtctacaatggaggtatgaaaaacccaccgttgcatcgttacgccactcgcccagggctgtacttcactgacgacggtggggctgacgtcgttgttcgttccgaaactgccgatcaggtttggctgtgtgtgctggagcccattgacgagcccggcgccttcttccaagacgccatccgcctgttcgaagacccgaatgcctcgttcatccagcagatccatgagtttccggtgtgcacgcgcattatcgaacatttgtatctgcgcgagaccctgttccgcatgaccggaccgaactacggcctgtggtacgtgcacctgcccaaagcatgggacggcatgcgttatggctaccgcgtggacggcgcatgggacccgaaacacggcgtgcgcttcaatccatacaaattcctgcttgacccgtatggcaagggcatcgacggctccatggagctcacccccgccgccttctcctatgaatgcgatgtcgtggaccacaaggtaaccggctcggcatacggtgccatgagcaccgtagactcgctcggccatgtgccggtatccgtggccatcgacgatcgcgatatccataagcatgagggcgacccgcagcacccgcatgtgccgtggcgcaaaaccgtcatctacgagatgcatgtcaaaggcttcaccgccaacgcgccgtggctgcccgaagcgttgcgtggcacctacgccggactcgcccaccccacaacgctcgcctatctgcagggattgggcatcacctccatcgaactgctgccgattatggccaagcaggacgagctcttcctgcaagaacacggccgcaagaactactggggctactccaccctcagctacttcgcccccgaaccctcctatgccaccaaagcagcccaagagaagggcgcggccgccgtgcgccaagaagtcatagacatggtgcgcgcgctgcacgaggccggcttcgaagtcatcatggacgtggtctacaaccacacatgcgaaggcggcgtcgaaggcccgacggtctgctggcgcggcctcgacgacctggcctactatcgccatcaaaaatccaataccggtcgactcgaagacaccaccggttgcggcaatacgctggacttcaccaacacgcatgtggtcacctttgccatcgactcattacgatactgggccaagcgtatcggcatagacggtttccgtttcgaccttggcgtcacgctggcccgcctggaaggcgaattcacccatcatcacccgttcctctacgccctgcgttccgatctgctgctgggcaacctgaagctcattatggagccgtgggatctaggcaacctcggctggcgcaccggccaattctccgtgccgttcgccgaatggaatgaccgcttccgcgacacggcccgcaccttctggcttgaggatgtggacggcggctccgatttcggtcgtatcagtttgcaggagatggccacgcgactctgcggctcggccgatctgttcgccaccgaacccgggcgcggcgctccggcctccatcaatttcgtgtcctgccacgacggtttcacgctgacggacctcaccagataccgctccaagcacaatgaagccaacggcgagaacaataatgatggctcgtcggtgaaccattccgccaatttcggcgtcgaaggcgtcaccgatgatccagacgtcatcacggcacgcgaacaggcggccatgaacatgatcggcatgctgctgctctcgctgggtacgccgatgatgctcgccggcgacgaattccgcaacacacaggacggcaacaacaacgcctactgccaagacaacgacatcacgtggctgaagtgggattggatgtattccaccaacaagacacgcgaaatgcgtcgcctgaaaaccgtgtctcgactggtggcgctacgtaaatcactggacctgtatcaccacgaggacttcttcacccgactgacccaactcggcctactcaagccctcaagccgcgtgcagtggttcctgcccgacggcaccacgccgatggagcgtgactggttcgatctgggcgtacgtagcttcaccatgcgattgctgtccaacagtgaggtggacgtgtgcattgtggtcaacggcaccgctgacgaccgcacattccacctgccgccagacactcactggacgcctaaatggtgctcggccgaaatcaacggccgccgagccgggcatggcattcaggtcgaggaatgcgatttgaacgatgacaccaccgtttggacgcagcatgtaccggacgccagcgagacggtacgcacgctggtcgaagaagtggccatgcaacgcacggaatcctcgactgaggatgaagcggataccatcgaattcgcgatgccagcaacggatcacgccgcaaacggcacctcgtccgcgcctcgggatgaggtatcagctgatatgcctgatgcccctgtggatgatacgccggacactcccgtcgacgacaatgtctggaccatgccggcgctgagcatcacgctgatgaaacaggtgtgagtcacactcaaaacagcacgacacaaacacaaaggctctccgcggaattccacggagagcctttgtatgctcggtacaggacaagcgaaattaacgcttggagaactgcggggcgcgacgtgccttgtgcagaccagccttcttgcgctccacgacgcgagcgtcgcgggtcaggaagccagccttcttcagggcgacgcggttggcatcacgatcgatggcgttcagagcgcgggcaacgccgaggcggatagcgccggcctggccggtggtgccgccgccgtcaacgaggacgatagcgtcgaacttgccttcgagcttgagcagaacaatcggagagttgacctcacgctgcagcaacttggaggggaagtactcctccagggtgcggccgttgatggtccacttgccgtcacccggaaccagacggacacgggcgacagcctccttgcggcgaccggtgccgtagcccggctcgatcgcggaggtgccggtgccagcgccagcgttggtctcggtggtgtagttggtgagctcctcttcggtctcgacaacctgggagtcgttggtgttttcagccatgattcttatctcctctcaggtttcacttggcctgctgcgagacctgggcgatctcgaagacctggggcttctgcggggtgtgcgggtgctcggcgccgcggaagacacgcagacggtcgagctgcaccttggccagacggttcttcggcagcatgcccttgacagcgttcttgatgatgcgctcggggttcttctcgagcagctcggcgtaggagtcacgacgcagaccaccgggacgaccggagtgcgagtagagttccttgcccatcttgttgccagtcagagcaatcttgtcggcattgatgatgatcacgtggttgccggaatcggcgtgcggagcgtaggtcggcttgttcttgccgcgcagcaggattgcagcctgggtggcgagacggccgagcaccacgtcggtggcgtcgatgacataccagtcatgagtcagatcagctggcttcggagtgaaagttttcactggattaccttttctatattgtgttccgggtctcagctgcttggcgtggcttggtcagggccgcatccaagaggcatcgaacctcattatccgtgggctccctgaaagtcctcgatggcgagtgggatagcgctttgaaggaccccttagggaaacacaacaatccactagtatatcgccgggcttgacatagggcaactggggacactccattgggtttatggcttctcttcccctatttatggtttctcttccacccacttcggctaaccgactcgcctacggtgaggcaattccctgccttctctcagctatcgcttcgttcaggcctcgtctacggacagtccactggactgtccgcttaacgactcggctcgtcagagggagataaagtgggtcaggaattgaagatttgggcgaagcgttggacgccgggggtgtcgaagagggtttcgagcggtaccacgttgcccttggcgtcggccagcgggatgcgccagttcgggtattcgttgttggtgcccggctggttctgcgcgcgcttctcccccaccgcgtcggtgatcgaggcggcgagcagcttgcacggcgaacccttcagtgcgcggtacagcgcgtcgatgatatccgcctcgtgatcctcacgatgttcggcgaagtcggcatcaagatagccctgctcgaccagcatgaccagcatcgcatcctgctcggcctttgcggaggcttcgaattcctcagccgggccggtcagcaagcccagacgctcacgaatcttgacgtgctcgtattccaggtaaccggcggtcggcggcaaatcgtgcgtattcacggaggccaatgcgtacggacgccactgggagggggcgcggaacacgccgtcgcactgctcgaaccattcaacggcgcaaccgagaataccgtggctcgacagggaatcggccacatggtccggcaccacgccgaggtcctcacctacgaccacgccgccggcgcgagaggcctcgatggccagaacgcccagcatgatgtctgagtcgtagtacacataagcgccatccatagccgaccggttctcgggaatccaccacaggcggaacaggccgagaatgtggtcgatgcgcaccgcaccggcacgggcgaacatgccatgcaccatattgcggtaggtctcgtagccggtggcctccagattgatcgggctcagcggcggctggctccagttctggccttgctggttgaacatgtccggcggtgcaccgaccgtggctcccttggcgaagcgctcgggattccaccacacgtcagcgccggaggggtgcacgccgacggccatatcggacatgatgccgatatgcatgccggcgtccttggctgcctgctgggcggaggacagctgctcggcggcaatccattccagccagcggtagaagtccaaagtgtccgggtactgcttgcgcagattggcgatttccggggagttgcggttgaacttgcgctcccagttgctctcctcgccgttgggtgctccccacttgtcgtagcacaggcaccacgtggcatacgcctccaagtcggaaccgcagtccgccttgaattggtcgaacgcgctttggcgttcggcggtacggccggccttgaagataatccacagggcgtgcatcttgctgcgccacatggcgtcacggtcgatgagctgggaatcaccgttcagcggttcggtgtcggcatgcagtccgtcgacggcgttcttgtcgcccgcgctgagcgtggcatattcggcgatcgcctcggggcggatgtacgtgaagttgatcaggcgacggcttaccggcagatacggcgacggggtgagcggggacaccggctcggcggcatgtaccggattgatgagcacgaagtcggcaccggtcttctgcttggcgtccaccagcatggtcttcagatcctcgtaatcgcccacgccccaggagttggaggagcgaatcgagtacagctgggccatccagccccacagactgccgcccttcatcgggtcaagcagatcgacgcgatcaggtgcactgatcaaagtggcgtcttgcacacggtcggcgaccttgacgtgcagcgtatggtagccaatcggcagatcggcgggaatgaccacagccgcattcgaaatgaacgtgccatccaagtcgtaggcctgggatccatctccaggaccaacttcaacggtgccctgatatggctcgccgttctccagcgtgatgctcgccgaaggcacgtccagaatgccggtgttcaccagcacccggtcctcgctaccggcgatatgcagcacggtgggtgccaccaatcgggagtaacgctcgttcagaatgcgtcggatggcgatgagttgggcgttctcgctggaggcgtcgatgcccagcgctgccagcacctcgatcaggacgtcatcgtctatctcgtggtagtcatggctcatgcccacataactcgtgccgacaccgaccaacttggccagtcgaatcaacggacgggccagacgctcttcactctcggtaatctcactcatagccccagtctaacgccgtttgattgcgccacaccgtaagcaaaatgccgtgattccgccaaattatgtactttttaccctcacatagtgagatgtgagcgctcacaatggtgaatagagggtgattgccggccaaatttgcacggcaaaacacagcaatagtgtgcttagcggcggctttccacggcgtgccgcacctcggccgaggggtcgttggccaatttggcaagcatcgcttcggacgtattggggttcagcgccacggcacggcggaccatcgaggaaagcactgccggtgctccctcttcggattcggtgccaagtacgcccaagaaatccaatgtctccgcatccgcagtggggtcctgcgcaccctcaagccgcatcttccagctggtgcgcttgtttttcaacgccgtatcccggaccgcaggtaccgggtccttggtcaggcggccgaccagccaattcttgtcatccccgttggcggccacggcttggcgcacggacggttcggggtcttcggagagtttgaccaatacgttcgggaacggcatggtgtcggcgaggaacacgcgatcggccaccggggtgtgcgggttgccggccacagcctccaaaagtgcggtggcgcgggagaacgccgcctgatcggcacggtcaggcaacggccgacgggcgaattcggacagttcggccgggtcggtggaatgacgcagacgttcgtatgtggcggtcagcggttcgaaatccaccggagcggcggactcggctgcggcctgcgcgccttggtcccgctgttgggcgcccgtgtcgattgcagtctcggttgcggcctcggtgggctgggtccgctggctggtggtgttctcgtcggtcatgatgcccagcttagtcatacaggcgtcacgcgaacggaatcggaatgttgaccacgtcaatcgggtccggtaccaccgcggcattgaacgcttcccgcacacgctcctcgaatcgcacgcaatcatcttgcggcaccaccgcggtcaactcgacgttcaccgcatacgattcatcctcctggttgccaccgagctgcgccaggatctgctggaatcgtgccagctgcgggtattcgagacggacccggtatcgcttggcggtcatgatgcgggcggcgcgggcggctttcatcgccaatgatgcggcggatgagtacgcgcggaccagaccaccggagcccagcagaatgccaccgaaatatctggtgacggcaactacgcaatcggtggtgccggactgcttgagtacgtcgagaatcggcttgccggcggtaccggacggctcgccgtcatcgctcatgcgttcggacagtcgcccatccgcgcctccgcacaaggcggcatacgccacgtgtcgggctttcggatgctgctcgcggatcgcggccacgaacgcgagcgcctcgtcgagcgtatcgacatgggcggcgtcgccgatgaattcggactttttttcgacgagcgaatcgtgggcgggatcgtcggacgtgttgagaatcgtctgcataagcgtgttccggtggtcggctgactgggtgttcgattgagcgcgaggctagacaggactatcagtgttcggagacgacgacgttatagtcctcgccggcgaagtaggcggtcaggcaggcgatcatctggcgggtgagctccttgaacgcgccgtcggtacgccagccgacgtgcggggtcaggacgatgccgggcacatggcagatggcgtcgtcggcggtcagcggctcgtggtcgaacacgtcgagtgcggcgggaacatcgcccttttgcagtcgggcaagcagcgcaccggattcgatgacttcggagcgggcggtgttgatgaacagggtgccgggcttcacatgcgcaaggttctcggcggtgacgatgccgcgcgtggcgttgttgagcggcagatggacggagatgacgtcgctggtttcgatgagctcgttgagatcgtcgaccggagtggcgccggagcgttcgaaatgctcgggcggcacatgcgaattccatgcggcgacctccatgccgaaggcgcgggcgatgccggccacggtggcgccgatgccgcccagtccgatgatgcccatgcgacggccggcgagttgcagtccatcgccgccggcccacgcccagttgccggccttgacatccttatcgagttggccaacgcggcggatgagctcgaacaggagggcgaaggtgtgctcggccacggcgtgatcgccataatgttcggcgttgcagacgcggatcttcagctcgcgcgccttatcgagattgatgtagctggcgacgccggtaccgcagaacacgatgcacttgacgtgcccctgctcgctgatggtgcgcagcagatcatccgaaatgtggtagccgcccaccagcagggcgtcggcatccttcagacgctcggctatggtcgcctcgtcggacgtgaattcctcgaacatacgcacgcgggcaacgtcgtggagcgcggggaactgggccttgatgggctcgatcatcgcgtcgagcacggacggcatcacgacgagaggcagatcggtgcgttcgctttgggtttcgtaaatctcggtcatgggctccacattaggaggccgacgggaaaagcgtcaccttgcggcttcccctccttgagaccaagccgagcaactattgctttgccgcctgctcctgcgtgatgttccattccttgacgacgttctggtccgcgcccatcgaatagatgacatcccagatgcgttggcgtatctgagcgtcgtaggcttcgtcccaacatgtgcctatgggatggtcgctggatatcgggcaccactggtagttgccttgatgcacgttggcggtgggcacccagtcgatgcggttgacgcgccacgaccccttgacgcccttcttgccggcgaactggatgcgtgcggtcacaccctggttgttgaccaaggtttccggcgtgttcgccgactcggtgacggtgttgcccagaccgtagacaatccacgtgccgttatagttctcgatgggctgcgcacaatggcatccggcaccgtagataacgtcgaaggcaccagtgtcggcaagctcatgggcttccgaaatctgccaggaatcggcgtaatcaaggtattcctgcaccgagtgcatggcgatggccaccacatcggcaccttgctcgcgggccttgttggccttgtctaccgcgcgctggatgtcgctgccgtgattcgggtcgccgtcttcgcgcagacgatccacctgccagtcctcgtcggcggtcatgccgttgagggagaccgtgccggtgaccagacccagcttgccgccgccggtcggggaatcgatgactaacggtttggtggagtcggcttcggttttgtacgagccggtctgggcgatgccatcggcctcaagcgtgtcccacagacgggcgatgccatccgccccctgatcccaggaatggttggtggcgtgtgtgcaggcgttgtatcccacgttgcgggcggcatccgccacttccggcggaatgttgaagatcgggtacgcggcatatgggccgccgcgctgggcgatcggggtttcgaattcgcacacggcgatgtccgaagcctgaatgtactgcttcatcggcgcgaacagcgggtcgaagttgaaggcggtgccatccgtggcgttggggttcgggccttggaaatggctccacaatccctcatggaacaacaaatcgccgttgaccagcatggcgatgcagtccgtatccgggcaatccggtgaattgccgtgatgttcggtcaccggtttgggcgtgttcttcgctttattcaacgcgacgtccgacactccggcgcgtgcggggccattgccgtccgtgcgatgggttgcgaaccatgcgccgatgcccagcgtaacggcgagcgcgatcacgaacacgataatcagcgccgcacggttggttcgtgtcgagttggagcgatgttgcccctgcccagcgatatggctcatctttgcccacccttcggaactcttcttctctctctaggataccgcccatctcagtcaaacactgcggggaggaaggcgatgggcaagcgattggacaagcgacataaaccggttaatcttcaatcaccattcacgaacaccacgcaaaagtctcacttagtggacattcttctttcgtttgttagccttttccccgaggtgccgcactcgttcacccgctaaaatggcggtttggaggcggacggacaatggcgtacctccgactccgcttaccacaagcggagaccgaccgtcctcggttatttcggttatttctagcgacacattcccaggaaagtttcgcaaaacagacccccaagcaacccactagaaacacattcccaggaatgcgtcgcaaaacagatatccggacaacccaccagaaccgtattcccggggttcgaatccctctgactccgcgaagtgcgaacaggcccatcatcaggagtttccggaaaacaaaaaagattccaagctttcacccggaaccttaatcggcggagtcagagggattcgaaccctcgagccgtttacacgactaacaccttagcagggtgcccctatcggccactcaggcatgactccacgttacgcaataatgcgcaacagcaaattactgtaccacgtcctgcggatacggcgtgccgaacgacacattattgaccgtccgcgggcgcggcatcgccggagaacgtaacgataaccgcgcaaatcaccaacgccacaccgatgatttcaccaacgccgggaatctcgccaaacgccagtcccacggccaccgccatggcgggattgatggattgcattaccgaaaatgcgccggatgtggtgcgtcgcagcgtgatctgctccaccacatagggaatgaacgaggccatcagggaaatcacaaacagcagagccagcagcttcagcgagccgccgggctcaagcgcccacgtggcatcggccttggggtgaaccacatgagccacagccggcacgccaaggaacagggactggaccagccagccgatggtcacggcgatgcacagattatccagcgaattgccgccagccgccacgcgccggccggtgatgatgtacatgccccacatcgacccgccgatcaaaatcgcaatcagaccatacaaaaacgtgcccttgccggacggattggccaatgatatgccggccaacagcaccacaccgaccgccgcgatgccgataccgacccgctcacgccagcttttgccggtaatcaccgccaccgaaagcggtcccaaaaattcgatagacacggcaatgcccatatccatattgctgatggccacataaaacagggtattcatcagcaccagcgagcagccgagcagtacgaccagcccccagccgcgggcgtcgcggtgaaacagctgcgctcgcttagccttgctccagggcctgcaccacagcagcaacagcaccgccatgaatcccacgcggtaccacaccgaatacagcgggtcgagctgggtgaacgcaagtttggcgacggccgtagccaaataaatcaccagtgcctcaccaatcacgataagcaccacgggaacacggttgaggataccgaccactgccttcttcacgaggtttacgctactcggcgagtcgggacagcgcgcagcgacttggaaggcgttacggacagtgacgcaatgtggacgattccgtggaatcgcacccaccatgcgaaacagccgcacagtgcgcaaacccttggaattccggcgatatttggcattacgacaatgagcgccgcgccatgcgcgccacatagtgagcatgacctcgttcggcattcctacaatggtggcatgagcaccgcaccgagacttgaggccgccaaacgcgattggggccacgacgagaccggatgcaccgtgctgcatatcgacatggatgccttctatgcctcattggaggtggcgcgcaaccccgggctcaaaggcaagccggtgatcatcggcaccgggccgcgcgcggtggtgtccgccgcgagctatgaagcccggaaatacggcatcaattcggcgatgccggccgcgcgcgcccatcagttgtgcccgaacggcgtctttctgccggtggatatggcgtattaccgcatgatgtcgcaccgaatcatgcacgaggtgtttttgaccgtcaccgaccggttcgagcaggtttcggtggacgagggctatatggatgtgtccgccgcactgctggagtgggggcggccgagcgcgatcggcgcgtggattcgcgctcaggtggccgagcgcttccacgtgacgtgttcggtgggcatcgcctgcaacaaactggtgtccaaaatggcctcgaccaatgccaagccggacggcatgctgctgattccggcggcccgctcggctgagttcgtgcagatgatgccattgcgtggcattccgggcatcgggccgtctttggagaagcggcttaatgcttggggcgtgcattcggtggctgaattggctcagctggatgaggctgcattgactcgtgccactggctccccggctgcggcacgtggattatgggcggcctcgcacgggttggattcccgcaaaatcaccacggtgcgcgaggagaaatccattgggtccgaggaaaccttggccgaggatacacgcgatatgcgcgtggtgtgtgggctactgcgttcggcctgcgacgatgtggccagcacgctgcggcgcaaggggctggtggcgcgcacactgacggtgaagttgcggttcgccgacctgagctatcagacccggtcttttacgatggagcggccgaccgatacggccggcgtgctgtacccggaatgcgtgcggcagctgaaagtcatgctggggctaccggcctcggcggagtctgccactcccctgcccaaaactattcgcttggccggtatgagcacgtcttcgctcagtgaggcggcggctacggccgtgcagccttcactggatgacatgctcgaagaggccgacaatgcccgcggc

SEQ ID NO: 1603 - DNA, 20526 bp, Unknown
  R221_24m  MAG No. k141_51821
ccctctaccaggaaccagccctcgtagcctgaaccgggccacacgggaaaggacgccggacgccaccggcagggcgaagcgcgcccacgacagccaaccggaatcccgacacgtcaactccccaaggagttgacaaaaacataggaacacccccctagtcgggtatcgcgccggcaacctgaaaaccgataatgttggcaagtgcttgcaatttgtggtggacgattgcaagctaacgtcttggattgttgccgctatccaatatctcattaggtctaccggtggaccaaaagtacgttgctttgtaaggggagttaatgaaatgaacaaacccgcacaatcgagcatcgaatcggtttaatgccactcacctcaacgggacgcgcggtaattgttagctaagttgacaataaaagagcaaaggcctaaattagcaatcagtcatcacgctgaggtgatgatttcactaggaaggagtagagatatggtatcgcacaacaagcgcatcgtggctgctcttgccgcggtagcagcaatgggtattggtttggccggttgcggcggcagcgacactgccggcgacacgaagtccggcagcgatggcggtgtggtcaacatcacctatatgcatcgtctgcccgattccgaaggcatgaccttggtcaacgacattgtggccaagtggaacaaggagcacccgaacattcaggtcaaggccaccaagttcgatggcaatgccgccgacatgatcaagaagctcgagaccgacgtcaaggctggcaatgcgccggatctggctcaggtcggttactccgaggttcctgaggtcttcaccaagggccttctgcaggatgtcaccgatgaggccgccaagtacaaggacgatttcgcttccggcccgttcgcactgatgcaggtggacggcaagacctacggtctgccgcaggacaccggcccgctgacttacttctacaacgccgctgaatttgagaagctcggcatcaccgtgccgaagaccgctgacgagctcattgagaccgccaagaagaccgctgcccaaggcaagtacatcatgaccttccaacctgatgaggccatgatgatgatgtccggccaggccggcgcttccggtccgtggtacaaggtcgacggcaactcctgggttgtcaacacccagactaagggctccaaggccgtggccgatgtctaccagcagctgatcgacaacaaggccgccctcaccaacccgcgttgggatgcatcgtttgataactccatccagtccggtcagctgatcggcaccgtggccgccgcttgggaagccccactgttcatcgattccgccggtggcactggtgctggtgagtggaaggtcacccagctcggtgactggttcggcaatggcaccaagaccggcgccgatggtggttccggtgtggccgtgctcaagggttccaagcacccggccgaagccatggagttccttgactggttcaacacccaggttgatgaccttgtctcccagggccttgtcgtggccgccaccaccgcggatgccaagaccccgcagaagtggtccgactacttcagcggacaggatgtcatggctgagttcaagaccgcgaacgacaacatgggtgacttcacctacatgcctggcttctccgcagtcggcgctgcaatgaaacagaccgccgccaaggctgccgatggttctgccaaggtttcggatgtgttcgacaccgctcagaagacctcggtggatacgctgaagaacctcggtctgtccgtcaaggagtgacctcactaggtcttgtcaacgggccggcttgaaatggccggccgtccaagacctccgatgcctcgcatcaccatagcgaaaggccggggcacatactccggccttccgtattgtttgggggtattgctgcaggggcgctgtggcccttgtcatttgttttactgttctttgcgaagacaggttttgtattatgactgcatccactactcaggcgaagggcaaagcacctaggcgtgccgccgccaagccgaagcggtccggcgctcagaagcgcgagaaccgcaccggctgggcgttcatggcaccgttcgccgtcctgttcactttcgtgttcatcttgcccatcatctgggccatctattccagcttcttccgtcaggtcaccgagggcggtggcgcatacggcggtggcgagctggtcaataaattcgtaggattccagaacttccagtatgctattacttccggcaacttctggtccggcgtcggcagggtgctgctctacaccctgattcaggtgccgatcatgatcatcgccgcactggcgttggccatcgtcatcgactcgttcgtggtcaagcatgtcaccggtttccgtctgggctacttcctgccctacgccatccccggcgtcgtggcctcgattatctgggtctacctgtacaacggccaaatctcgccgatcgtcaagggacttgccgccatcggcgtcaatgtggacttcttcaacaagaacatcgtgctcggctcgatggccaacatcaccacatggaccttcaccggctacaacatgctgattttccttgccgcactgcaggccatcccgcatgacctctatgaggccgcccgtatcgacggcgccaatggttggcagattgccacgaagatcaagctgccgaacgtgcgtggcgcggccctgctggccatgctgctttccatcgtcggcaccattcagctgttcaacgaaccgcagatcatgtctacggctgatccgggtatttccaagtcgtatacaccgatgatgatggccatgaacacttctcagggcaccattaccccgtctggtgacggtccggcctcggccatcgccattgtcatggctctgatcgcaggtgtgcttgccgtgctgtacaccttggccgaaaggaaggtgaacgagtaatgagctccgcaaccgttgaagaacgcgcccgcaaaaaggccgagcgcaagctcgaaaagcagcgtcaggctgcgcaacacgatttgcctcgctccatgcgaccgtccgcggccgtgaagaccctcaccgtggtgctgctggtactggtgttgatctacttcctgttcccgatttactgggccatcatcgcgtccaccaagacgccggcccagatgaccggtagcaacggcatgtggtttgctgtgccgcttgaccagctgcccaatgccatcgccactaactattccaaactgcttggctggactcgtggcaacttctggcgctgggtgctgaactccctgatctactcgggcgtctcggcattgatcggcaccatcgtgtctgtgatggctggctacgccaccgcaaaattcaacttccgcggcaagaacgcggccatcggcatcattatggcctgcatgctcatgccgtccgccctgctgaccatcccgatgtactcgatcttccacacgttgcacctgaccaacactatgctctcgatcatcatcccgtgctgcgtttcgccgttcggcttcttcctgggccgcacgtacgcacagagttcggtgccggacgaactgcttgaagccgcccgcatcgacggcgcgagcgaggcgaggatcttcttcaccatcgtgctgaggctcctggccccggccatggtgacgattttcctgttcctgttcgtggccacgtggaacaacttcctgctgccgttgatgatggtgtcttccgacaccttgaagcccgtgaccctcggtctgtacggcatggtctcgctggccacgttcaccgatcgcggcgccctgatgatgggtgcgttgctcggcgtgctgcccgtgatcgtgctgttcctcggcctccagcgctactggcagtccggcctcgccgccggtgccgtcaagggctaaccaatccgctgcccggcatgtcgtgtcactccttccggtgccgggcaacgtccctcccatattcagtgacacgattccaatcgtccggcgtcaccgtaagcgtcaaggatctacgcagtcagggtcccagggcccgcgatgacgccggtcattttgtatgcgacgaattcgtcgctttgtagttttttgatgaccaaccccacaaaggagcactcatgaccagcaccggccgcttcacgctgcccagtgaagagaattttgccgaaaagaccaaggaactcgccgaattgtggggtgcggacgccatccgcaactccgacggcacgcatctggacgaggcagtgctcgctcttggcaagaaaatctacagcgcctacttcccgacccgcgcccacaacgagtggatcaccctgcacatggacgagaccccgcaggtctacctgctgaccgcccgtatcctggccgagtccaacgcggtggatgtgccgctgatggacggtctcttcgaggaacagctcaagcctaaccgtgacgccgaccctcataagtactgggaagtcgtggaccgcaccacgggcgaggtcgtggacccgtccggctggacgctcgacccgggcgaggacaccgtgcacgtgaccgctgccgtgccgatgcacgaatacacggtgagtttcctggcctacatcatctgggacccggtcgagatgtacaaccacctgaccaatgattggggagacaaggaacacgagattccgttcgacatctaccatccggccacccgcaagttcgtgttcgatacgttcgagcagtggctgaaggacagcccgcaggtggatgtggtgcgtttcaccacgttcttctaccagttcacgctcctgttcgatgccaagcgtcgcgaaaaggtggtcgactggttcggttgcgcctgcaccgtgagcccgcgcgcattggacgatttcgagaaggagtacggttaccgtctgcgtccggaggatttcgtggatggcggtgcctacaactccgcgtggcgcgtgccccgcaaggcgcaacgcgactggattgacttcctctccggattcgtgcgcgagaacgtcaagcggcttgccgacatgtcgcacgcggcaggcaaggaagccatgatgttccttggcgaccagtggatcggtaccgaaccgtataaggacgggttcgaaaagctgggtttggatgcggtcgtcggctccatcggagacggcaccaccacccgcatgatcgcggacattccgggcgtcaaatacacggaaggacgcttcctgccgtacttcttccccgacacgttctacgagggcaacgacccgagcatcgaaggtctcgacaactggcgtaaggcccgccgcgcgatcctgcgttcgccgatcggccgtatgggctacggtggctacctctccttggccgccaagttcccgaagttcgtggacacggtgacccatatcgccgacgaattccgcgacatccacgaccgcaccggtggggtggccgccgaaggcgagctcaacgtggcgattctgaattcctggggcaagatgcgttcctggatggcgttcaccgtggcacacgccctgcccaacaagcagacctactcctactacggcattctggaatccctgtccggcatgcgcgtgaacgtgcggttcatcagcttcgacgacgtactcgcgcatggcatcgatagtgatatcgacgtaatcatcaacggcggcccggtcgacaccgcattcaccggcggcgacgtgtggaccaacccgaagctcgtggaaaccgtgcgcgcctgggtgcgtggtggcggcgcgttcgtgggcgtgggcgagccgagctcggcaccgcgcttccaagcgggccggttcttccagctggccgacgtgattggcgtggacgaggagcgctatcagaccctctccgtggacaagtacttcccaccggtggtgccggaccacttcatcaccgccgatgtgccggtcgacccggcggcccgcgaggcttgggaacaggccggctaccgcatcccgctgagcggttgcggcggtggccagtccatcaagccgttgggcggcatcgacttcggcgaacccgtgctcaacacgtatccggtcaatgaaaacgtgaccctgctgcgcgcggacggcgggcaggtgcagctcgcgaccaatgattatggcgaaggccgcggtgtgtacatctccggtctgccctattcggcggccaacgcccgactgctggaacgcgtgctgttctacgcctcccacaacgaagacaagtatgcggcttggagctcgtccaacccggagtgcgaggtggcgcacttccccgagcaagggttgtactgcgtaatcaacaacaccgatcagccgcagcggaccacggtgactctggccgatggcaccaccgaggacttcgacctgcccgacagcggcatcgcatggcgtgaagcctgattcccgcgttttggagaacggacccatcatgagcgaaagcaatgaagttttattcggcatcgcctcgcattttgcgctggaaggtgccgtgaccggcatcgaaccttacggagacggccatatcaacaccacctatctggtgaccacggacggcccccgctacatcctccaacagatgaacaccagcatcttccccgatacggtgaatctgatgcgcaatgtcgaactggtcacctccactctcaaggctcagggcaaagagacgctggacattgtgcccaccacctccggcgccacctgggccgagatcgatggcggcgcatggcgcgtctacaagttcatcgaacacaccgtgtcgtacaacctcgtgccgaacccggacgtgttccgcgaggccggcagcgcattcggcgacttccagaacttcctgtccgaattcgacgccagccagctgaccgaaaccatcgcccgcttccacgacaccccgcatcgtttcgaggacttcaaggccgccctcgccgcggacaagctcggccgcgccgccgcatgccagccggaaatcgacttctatctgagccacgccgaccagtatgccgtcgtgatggatgggctcagggacggttcgattccgttgcgcgtgacccacaacgacaccaagctcaacaacatcctcatggacgccaccaccggcaaggcgcgtgcgatcatcgatctcgacaccatcatgcccggctccatgctgttcgacttcggcgattccatacgctttggtgcgtccactgctctggaagacgaaaaggacctcagcaaggtgcatttcagcaccgagctgttccgtgcctacacggaaggattcgtgggcgaactacgtggcagcatcaccgcgcgcgaggccgaactgctgccgttcagcggcaacctgctcaccatggaatgcggcatgcgctttctcgccgactacttggaaggcgatatctactttgccaccaagtaccccgagcacaatctggtgcgcacccgcacccagatcaaactcgtgcaggagatggagcagaaggccagtgaaacccacgccatcgtagccgacatcatggaggctgccaagtgagccgtcagtcgaaccatacccgaaccagcatgatgggggccgagcaatgagcgatcagctgaccgaggtatacgccagcatcgacgcccttgtcgattacgccttgaatcatctcgacctcgatccacgcaacgcagactggacccgcaaccaaatcttcgccctcttccacctggattcctaccccggacccaaaaccacaacgtcggcggcgtcagtgtcagacgcagtccaagacattgtcggcagccgaagccaggccccctctgacgaaaagacccccgaccccctactcgccgccttccgcgccgccgccacaaccgccggcctcttcgatccggaggaaggcccggcctacgccgacaccatcatgggcatcctctccgccaaccccgccgatctcgacgaccggttcctgctcatcgagcacagggacggcggcatggccgccatgcaatggttctacgactactgtgtggccaacaattatgtcaagcgtgcccagctcgaccggaacccgcgcttcgactcgcacgggctgacggtgaccatcaacctcgccaaacccgaattcaagaacatgaagaaggcggcggccggcaacgccgtgtccggcggctacccgaagtgcacgatctgccatgagaacgagggcttcgccggacgtgacaagcgcacgctgcgcaccctgccggtcacgctcggcggtgagtcatggttctggcagttctcgccctacggctacttcgaccagcacggcatctgcgtgaacaccgaccacacgccgatgcatgtggaccgcgacaccttcggccatctgctcgacttcgtggaccgcttccccggatacttcctcggatgcaacgccgcgctgcctcgcatcggcggctcggtgctcgcccacgaccactaccagggcggcggcgaactgctgccgatgcacaaggccgccacttgggccgccttcacgctcgccgactatccggacgccgtggtcgaaatcctcgactggcccggtaccgccgtgcgtgtggtgtcgaaaaaccgccagagcatcatcgacgtatccgacatcatccgcgaggcatgggtcggttatgacgacgcggcgaacggcatcgccagccatgacgcggacggcaaccgccaatccgccctctcgcccagcgcgatcatcaccgaacgtggctatgagatgagtctcatcttccgcaacaatgcgatcagcgacgagtacccggaaggtattttccatgcacaccccgaatactggccggtcaagcaggagccgattggactgatcgaagcccaaggcctgttcatcctgcccggacggctcgtcgaccagctcggcatcgtcgaggaggcgctcgccgaaggccgcgatttgcccgatgaagtcagcgaattcagtctcgaatggggcgaactcgctgaaacattggccggaaaccgcgaccgcgaggccatccaccaagccgtacgtgacgagctcggcagcgtctgctaccgcatcctcggcaacacggccgtcttcaagcagaaagccaccacgcaaacattcctcgaaagtcttggttttgccgctaggtgaaacaggtcaagtgaagtaagctcaatactgaaggaaaaccgaaggcaagtccttccaaaggaggagatatgactactgttctggttacgggcggtgctggattcatcgccacccacaccgacatcgaactgctcgacaagggctacgacgttatttccgtagataactacggcaactcgtctcccgtggcgcttgagcgcgtcgagcagatcaccggcaagccggtcaagcgttacgacggtgacgtgcgcgatgaggcgcttatggaacgcgtcttcaccgaaaacaacatcgattgggtcattcacttcgccggtctcaaggccgtgggcgagtccgtggccaagccgatcgaatactacgacaacaacctgtactccacgcttgtgctgctcaaggtgatgaagaagcacaacgtcaagaagatcatcttctcctcctccgccaccgtgtacggcacgccgaaggaactgccgattaccgaggagacgccgaccggcggcaccaccaacccgtacggcacctccaagctgttccaggagcagattctgcgcgacgtacatgtggccgatccgtcctggaccatcgtgctgctgcgctacttcaacccggtcggcgcacacgagtccggcctgctgggcgaagatccgaagggtattccggcgaacctcaccccgtacgtggccaaggtcgcggtcggcgagctcaaggaagtccaggtctacggcgacgactacgacacgcccgacggcactggtgtgcgtgactacatccacgtggtcgacctggccaagggtcacgtggccgtcattgaccacatcgacaaggaaggcgtgttcgtctacaatctgggtaccggccacggctactccgtgcttgaggtcatcaaggcttacgagaaggccgccggtcatccgattccgtacacgatcaagccgcgtcgccccggtgacatcgccgcctgctacgccgacgcttccaaggcggagaaggagcttggctggaaggccgagctgaccatcgacgacatggccgcctcctccctcaactggcagaccaagaaccccaacggtttccgcgacgccgagtgatatgagcagatgagctccctctgatgagggagctcatctgtcgtttatcacacaatgcgcctatcggcggcccagcgggtgagctcggtgcgattcgaaagctgaagctttcgcagcaccgagctcacgtgcgtttcgaccgtcttgatcgaaatgaacagttcggccgccacctctttatacgtgtatccgcgtgcgatcagccgcatgacctcctgctcgcgggcggacagccggtccagctcctcatcatgagcccgtgccgcaccatcagcgccgccatcagaccccgccgccggcacaccctgaaaggccgaaagcacaaaaccggccagttttggcgagaacacggcatagccctcatgcacctgcttgatggatgaaatcaaatcagcgccggtaatcgtcttggtcacatagccctgggcgccggcgcgaatcaccgcccccacatcctgcggcgcatccgaaaccgacaatgccagaaacacggtggtgggggagtagggccgcgatttggcgaggatctcggcaccgccgccaccttcaccgccgggcacgtgcacatccagcaacaccacctgcggcttggtctgtgcgatcatcgccaccgaaccgggcacgtccgccgcttggccgacgatatcgaaggaatcacgcaacgtggcgattacgcccgcacggaacatctcatggtcatcgaccacggccacacgaatcttggctgtctcattctcgctcatcgatgttctccctgcgccgctttcagcgcgattggcatatgcattctgacctcggtgccccagccggccctggacactatctccactgtaccgccgcgccgtttgatgcggccgataatcgattcgcggatgcccagccggtcgggcggaatggcgtccatatcgaagccttcgccatggtcgcgcacgaatacttcaaccatcgtatcgctggcctcgcaatacaaagacaccggctcgccgccatgcgtgaccgcattgaccaacgcctgacgggtggcgtccagcagcgcatcggtctgggcgctcggccgcgcgtcgcccacggtgaccacctcaatcggcttgccgtgctcgtcctccacctcggcggcgatctgcttcaatccggctcccaccgaacgatccgatgtggaacgttcctgatacagccattcgcgcagctcgcgctcttggctacgcgccagggcgaatacggtggtcggttcctcggagtgcagctgaatcagcgccaacgtttgcagcacgccatcatgcagatgggcggtcatgtccgcgcgctcctcttcgcgttccttcaatgcctgctcgtgggtgagtcgttgcagcatcgcgttcgcccacggcatcaccgccaccacgataccgacgatcatcacgaatccgctggcaacaatgcgtcgaggagaggtgccccacccaggaatgctgacattatgcacatacaatgcccatcccatgaaaatcagtgcgatgccgcccaacatagacaacagctgcgtgcctcgcggactaagattcatccatgccagtgcgatgccgcccaaccctaccagtagcggaagcacaatctggacatccgcaccggtgctggtgagcagcagtccggtggccatcaacgcgaaaccggccaatgccacgacggccggtttcggagcacgttggatggcctcggacaatgattccggtgcggcagccgattcgtcgtcatgagcggcaagtggctgattgcctcgcgcaagcggcgcctgatcaacgggcactgtgcgagccgcagccgccaccgggtctccggcgggcatgaacacccacaggaatacataagcgatgatgcctgcgccgtagaggaaggtcagagcgatgaacgcaatccgaacccatgtcacgccgatgcccaagtgcagggcgatgcccttgcacacgccggtgagccagcggccctgccgggggcgcatcagcggcatgcgcgcgggcagcaatggttcgggagatgacgtcatactcctattgtgccgcgctcagggcgttgcggccggggttttacccggtgttcagggaacaatcagggtgttccccgagcgttgtggcagtggtcgggcggtgtaatggaatcatgagcaatccaaacgcgaatccgtatcagccacagccgcagcctggtccgcaaaaaaacaagacatcgcgacgcttcttcacttgggtgcgatccagtggactggttcgcggcgacgaccggtggatcggtggcgtatgcagcggcatcgctttacggcttggctggagccccacactagtacgtgcgttggtgattgtatgtacattgttcttcggcttcggcgcagctctgtacgcactcggctggtttctgatgccggatgtacgcgatgggcacatcttggccgaggacctcattgccggccaatgggactggaattgccttggatgcttcctgttcctagccgtggcaatcgtgattccaggtgcggggtgggtttgtattgcgctcgccgccttagcgctatggttgttggccaaaagcggcattcgccagcaggaagggtacggattcggggcatctgcgccgcgaccggtttcacagcctgtgtcgtatccagctccacagcctgcctcatatccagccgcgcaaccggtccctctatctcctttgtattcagctccgcaacctgtttcacaatctgtttcacgaaccgcgcctagtgtttcacaacctgtttcacagcctgtctatcagtcgatgcccagcgtgatgccgggcacagtgcccggcgcgatgcccggcacagtacccaacgggccgtttgcccccgaccgtatgaatgcgacggtctatgcccccaccgagtccaagcgccgcaagccggcgggcccaatcgtggtcttgagcatactgggccttaccttcctctcctttgccggtctgatgggactgatttgggtaaacgacatgggcattatcggcattatgcgtctgagcaccatctggattgccgcagtatgcatagtgatggggctggtggtcatcattctcggattcagagggcggcgtaccggtggtctgattcctctcggactggttgccggtggatgcgcgctctgcatgaccatcgtttcaggcacgtatggcgtgtactaccgtgatcttggtgccagcggcatcaatactgttgtttcactgagccaatctgtcaatgcgagaaacagcgacggcatgaacgatgtgcaaaaggatggcatcttcgttgccgatgccagcgatgccacgttcgaaacattgcagcaaggtgtggcgttcaacggtgaaaactacaacaccgatcaggcaatcattgattggtccgattgggacaagacacatggaccgcacacggtgaagatgctggatggcaaaacctccatcagtaattgtccggtcggtaccatcaccatagccgcaacacaggcgcaagtgcatatcgttctgccggattcctgcacttacgccttcggcaccgccgactcctacttcacttcgagtgacgtcggcggcaaatacgagatggtatacaacaactacatgggtctaagctttgttttcttcggagctgaaagcgccaccaatcccatgaatgggcctgattacgaatggttggataagggatccgccatgccggacaacggcccagaattaaaaatcaatattccctatgcagtggaagcacgtgtcaacgtgatgtacgcctccgattggaaaggctccacgttccagccgcttgccgatatatacgacggcaacagcacaagcaagaacacaaccgggcaatcggaatgatcaagccgttacaaccaggagatggaatcatgactgatgaaaccaaggaattcgcctccatcgaggatgcgacaccgaccacggccataccttccgaaaccgacgagaccaccgagaccacaaccatggtgaccgtcgatgaccgaaccgataccacggtgctgccatccgcagcggatgatgacaaaacggctgtgctacccgtccccgacgatcatgcggatgcgccggtctcggatgtggatacgcaggcaacagctgcctctccatcgcccatcgaaccatccacagatcggattgccctggaagcagttgccgatgccgtggagggggatggtgggccgattccatctgccgatgatgtaccgatgtacgcagcatcttcagcgcaaccttcctatgagcagtctcagaccgccggcaaaccatgccagcctggggggagcgccaagaacgtccagaatgctaaggatgtcaagagtgccaagaacatccagaaacagagcatcagcgcgcttactgtggtattcggactattaggcgtgattatcggcgtgatcgcgctggttttcgggtgcatatctccggatcggatgatttcgctgttctcgccgaatccgcaattgctgacggctattatctgcgccgtagtgggacttattctggtaatagtggccgttgtatgggccatagtcggtgccgtcaagaagagaaaatagcgttacaaccattgcattacggtcccagtagaagcacattatgacgggagccgaccgataagagccgaccgttctatgctgatggggggaggcatagtaactatgaaacggatttcggcgcggcgggtagcgagcgtcatcgccaccgcgatggcgatgacgctggtattcgccgcacttggctgggcgatgatgccgcaatggaacacacggccctacaccaagcacatcgctatcgcttctgccgacaccaccatcacccctgcccatgcgaacattccccacgaggggcgatatcgtacgcgtgaaacccgactatccatcaagaccggcgacggcgtcacgctacccgccgtactacgtgaaccggtcgacgctcccgggccacgcccggcttgtctgttcattcacgggtccggtaccagcggtgccgaggatttcggcgatatcgccaacgccatggcctctgccggcatcgtgaccttggtgccggccaagcgcaacgacaactacaccgtgctgcatcgcgactacccgcgttttgctcgcgaatacgggcgttcgctcgacgtgctgcgtggcataagcggcgtggaccccgccaaaaccggcatctacgccgaatccgaaggcacctggatcgccacgattctaacctcgaaacggcaagacattgcctttgccatacttacatccgcaccggtgttcaatggacgtgagcaaatggccatggctgtcagcgcctatacgcatgaggccggcgcgcccaagcccgtggtcaaagacatggccaaattgatgtcgctggactacgcgccattcgatctggcctatgccgactttgatgccgaccagtatctgaaatccctcaccatgccggtgctggtgaactacggcacctacgatacggccatgcccatcgaacagggggcgcagcggatcatcgccacggccaacaagtccggcaacgagaacgtcaccgtacgctatttcgccggcaaccatcagatgcgggctggtgagggcttattcaccccgaacctgccattggccgaaggctatacgcaagcgctggaaaattgggtgaacggtgtgactgccggaaccaaagccgatggatgggcaacgccccaagtcgccggtgcgacacctcaccagcgcttcgccgcgccgcaacgtaccagatccggtatcgtcggctcgctcggcgtgctggccggtctgatggtggcagggcccgtgctgatcgtgatggcggcgatattaggtattggcttgactgtgttttcttggctacagacgttgctggccgggcgacgtagtgtggcgactgtgcgggccatgcatgcgacgccgagtgggctgggagccgcccaacagcgtacgttgcacggcattgccggcttatctgccggtatcggcacagcggtgatggtgattaccgtgctgttgtatggctatatgagcgccgtaggcgtatcggctgtattggttatgcctcaaccgcagttgttttcccttgggtggagggcattgcaggtgctgaccgtgctgttggtcgtgctgttcgcgtgggaactggaacgtatgtggcggtatcgcgccagcattatcggcgtgcgtcgtgtcatttgcgtgatggtgacactggctgcacttgtcacattgacgatattgtctttctgggggttgttcagtctgtgatattcacggtcgttaccggctccttcccgaatatgtgccactgagtcgccgtgagcgtcacaaattcgggaaggtggatggggcgtgacggcgtggaggcactgtcgtcagcgctgagcggcttcagcctcatccaaagtgtcgaaaccgccgagctggactgtgtgcaacaaggtttcctcagtgatattgcgttgcgggctggctgcggcgcgctcgctaatcatcacctcgtagagctggaaggtccgttcggaatacgtaccaagctcgccgcgcagataggtttcgaatgaggtggcagatggtgtgtcttcggtggtggtgagtacgcgcatcgcctcgccgagcttggggtagcgctcgcggaaatccttggcccaggcgacctgctgggcgatgacctgttcctgacgggccacgcgctcttcagagggacgcggaatatacggctctatgttcttcgtgaaatcttccggcgcggtggaggccatcatgcggccgtatttttcggtcacgaggttgcggcccacgtggtcggccgcgtcaagatcagcggcatagctggtgagtaatggccgctcccatgtgaggaactgggccagccgcatctggtggaacaccggccagttgccttggcatgccgcgcgtccaccctcattgttggtgcgctggaactgatcccattcatggcgcacaatagcctcgcgcagttcatcatcagtcagttcgttggtcatcgacgttcctttcactaatatctccctctgatgagggagatggcacggcgaagccgtgacagagggagcttgaatctacaaacttttaagcaccggatcatcggagacgatgtggtcctcgacatacgggcgctgccattcgaggaaggtctcgccggacgtggtcaggtgttcgcgtttgagttccctgacgatatccaccgcaatctgctccacaacatcgttgattttctcgattgctggagccgcgcccttgccgccttcgccgaatccggccccgccatagcaggctgtcgaactcaatcgcatcacggtttccaactgttcgcccacgttcggcaacagcgcgaacatcgagccagacagcttgcgcaatgctgcgaactgccacttgtaatacggcatatagcccaccaccatcggcacgttaaccaggaacaccaacgaggcggtggcctgcacgaactcgtggatggacagccatgcggccgcgccgtcgccgcgtttcaacgaacgcggcagattatattgaccggcctgggcgatcatgccgagtcgcttggagatcagcgcgagccgcacatcgtctggcatgtttttgaacccttggcgcgtcttggaaaacagaccggtgggatcggcgaacacctcgccattggtggcggcggccaaggtcgattcctgaagcatcagccactcgtgcggcgcggtctgcgcgggcgcagtgcgatacccggtgatcgactcaaagaagtcgccgatgcggaacacgccgtcacggcgattcgcgccctgtgcgcgcggcgtgacgggggagagcggtgcatcaatcggagtcgtcatcgcttccgccacatcagaggacgccgcgcctgactcggcagtggcggtatcgtccgtagcggtgccgggggtgggtgcgtttgtcgcatcgggtatgacggtggagcctgcacctgcggaggggaatgtcccggaagcatcggatctggcatgcgcctcgaacgtcacgcggccttgcgcatccacgctgaacttgcgcggcagcgcctcgtaatcggcctcaagttgctcgccgatggccgcgtaatcctcatccgtaagccacaggcagaagcgcgggccgaaatcgtggtcctgcgaatacgcatcatcgaatccgtagcattccgagccatgacccaccagaccggcggcgatacgcccggcatactgcggatacttcgccgcaatcatcggcttgcccatctgcgtccagaacgcgcgggccagcttcagtccggacaccgggcatgcggaaacggcctcggccgcgcccgcagaaccggtcgacaccgaaacggtggatggggaagatgtcgcgtccgcactggtcttgccctgtgccgggctgtccggcagccgtgatccggactggggcagcgcgcctgcatcgccggcaacacccgcattgtcaaccgtcaccccggccttcgccgcctcttcctcggcctgccgcagattgtcggcggtgatacgccagtaatcggtgtccttgccgtaacatttctcgatcacggccagcgcatgccggtatccagtaactgcatccgcatgccgtctctcggcaaagcacacctgcgcgaagcccgccagtgcggaggcataatgcgcggaatgttccagatggccggtgcgatagatttccagtgccttggctgcatgccaatgcgcgccctccaacttgtgttcggtcagcagggtcaacgccagattcgtgtgcgagctggccacgtcgatatccgcgtccgggttcacgctcgaggcttcgataatgcgcagcgcttcacgcaactccagttccgccttgtcgggccgattcgtctcgctgtagagcatcgacagattgttgtgcagtgctgcgagcctacggtcggtgggtgccagcgaatgccggcagacactctgcgcctgatgatacaaatcctcggcctgatcgtattgttgggccgcgcgcatcgcggtggcgcaattgattagcgtggtggcccacgcctcggatgtgccggtggtcaagcccatacgagcggccagttccagcgcccgctgcacaatccactgattctccttgtgccggccctgcgagcgatagaagcccatcgtttcgttgagtacggtgagcagtccggcctcgtcgccggcgttttccgcgtccaccatcgcctgttccaagtacggaccggcttcggtggctgccgcgtggcgatcgaaaatcgcgtccagtccgttcaggaattgttgggtatcaaaggttgcgggcgattgatcggcatcgtccgtggcctggttcgcagtagaatcggcaccttgcgctgcggccgccgcatcggtgtcgtcggcatcgtctggaccatgcgcgaattgtgcggcgaattgtttgagcagtgcttcctcgtccataccgccagacctccctgaatcgtgtctgatttcagtctattaatactgtgaacaaacgcgtcagggagtttgctgtgagcttggtctcagtccaccttgatttcgcgcatgcggtgaatggcgtcggtatcggtttcgcagcgccacgagtagaaggccagcagccctacggcaagcagggccagcggcataccgcccagaccggtatagcgatagttcatcgagaaggtggtgagcatcgcgccgccgacaatcgagccgatggcattgccgaagttgaaggccacctgcacggctgcgccggcgatgagctcgccgccgccttggccggcttcggtcatcaacagctgttgcggagcggagatgaagaacaggccgaaggcgatccagaaggtcagcaaagcagtagtgccctggtttcccggcagtagcaaaaccatcagcaagccgatgcaggaaatcgtctgacccagcgcggcagtgccggcgtggcgccatttatctgtgatgcgaccgccgataagaccgcctatcaccatgccgaagccggcaagcatcatcaatagcggtaccaggttagacgaccagccaccggtcttctgcagccaaggggagacgtagctccaccagcagaacacgcctgcgttgccggtgaatacggcggccagaatcacccacggtccacgacgagtaaggaatttgaactgaccggcgatgccggcgtccttaatcggcgcaacgaaggggatccatgccagaactagcacgatggtcattgccgcccatgcagccagaataccgaatgcgaggcgccaggataggaactcagccatcaaggtgcccgccggtacgccgagcatattggccacggtctgtccggtgaccatcacggata

SEQ ID NO: 1604 - DNA, 3256 bp, Unknown
  R221_24m  MAG No. k141_52601
aagccgattccgatgcccatgccctcagcgctgaagccgaagaagagctaagcgcacgtaggcatatgccggatatcagcgggcaggatgggccaaggcccaccatgctcatcatggacaacgaccgcatggccctgatggcattacagtcgattttgtcgaaggccctgccagacttcgaattgttgccgccggtgagcgagggcagcaaagccattcagctgtgcacggccaccaaacacccgcctgctgtgctattggccgatatcgcgatgaacgacatcaatggtccggatgtggtgcgtgcaatccgcaggggaaacgcgaccacggcgatactggccattaccgcctcgattgtgggccgacatgcccaggagatggcccgggccggcgcacagggcatcatgagcaagaacgatgatgtgcgattgcaggccgtggctatccgccaggtgcagaccggcaaaatatggggcgatggtggcgacgtgcggttcgagaccgcggccgttgcgtccgcgcgcatcaaggccgagaaggacaaccgtctgagcgcgcgtgagatggaggttgcggaactgtggtcccgcggccggactatgccgcagatcgccgccgaactgtccatcaccgaaaccaccgtgcgcacgcatctgatgcgtgcggccgacaagctcggcgccggcaatctcaaggaacttatcggcgcatggattcgcatgaacctgcactgatgaaggcgccgatgggtgtgtggggacacggtagaagaagcgcaaggcgcataaggggagcgggccggtgaaacgtccgattatcatttcgcggcattcgtcgtattcgtatggtcacgccgacggcaagaagcatcatcagattgatatcgatatagaactcaatcatccgctggcgatgttcggcccgatcggtgtgcttgcggtggcggccatcgtctatgcggtgaccgggtcgtggctggtcacggcgtcggcggcgttgacggcaagcgtgctgctggtattactgggcattgcgttgcgctggcgcaagcgcgtggtgaatcaggagaacgaaaacgagcagatggaatcggcgctggccgatctgcgccacggcaaccagctcgcgatcgaactgcacgacacgctgtccaacgatctgacgtatatctcgaccatcgcccggaataatctggccgcgccagccggcatcgatggtggcgactggcagcgcgtgctggatcgcagccaacgtgcctttgcggaagtgcatggcatcatcgattttctgaccgagcagagcggaatggacgccggcttccgggacgagtccttgccggtcggtggcaccgggacatctgaggtggcgactgcagaatcagggcaggttgattcgccgacgaaagaatccgccctggctcgtgacccggtaggcgccgggagctgtccagcgattgcgaatgaggtggttgacaatgccgtgcccgagaacgccggtggcgatgaccgtacgcaatccacagcgggcatgccgcaatccttcgtcacgcgtgtgaaggcgcagatcaccgataccgaggagtttctggaggcgcagggctatcgggggacggccgcggtcaacggcatcgccatggtcgtggaccccgaggcggcggccgaggcgctgtcgctgatgacggagatcggcacgaatatccgccgccatgcaccggcgggagctgattcctacctgctattcgtcactctgtctcccgaatggattgagattcgcgagaccaacgatatccgtgacgatgccgacgcgcagagtggcctgtccgcgcaggagcggtcggggcgtgggctggccatgcatcgcacccatgtgcaggagttgggcggtgaattgaccacccgttcggatgatggcacgtggatgatctatgtgcgtatcccgtgcgtgcggggctgatggggcagaagctgcgatgtccggcgtccggcgctgattgtgccctgtcctcacaaatgaggacgacgaccgcagccatgtccccataaccgaggattgcgggtgttcggctcggcggcggctccctatggtggcgtccataaggaccaatcccagggagggcaacgatggcaagtgatacggaattatggcggggaactgattacggatggtggctggctgcggacacgtccggtgcggtcggtgccagcctgatcgcgttcgcggtgccgctgatgatgctcgccacgacaggatcctctgccgccgccaccacgacggaaagcatctgcgtggtggtgcagacggtgctgggccttgccggcggcgtgattcaggaccggtatgatcgccgtacgctcatgctgatctggggtgcgtccggtgtggtgctctcggcggtggcggcgacagcggtgatgctgttcggcaatgcgccgaagacgagcggccatggggttaacggggcaaacgctccggcattcggcggaccgtatgcccacgtgcttccgatcgcgctgctgtgtatcgtcgtgctgttttcggtgcgcgatgggctgttggagaatacatcgaatgccatgctgcgtggcgtggtgccggatgagcagctgcctcacgcgatggcgttgaacgacgccagggattcgacggtcacgctggcaggcgggccgttgggcggtctgctgatgaccgtgggacatgcggtgccgttcctgaccagcgcggtgctgagcgtgctgggcatggtgtccgcatggcgtatccgccgctattggaaacgtgcgactgtgagcgatagcggccgtccgggcaatgttgataccggttcggaggtcggggccgtctcggacgccgatgatgccgatgactccgccccacgctggcgcgacgcactggacggcatgatctggctgctgcgcgaccggttccaacgccatctcatcatcgcagcggccatggtgaccggtgccagcaatgccttcctactgctgaccgcgctggacatctcccaaggtggcagccagctgatatccgccggattcatcaacgccgcctccgccgttggcatgttgctgggcgcactgatggcctcgcaactggtcaaccgcgtgcccggcggcgtactggtgggcgtgatgttcgtcttgctggctgtaggattcacctgtgccgcgttggtgccctccatggttggcaaggccatatttgtggcctgctcggtactggcattgcccgcgggcaacgcggtgcttggagg

SEQ ID NO: 1605 - DNA, 31094 bp, Unknown
  R221_24m  MAG No. k141_54998
atggccagcaccatgccgatacccatgttgaagatgttgtacatctccttgtgatcgatgttgccggccttctcaagcacgtcgaagatcgggagcacaggccaggtgccaagctcgatctcggcggccagaccgtccggaatcatgcgcgggatgttctcgatgaagccaccaccggtgatgtgggccacgcccttgaccacgcccgccttgaacagcggggagagggccttgacgtagatcttggtgggggtgagcagcacgtcgccgagctttgcgccgcccagctcggcgagctcagtgtccacggtatagccagcctgctcgaacagggccttgcgcaccagggagaagccgttggagtgcacgccggtggaaggcagaccgataagcacgtcgccctcagtgatggtggaaccgtccacaatggcggacttttcggcaacgccgaccgagaaaccggccagatcgtactcgtcctcgtcgtacatgcccggcatttcagcggtctcaccgccgaccagtgcggaaccggcctgcacgcagccgtcggccacaccggccacgacctgctcaagcagggccgggtcgttcttgccgcaagcgatgtagtcaaggaagaacagcggctcggcaccctgggcggcgatgtcgttgacgcacatggccacgcagtcgatgccgatggtgtcgtgcttgttggccagcttggcgaccatgagcttggtgcctacgccgtcggtgccggagatgaggaccggctccttgtagcccagggaggctaggtcgaacaggccgccgaagccaccgatgccgccgaccacgccgggacggttcgtgcgggccacgtgcgacttgatgcgcttgacgacttcgtacccggcttcgacgctcacgccggcgttctcatatgcttttggcatttggtggggcctttctgttctattttcaagctcccttgccggggagccacctgcaaaaagcggattttcgtttgtactaagctccccttgtcaggggagctgtcagcgaagctgactgaggggtagtcataaagaccaatgactgaggtgtagtcgaaggaccggccgaacctactgcacgtccggctgcacggtgttgtactcgttgccgatgtacttgctcttgtacagcgcgaattcaggcagacgcacacggtcctcgggcgtgagggacttcaggaagtcggcctcgtagtcgtcgagcgcagtggggtagtcgccgttgaagtaggcgacgcacaggccaccgtatggggcgtcggcgttcagtccgatggattcgaccagaccgtcgagcgaaaggtaggccaaggaatccgcgccgatgtattcgcggatttcctccacgctcatcttggctgcgatgagttccttggtggtggagatatcaatgccatagaagcaagggtacttcagcggcggggagctgatgcgcatatgcacttcagcggcgccggcttccttgagcagctgcacgatgcgcttggacgtggtgccgcgcacgatggaatcatcgataacgataacgcgcttgcctttaaccacgctgcgcacagcagagagcttcatacgcacaccctgctcgcgcagttcctgcgtgggctgaatgaaggtgcgggccacatactggtttttgattaggcccatttcgttgggcaggcctgctgcttccgcatagccggatgcggcggacaatgaggagttcggcacgccgataaccatatcggcctccaccggggattcggcggcgagacgtgcgcccatgcgcttgcgggcggagtgcacgttgacgccatagatatcggaatccgggcgtgcgaagtagatgtattccatcgagcagatggccagctgcgtgttgttggtgtactgcacgatcttgtagccgtgatcgttgaccaccacgatttcgcccgggcgaatgttgcgcaccagctcggcgccgacgacatccagtgcgcaggtttcggaggcgagcacgtaggcgccgttcttcatcttgccgagggagagcgggcggaagccgttcgggtcgagtgcgccgatcatggcgtcttcggtcatcagcaggtaggcgaaaccgccatgcaccgtgttgagcgcttccttgagcttgtccataaaggtgcgctgcatcgaacggcgaatcaagtgcatcagcacttcggtgtcggagttcgaatggaagatggcgccttcgtcttcaagcttgcggcgcagtgacgggcagttcgtcaggttgccgttatggcacagagccacgtcgccgtcatggaagcggaagatgaacggctggatgttgtccgtggtgcccgagccggccgttgcgtaacgcacgtggccgatggcgcaattgcccttcagtcgttcgatttcgcgctcatcgccgaacacctgggtgagcaggccgagtccgcgatgaccgatgagatgaccgttatcgttggagacgatgccggcaccttcctgaccgcgatgctgcagcgcgtgcaggccaaaataggtgagtcgtgaggcgtcggggtggccccatacgccgaagatgccacattcctcatgaatgtcttcgagttcagccgacaagccaaagctcctttttcaaacaggggattaactatctgccaaccctaccaatcggcggctacatcgcgtgttgtggggtggtggaacttgttggggttcgcggacgcggtttaagcaccagatcagttgagtatgaatagtggcttaggattttggcctttcgtcgtatgaatccggtgcttgttcttcggcttcgtctcagtgcctgaaatggctgaagaactcgatggtctcgggatcctgcgactcgtccatcacctcggcgggtgtgccgttctcggcgatgacgccgtgacggagcagtacgatgcggtcggccgcgtcgtgggcgaagctcatttcgtgcgtggccatgaggattgtggtgccttgggcctttaactcggcaaccatgttgagcacttcgccgaccagcatcggatcaagagcagatgtgatctcgtcaagcagcagcagttccgggtcggtcatcagtgcgcgcgcaatcgccacgcgctgctgctggccgccagagagctgatcagggtaggcgctggctttatcgcgcatgccgatgcgttcaagcagttccatagcgcgggtttcggcgcgatccttgctccagtggtgaaccttgattgcggcaagggtcacgttcttgagcaccgacatgtgggggaagaggttgaactgctggaacaccacgccgatacgtgcgcgaatcttgtcctggtcggcacgcgggtcggtgatatcggtattgcccagccaaatctggccgtcatcgacctgttcaagcaggttgacgcatttcatcaatgtggatttgcccgaaccggaaggccccagcaaagccaccacctcatgttggtgaatgtcaaaggaaatgccacgcagcacctgcgtgtttccaaaggatttgcgcacgtcatcaagacgcagcaccgtcttgttgctcacgggggagtcactcgcctcggtgttgatattggtcatttcgctcataccgttcctccgctgagttcgcgtttacgcagacgttccgtgtaccagtcgttcagcaggatgaacggcacgctcatcaggatgaacagcaggctggcgaccacatacggcgtgaagttgtaggtgctggccacgtcgatctgtgcggcgcgcacggcatccaccgcacccagcacggaaatcaggccgacgtccttttgcatggagatgaagtcattcatcagtgcgggcgcgactttgcgcaatgcctgaggaatgacgatcagtcgggtcgtctggccggaggtcaggcccaacgagcgggccgaggctcgctgagaaggatgtacgtcgttaaaaccggcacgcagcacctcggagacgtaggcgctgtatcccattaccactgcaatggtgccgagtaccgagggatcgatacggccgaacaagcctaggccgggaatgccgaaaccgattagatacagcacgacgataataggcacgccgcgcatcacagtcgtgtagatcaatgccaggatacgcagcgggaacagaataggggagcggctggtgcgcaccaatgcgatcagcgtgcttagaatcgccacgccgaccactgcgacgagcagaacgcggatgttgagccataggccgtcaagcacatggggaaacgatttgacgaagtattcgccggagaagaaggtctccttgactcgtggccagccgggggagagcttcaggccgatgacgatgaccacaacgaacacaatggtgctgatcagactggtaatcgtcgattgaatttgctgatgaacacgatattggcgtcgtctgagctcgacctgacttacctcgtgtccgtcaggggcattgtactgcctggtttcggttggtgctgcggtcatgtgatgaatgtcgctcgcttcctgaatgccggaatggccgggtgtcgcaggaaaatttccgcagcgcccggccaaggtgttgtgaccttatgatgtgagcctactccacttacttcttcagttcggtcaggtcggtggtgtactcggccagccacttgtcctgaagcttcttgatggtgccgtcggcgttcaggtcatccactgccttggtcacggctgcagtcagcttggaatccttcggcagcacgatgcccatgccgctcttgtcttcggagtcaggcagacggccgagcaccttggcgtccttgacctgctcggactgcaccatgtacacgcattccacggtgctggtgaccagtgcgtcgatctgaccggcgtcaagtgcctgagccagtgcggcatcatcattgaacgtctggatgtcgtccttgatgttcgccttggcgtagtcgtaggcaagggtgccgaccatgacgcccacggtcgcattcttcagatcggataccttggtggcgttggcgaacttgctgtctttcttgaccacgacggactggctgtcgttgtagtagctggacgagaagtcaacggccttcttgcgctcgtcggtgatgccgaactgctggatgttgagatcccagtccttggcaccgggagcgatggcggtgtcgaatgcggtgcgggtccacaccacgtcgctcttcttgaaaccgagcttgtcagccactgcgtaggcgacggccgcctcgtagccctcaccgctttccggcttgtcgttcataacccacggctcgtaggccggctgtccggtggcgatggtcagcttgcccggcttgtacgtctgctgggtgatatcgttcgaatcggcggaattggatgcggtggactggccggaaccgcaggctgcggtgaacgacagagctaggatgctggcggtggccgcaatggtacggacgatgtgttgcttattgaacatgggcttcctctcctcaagtgttcgtcatgcacacggttcaaagccgtgcttgatgcatgcgcgccaattgtatggctattgggttactacaaaacagcgatattctcggatgctggttatctccattgcttatggccggctagagccgcgcaatctggcgcgtaagcgaacggatatctcatattggcgcagagcgaaatggcgttcactgttcgagtgtgaagccgtcgaatacgaatcccggactgaccacacaggagaccagcgcatcgccctggccaggcactgtgcgctgccagacgccagccggtacgaccgcatgtcccgatacggttacgtcggcctgatcggtggtgatgccggaacccagggtgattacggttcgcttggattcgtcggattccggagtctcgccgctgccgccgagttccagcttgaccgatgccgggccatgccacagccagacctcatccgcatcgaccttatgccaggcgctggcatctccctcgggcagcaggaagtaaatcagtgacgatagcggtcggcctgaggcctcatccgtgtgcggggattgccagtcacgcgtgtaccagccgccttcggggtgggcttccagtccaaggcgttccactatggaccgggcgtatggactcatgtctcgcaaagcgacgctcataatgagatctcctgttcttggcgggtttgctggtttttggcttcttgatatcaggtcaggtcaggtcaggtcagcggtgtcaccaggcgttgttgtaggcttcgcgcccggatatcaccgtggctcggttcgtgcctgcgccgtgcttcaccagtgtttccagcgtttcttcgatgccggccggagatgatgtgtcgacggggatgtcgaagaacgcgaaatcagccaatgcgcccgcgttgatctgtccaatgcggtttcggcccacgtgcatgcccatggaggcggcgccgcccagcgtcatcatacgaatcaggcgatgtgtcagatcgtcgctggcatagccttgttcgcgggccaggccgtaaagcatcgacacgtcatcaagcagatcgagggtccgcgtgctggagagcgaatcggtgcccacgcttaccagattgccttcctcgaggtattcgcgcaccggtgcatctttgccggtgttggtaatgcgattcgatcgggggcacaatgccacgcccacgccgcgctgacgtagaatacgccgatcctcgccattggcccacacgccgtgtgcaatgtgcacatccgggccaagcgagccaagctgatcgacgaactggatggcggaggcacctttgcccacgtctttgagctgccggtagctttcccaatcgtggtcacgccagtcggacgccgaataagtggtgagcaccggcggataagtgccggcctcgagcggggtctccgccagatggatatgcagtcgcatgttcagttgacgagcaatgtctggaagatcaacgaacggttcggactccagcgtatacggagcatgcgggctgatgccgaggttcggcagctgctcctcgttcatccggcgcaactgccggatgagctcggtgcggcccttttccatccattcgtcgttgtgccagcccattacctcccaataagcgatgccgtgcatgccctgcgaagccagcgcgccggcggcgtccagatcggtgacgatgtctgcggcggccgtcgtgcccgattcgaccatctggcgagcaccgtcctcggcccactgcttccatggctgggtcttctgcgcctcggcgtacacctcgttgaatgccagttcccaggcgcggaaccgatcgtaggtgccttgcccgacctgcaccatgccgctgtactgcagatgagtgtgcgcgttgaccaatccgggggtgagcaccccatcccaatgccgttcacggatggtgccgtgagacgtcatttcctgcttcagcgcctccagcacccagcggcgtttacctacatgaaccacgcggtcgccatgtatggcaactgcgccatcgatgatgacggggcccgtcacggggatgatgagtttggcggaatacagtgtcacatcatcgataagctcggtatcgacggtcggccaggtgttgtcggtcatattctcctcgctgcgttgtgttcggtgccgtgcctatggctatcggtcggcgttctctcggtcgttttccgcgaatctggtcagtcgccaatcgtagccgttgtcctccacggcatggctggctcggtatccgcgcgccttgagcgcgctggcggcgatgcgctggtcggtcgctgcgtcaagtctgataagcgtgtgatccagtgtgcctcgatgttccagaagatatgcgacggcgctggcctgtacggcgaagctcagatccatgatctcgattggattgccgcctcccaccgtgtagttcacgccatcgccgtcggcgattagcgtgagcgttggtccgtcgggaacattgagttgcgcggtgtccctgttgacctgtggggtgaagtcgcttacctcgtccaaggcgatttcgttggcgatgccgccgatcactgcgagcgccgcgccctcgtgcattgcgcgcatgtgctcaagtgtgactgtatgtctcacgccagtggcggacaccaccatatccgcgcaagggagtgcctcgtcaatgtcttgtgcggcgaagccgtcgaacaccgctttgagtgaagccactggatcgatatcgcagatggtgacttcggctccaagtgcgcgaatacgccgtgcgaagccttggccgaccgggccgtagccgatgacggtgacgttcttgccgtcgaatgcatgctcgccgagaatgcgctgcatggtggtcacgcatgtctccccagtgccgtgggcgttgtcgaatccggttttcagcacactgtcgttaacggctacgaccgggtaggtgagggctcccgcttcctgcatctgctggaacgcgcgtacgccactggtcgtttcctcggccactccaatgagattcgccgtgagctcggggcgttcgagcgaggcgaggcgggcgaagctggcaccatcgtcgatgatgatgttcggctgtatcttgtccagcaggcgcagggctgcctcgtgcgcctgttccgcggtccaggctcggctggattcgaccgtgattccttctcggcgcagctgttccgccactcggggatccgtggaatccgggccgcaatatacgccgacgattgcgccggcggccttaagcttgcgcagcagaatcgcggtttttggctccagtatcaggcagacggcaatacgaatgcctgagaaatcgacgcgggtggtgaggtcatccatggtgtcgcgtaataccggcatgtgctgttccgcgtactccattgcctccagcccacttgccgtgcgcatgtcggcaatggaatcaatgctttgtgtgccgtcacagaggaattcctcgctgtgcccgtcggtcatcgtggcatcttcgacggtcatgccccattgctgggcctgagacttgatttcggcacgcttctgcggctccggaatcgcgaggcgggctcctgccagtgatcgattcgttttctgggatcgggctgccgcccacgccgcaaaatcgctgtctgccgtaatgcttttcttcatattccccatggtacgcatgcatgccgctgctctgccgctgcgcgtgtggtgtgggtgaagagcgtgcttgggcgcgttgcgtgcgtcgacttcggcagcttcgaacagacatgttgtatcgaacaaatgttcgaccgtattgatatgctggtcgggccggcggtggtaaggaggtgatggcgatgggcagcggaacggtatcgacgcaacgcgagcatacctatattgccattgatctcaagtccttctatgcctcggtggagtgcgcggcgcgcggactcgacccgttgaccacgcatctggtggtggccgatgaaacccgcaccgataagacaatatgtttggcggtctcaccctcgctgaagaactatggcattcccggtcgtgcgcggctattcgaggtaaaacagcgcctgaatggagtcaacatcgagcgcgcggtccatgctcccggcggccgattaatcggggagtcctgcgatgcgcgcgacctggaacgctcgccgagactcaaagcctcgatggtcatcgccaagccgcgcatggcgcactatttggaggtcagcgggcaggtatatggcatctacctcaaatacgccgcacccgagcacatccatgtctactcgattgacgaggtgttcatcgacgtcacgccatatctgcgctcgctgggtatggggccgcatgcgatggcgcgaaccatcgtgcgcgaaattctcgatgaaaccggcatcaccgccactgccggcattggctccaacatgtatctggccaaagtcgccatggatatcgtcgccaagcacatgcccgccgacaaggacggcgtgcgcgtggccgaactgaatgaaatgtcatatcgtcggctgctctggagccatcgtccgctcaccgatttttggcgggttgggcgcggctatgccaggaaacttgagcacgccggtctgatgaccatgggcgatatcgcccgatgctcggtgggtcgtgcttcggattactacaacgaagacctgctatatcgcatgttcggtgtcaatgccgaactgctcatcgaccatgcgtggggctgggagccgtgcgaaatcgcggacatccaatcctatgagccggatgcgcacagcatcagcagcggtcaggtgctcaccggtcccgccgactatgccacggcccggctgatcgccaaggagatggccgatgcgctcgccctcgatctggtcgataagggggtgatgacgaatcggctgacactggcggtcggctatgacattggcagtctcgatgcttcgaagcttgattcatgcgcagaccgggcgatgaggcgtgccgccgaacgcgcggcaaagacctatcaagggccggtgaccgttgaccgtttcggtcgtcgggtgcctaagtcggccgtggggtcgattggattgggcgattttacgtcgtctgccgcacgtattcgcgaggcgatgaccatgctgtacgagcgtattgtggatgcgcggttgctggtgcgtcgactcacagttgttgccgatgatgtggccacgcccaaagaactggcggcgggcaaacgctatgagcagcttgatttgttcggtgatgatggcgatatgcgatatgactgtgatagcacggaatccggtggcgacggaagcgggcgtatgccggcttgtggggacgatgccgccgcacagacgttggctcgagagcatgatatccagcgtgcgctgctggatgtgaaacgtaaattcggccgcaacgccgtcatcaaagccatggatatggaagacggtgccaccggtcaggctcgcaaccgtcagatcggaggccatcgcgcatgaccctgcaagaaacccatgcatacgacgacatcatcaacctgccacaccaccaatcacgcaagcatccgcatatgtctcgtcaccagcgggccgcccagttcatgccgttcgcggccttgaccggatacaaccaggtcattgagcaaacagcaaaaaacgccgaaaccgccatcgcccaggccgaggcccaaggcgataccgatttcggcgcttaacaatcgctcccgttggaggaagtctcagattcgtcagcccacgtgacgcgagaaccggccggcagcggctggcccttgcgatacttgccggtcagcagaccctgcgcgagtggggagaacgtggtgataccaatgccgagcttgcggcaggtgcccatgatctcatgctcgatatagcgatcctgcaggttgtactgcggctgaaccacggtgattgggtacaggttgtagcggtcgataatgcgctgggcttcctcgaggcgggccgaaccccactcttcggaaacgccgtaatacagcaccttgccctgggcgaccaggtcgctcatcgcgcgcaaggtctcggtaaggtcggtggtctcgtcaaaacggtggcaaaagtacatgtccagataatcgatctgcatgttcttcagcgtctggtcgatgctttcgaaaatgtgcttgcgggacaggccgcggtcgttcacgccttcgccggtggggaagtagaccttgctggagatgacgagttccttacgcgggtactgcttgagcacttcgccgaggaatcgttcggcggcgccgcccgagtaagcgtccgcgcagtcgaagaagttgacgccggaatcgtaggcgagcttcacggtctccttggtcacgttctcggccgctgtgcccttgagatccgtgacccagctgcccagcgcgacctcgctgatcttcagtcccgacttgccgacgctgcgatacttcatgtgtactccttgatgattaatcgtcaccgccgtctcttcatggccggccgtgaacgctaacaattcgattaaaacagttcaaccccacttgaacgcaagttggtggctaccgcgatacgccggttgtagtcccgtgaccaatttgccgcaatcagtaactgctaatatatgagtaattattggctttttaggcataaattgctaatatattagtatgttttctttgttggatgagcctatgcctggggatgtttcggccgctattgccgaacgcatggttgccagacgcaaagagcataagttgtcgcaaacggctctggctagaaaatccggtgtgagtcttggctcaatcagacggttcgagcagcagcacgaaatctcattgacggcgctcatcaatatcgcgtttgcgctgagttgcgagcaggattttgagacactgttttcacagccgtactatgcaactatcgatgatgtcattgctgcgcgggagagggaagcgcgatgagcgagacagtgccgttggatttatcggttgatcgggtacgggtgtttttggatggtgaaattgttggctcgctgacactgtcgccggcaaaaacagtggcgttctcgtacgaaagctcgtggttgtccagtggattcagcataagtccgctgagtctgccattgcgtgagggggtctttgtcgccaaaagagatccattgcatggtttgtttggggcgttcgatgacagtatgccggacgggtgggggcgtttgctcacggatcgtcttctgcgtcagagaggaatagacccttactctatcggaaccttgacgaggctgtccattgtgggatcaagcggtatgggagccttggaatatgaaccagcggcggacattgaaaatggtgttgcagctactgacttggacgatatagcgagagagtgcgcgaatcttctggaaactgatttttctgaggatttggatcagctttttgcccttggtggctcgtccggtggcgcgcggccgaaaattctgactgaggttgatggagaagaatggattatcaaattcccctcatccgtagactcggcgaatatcggagaacaggagtatcaaatttctgtacttgcgcgcgagtgcggcattgatatgccggaaactcgtctgttcgcatcagcgcaatgttctggatattttggtgtccggcggtttgaccgtacgcgggatgacgatggcaccgaacataaggtgcatatgatttccgccggcggattgctggaaacgtcgcatcgtattcccaatttggattacggactattgatgcggctgactatgcgtgtgtgcaacagcgcagaggagtgcgagcggttgtaccgtctcatgtgctttaacgtgttcatcggaaaccgcgacgatcatgcgaagaatttctcttatctctatgatcgttctcgccaagcgtggagattgtcgcctggatatgatttaacggaaaaccctggaatcaacggcgagcacactacttcggtgaacggaaaggggaagaacatcactgttgcggatttgactggtgtcggtgtgaaggctggtatttcgcgggcgcgctgtattgctattgccaatgagatgcaagataagattcgtgatgctgggtttgccgtccgagattgatggtctcgccatacttagtttttccaatacgcattctctagtacgtttgccttttgaaaagcttcgcgataggcggtgataaggtccggcaaacgcattgaggcgttggctgggctggtggagggcagttgggtcatgccgatggcgataccggcttcggtcaggcgcggctcgataagtttgcggtaaagttgcgctgatttcgcgccggttgtgaagatgtgggcgattggagctccgcgcaagattggtgtcaagtcgttgggcgcggcattgcggatgctggcatcgctggctccggtgatatcgcaagaagcaatgacatcccataacgcaatgtggtggcgcagagcaaacgcacgacgggactcaggtgaatcgccgacggcgtcggcaggatcagcggagttggcaaacagcgcctgcatcaccggccaaaaccggttctgcggatgcatatagtaaaacgccgccgctcgggatttcggactcggcatcgatcccaaaatcaaagcccgggactcaccatcccacaccggcccaaacccatgctccacatgttcgctcatggtttccattctaagtcgggcgattgagcgcacgaggcaatcaggccgagaactgtttgccgaattccgagaagagctgacggcgggcgaagacgagcaggccgagcagcaccagcagggagaccagcccgctgaccatcaccagcacatcccacggagcccagccgagcggaatgaacgtcagaggcagcagaccggcgacgatgtcgaacgccagatacttggcgtactggtcaatggccttggcccgcagcacgataagcagcaccacgtcaaagaccagcgaaaccagacacgtgatcggtatgacgaacatggtgacgacatgattcatcgtcgccacaaaccagaccagcgcaatcgccagcatgatatagaaatatcgaaacatgaggcgaagcggccgcggcgcgtgcagaatcgcactgttgatgaacagcacgctgatgatcagcgcggctgccgatgcactggcaatcggtatcggccacgaaaacagatagctgaagaagccatgcagcagcagaatcgcgccggttacaaacgtgatgatctccaccgccaaacgcctcggacgcagatagatctgctgcgcggggaatgcggcgggagaggcctcgccgtgcaattcgttctgacagagtgggcaacgggccatatcgccggtgaaatcgacgttgcaggcatcgcaatgcttcatgccgacgctcctttctccacatgcgcgccggcgatgttcatacggccgctgatgccctgcgcggcgagaatccgacacaggttcttgatgacgttcagatcatggtagacggtggagatgccgatgctcaggtcgtcgccaaacgagcagaccgtgaaattcaggctggccggtgtggtgaggaagctcaccgaacgcacatggcgcgcgagtcgttcgtccaaggtgactcggccaaggttcgagacggtggtcgtggtctcgcggtcggcgatgaaccgggccagctccagcacccagtccttggcaggggagggcgcgagacgcagcgccggattcttttccagcgcaatcatgcggttcatatgcgattcgacgcgctcgcgactggtggcatggtcgagctgctcctgcacatggcgggcgatgtcggccaacggctcatcggtcagcaatccacccataccgttgccgtgcgcggtgcgggcggcggactgctggccgtcgccggtcgcgtctgggcccgttgcggaagttttcgcggagtcctcatcggcttcgatatcggccggcgtgtacgccacgtaagtcatgccgtagaagttgcgcacggtctccgacctgaagaaggcgcgcaagtcgaccggaatatccacgcgaatcgcgcgattgcgggcgcgcgagggcatgacgtcgcgaatcgcgcacagtatcgcggcgatgaggtaggaggtgaggctcactccgcactgatgcgctgcaccaagcaccttgctggcgctgacgtgatattccatgaacgtgggcgcgtcccggtcgatggggccggccagccggtagatcttcgtgccgggcgcggcaccggccttgtctttctcgtagtatttgtcgaagctgttttcggctttgtcgctgtccgagccgtcgtaatccgaaggcacgcccggcacgtcgtaccgctcggcgatgtaggcgtgcaacagtgacttgaacaggttgatggcgccgcgaccgtccgaaatgatgtgcgagacctcgagattgacacgattgcggaaataactcacgcggaacagcatgcttttgggcccgtaatgcagtcgcgagcatatcggcagatgttccggctccaccagcggccggccgtccgactgttcgaggtaatgccagaacatgccgttgagcaggtgcacgttgaagctcgggaactgggcgatggcatggtcgagcgcgtgctgcaggatgtccggggcgatgtcgtccgccagctcggccgaatagcggaacacggtctgcgaggagcggccagcctgggaggagtagaacttgccgatgttgtctagtcggtaccaagtacgtcttgccatgcgtcgcctccctccggtgcgttggcggtggtgccggtgccgggagccggcaccagcggtgtgtcgtcgaggaaatgctcgatgatccggtaagtggtggacaccagccctacggccgacgtgttgagcagataaccgtggatgccgtcgtgaatccggtaacaggagacgttgtcgttcaccaattgcagacgacgggcgtacgcttcgtcctcgtctctgagcgggcagtattcggcggacaacaccagcgtgcgcggctgattgctcaggtcatgcgcggtgagcggcgcgaaatacggattggtcaggtcggccacggacgaacggtacatgtcgatgtagtcggccatgtcctgtgcggtgaggatgtagtcggtgccgttggtccgcaccgattcgaacgggctggtctcgggattgtagtcgttgccgaccaccgggtaaagcagcatctgcgtgcgcggcatgaactcgccgcggtcgcgggccatgagcgagacggcggccgcaagattgccgcccgcgctgtcgccaaacagcacgatgctgtcgggatccggtgctgggattgtcgcagatatatcgcccccgccggtgggggctgtcggcgcagccgactgggggtggtcaacatcaacagaaccacccaccccagaaatcggcaattccccagcaaacagctgccgggctacctcatagcaatcctcaacagcagtagggaagcggtattcaggagccagccggtactcgaccgagatcacacggcgttgcagacgtacggccatatgcgcgcaagcctgcgtgtacaggttgatgccgcctgtggtccaaccgccaccgtggaaaaacaggatcgtgccacgcggcgtgactgagggaagttccgtgttggcattgccgggaataccgtcggtgttgccgctcgacgtgctttccttgatgggtattttgggtaggactttgggtaatacggcgggcagaatcgcggatattgccgaggccactggcgtgccattggcggaagattcctccagggcttcgggcaggggcgctccataggcgaccagcggcgtgaacactcgcaatggtacggcatatccatccgccataggcgcgaaggcgtcctcgacacggcatttcggattggcgggtgcctgcttggcgataagctcttccgccacgcgctgcaatttgtacgacttgcccgcgttgggcttgatgtagctggcggccttcatcgcggcgaacaatgcctcgttgatcggcatgacgacaggtcctttcagcggcggattcggtagtgcgaacaccccaaccttagcccatgaccggcatgaacaaaaaagggaaggaacccgagagttccttccctgtgtgccgtatcagacgcgatacgcgccgattatcaggcggcgaagtattccacgccggcctcgaagatcggctggtacttgttgccgggcacgttgacgtacaggccgttgccggaacgctccgagtgacccatcttgccaaacacgcggccgtccgggctggtgatgccctcgatggcgagcagcgagccgttcgggttcacatctaggtccatgccgggggtgccggtctcgtccacgtactgcgtggcgatctggccgttggccctgagctgggcgagtacctcgtcggaggccacgaagcggccctcgccgtgggagatggccacggtgtggatgtcgccgaccgaagtcttggacagccacggggagaggtcggaggccacgcgcgtgcggaccagtcggctctggtggcggccgatggtgttgaaggtcagcgtcgggcaggcgtcggtcatcggcacgatgtcgccgtacggcaccagacccagcttgacgagcgcctggaagccgttgcagatgccgagcatcaggccgtcgcggttcttcaacaggtcacgcacggcctcggtgacggccggcgcgcggaagaacgcggtgatgaacttggcggaaccgtccggctcgtcgccgccggagaagccgcccgggatcatcacgatctggctcttgttgatctcatcgaccaacgcctgcgtggattcggcgacggcggccggtgtcaggttgttgataatcagcgtggtcacgtcggcgccggcgcgctcgaaggcggcggcggaatcatactcgcagttgttgcccgggaacaccgggatcaccacatgtggcttggccacggaagagccgacgtacacggtcttcttcggcgcgtggaagtcgatggtctcgacggtcgcgcccttgtcctcgcccttggaacggtacgggaacacggattcgatgccggactcccaagcttcctgcacagcgtccaggtccagcgtctcgccggcggccttgaacacgtactcggaggtggtggtgccgatttcgccgatctcgaccaaattggagacggccggaagcttggcatcgtctgccagctcgacgatgaacgaaccatatgccggggtgaacaggtcgtccacggcgatgctgtcgttcagagtcacgccgatgcggttgccgagcgtcatcttgaacagggcttcggcggtggcgccatagcccggcgtggagacggccagggcatcgtggaagtcggtgagctcctcgatcacggagaacacctcaagcagcgcatccttgtccggggtcagaccgtcggccaggtagcgcggcgcgatgcgcacgatacggtgatcggcgtccttgaattcaggggaggtggcgcgcttcatgttgcccacggccacggcgaaggagatcagcgtcggcggcacgtcgagatcctcgaacgaaccggacatggagtccttgccgccgatggcgccggcgcccaggtccacttgggccatcagtgcgccgagcacggcggccgccggcttgccccagcgttccggctcgtcgcgcagcttctcgaagtactcctggaagctcaggtaggccttctcatgctcgaagccggccgcgaccagcttggccagcgactcgaccacggacaggtaggcgccggtgaactggttcttggacatgatgtacgggttgaagccccacgccatcgccgaagcggtggtggtctcgccgaacaccggcagcttggcgaccatggccatgttcggggtgagctgacgcttgccgccgaacggcatgagcacggtgcccgcgccgatggtggagtcgaagcgctccgaaaggcccttgttggaggccacgttgatgtcggtgaccagcttgttcatacgctcggccagcgtgccctcgccccacggggtctcgtaggactgctgtgcctcgacatgcacggtctggtgcttggaagcgccgttggaggccaggaactcacgggacagattcacgatcttgtcgccgttccaggtcatcaccatgcgcgggtcctcggtcacggtggcgatcaccgtggcttcgaggttctcttcgcgggcgtagatcaggaactcgtccacgtcctcggcggccacgtccacggccatgcgctcctgggattcggagatggccagctcggtgccgtccaggccctcgtatttcttgggcacggtgttgaggtccacgaacaggccgtcggccaactcgccgaccgccacggacacgccacccgcgccgaagtcgttgcagcgcttgatcagacggcaggcatcgccgcggcggaacagacgctgcagcttgcgctccaccggagcgttgcccttctgcacttcggcgccgtcgagttcgagcgattccacgttatgcgccttggacgaaccggtggcgccaccgatgccgtcacggccggtgcggccgcccagcaggatgatcttgtcgccgggggccggggtttcgcggcgcacatggtcggccggagtggcggccacgaccgcacccacctccatgcgtttggccacgtagccggggtggtagatctcgtcgacctgaccggtggccagaccgatctggttgccgtaggagctgtagccggcggcggcggtggtcacgagcttgcgctgggggagcttgccttccagcgtctcggagaccggcacggtcgggtccgcggcgccagtgacgcgcatcgcctgatacacgtaggaacggccggacagaggatcgcggatgcagccgccgatgcaggtggccgcgccaccaaacggttcgatttcggtggggtggttgtgggtctcgttcttgaacaggaacagccagtcctcgtcgtggccgttcacgtcaaccttgaccttgacggtgcaggcgttgatttcctcggactcgtcaaggccggtcaggacaccgttcttcttgagccacttggcgccgatagtgcccatgtccataaggcagacgggcttggcgtcacggccgagctcgtggcgcatcgccaggtaacgctcgaaggcggccttgacggtggcgtcatcgatggttacttcgtccagctcggtgccgaacgtggtgtgacggcagtggtcggaccagtaggtgtcgatcaccttgatttcggtgatggtgggctcgcggccctcctcgctgaagtacttctgacagaattcgaggtcggccagatccatggccagaccgcgctcgtcgatgaacttctggccggcttcggcgtccatctcgttgaaaccggcgatggtctcgaccttgccgggcaccggcacctgggtcttcagggtttccttggtctccaggctggcctcgcgggcctcgaccgggttgatcacgtaatgcttgatggtgtccacgtcggcgtcggtcagttcgccttccagcgcgtacagcttggcggagcggaccgtcgggcgctcgccctgggagatgagctggatgcattcggcggcggagtcggcgcgctggtcgaactggccgggcaggaactcggtggcgaagaccttgtcgccggcgaagtcgggcaggtcgtaggccacattgtccacctgaggctcgctgaacacggtgggcacggtctggccgaacagctcttgggagatgccttcgacgtcgtagcggttcacgatgcgcagggccttgaggccggtcagtccgaggatcgtgcgcagttcgcccgcaagctgctgggcttcgacatcaaagccgggcttcttttccacgtacacgcgaaaaaccatggaaatcctttcttgaaaatattgaaaaattgaagaagtgcggtaaaagaacttggctcccctctccgaggggagctgtcagcggagctgactgaggggagttgtcatggcggtgaacgtcttgacctcccctcagtcgcctatcggcgacagctcccctcagagagaggagccagctgtatgtttctgctacctgcacctaaacgacttactcggcgacttcgatgccttcggacttggcgagttcggcgaggcgctcctcgatctcttcgtaggccgggatgatgctgccgagaccacggcggaacaggtccttgtcaaggtgctcgaccttgccggagtggtccttctggtcccacagacggcaggaatccggggtgatctcgtcggccaacagcagcgtgccgtcggtggcgcggcccatttcgatcttgaagtcgaccagcttgacgtcgatcttggcgaagatctcgatcagggcctcgttgatcttgcgggccagcggggcgatctcggcgagatcctcgcgagtgcatacgtcgagggccaccaggtcatcgtcgttgacgaacggatcgtgcagatcgtcgttcttcaggaagtactcaagcaccggctccttgagcggcaggccttcctccacgcccagacgggagcagaagtggccggcggccacgttgcgcagcacgatctccaacgggaacatgttcaccttgcgtaccagctggccggtgtcgttcactcgcttgatgagatggctgtcgatgccgcgcttcttgagcaggtcgaagatgatggtggtgatgaggttgttcaggcggcccttgccggtgaagtcttccttcttttcaccatcgccagcggtggcggtgttcttgtattcgacccacagaacctctggatcgtcggttgcgtacagttgcttggccttgccctcgtagagcttttccagcttctccatgactcacctttcaggagtggaatttctgggtgaactaacggtaaaagggtaccaatcgagggctacaacaacactcggcatgacgctacgatgcggccagcgcatcatatgtcgcctcatcgaacggccatacgctgttgggatggcggaggcggatggtattggtccgacaatcgactcattgccggacgcatagtcgttcggagtaacagtatctacgcaagcacgcggacactcagatgttcgtcaatagacaaaacgtgagtgtacggccgcgcacgcacgataatgggagtgacgaaatggtgcaaggaggttcgtcatgatcgatcatattggtttgtttgtttccgacgccgcacagtacgcggatttctacgagaagctgctggccccgctgggctacgtcaagaaagtggcgtacccgaccgccgtgtgctttgccaatgacgaggatggtgacagcgtttggttggagtctccgaaggacggcaacccggtggtgccgtctcatgtggcgttccgcgccaaggatgaggacgccgtcaaggcgttccatgaggccggtctcgcctctggcggtaccgacaacggcgctccgggcccgcgcccgaactatggccccacgtattacgccgcgttcatccacgacccggacggcaataatattgaggccatgctgagctgatcaggccgtggactactccacggtaatcgtcaacgcatcggcaacacggccggccttggcacgggcgtcggcttcggactcgccgacggccagtgccacggccatacgacggtggccatgcacttcgggcttggcaaaaatgcgcaggtccgtgccgggttcggccagagcagcggccatatcggtgaactcggcctcaccgtcgccggccaccacaatcgcatggcttgccgccaccgagccggccggaatcgtgagcgccacatgctcgggggtgatcggcaggccgagaatcgcgcgggcgtgcagcgcgaactcgctcagacgctgggaggtcatcgtcaccataccggtatcgtgcggacggggggagacctcgttgaacagaatcgagccgtcggtgagcacgaacagctccacgccgaatacgccccaaccggtttcgccggtcgcctgagccttggccaccaagccttcaacggcggtacgtgcgatgtcgcgcgcccgctcggcctcgccatcgggctcggtagccggctgccaggactcgcggtaatcgccggactcctgacgttggccgatcggcgcgcacgtcacaatgccggcggacgaagaaacggtcagtaccgtcagctcacgctccagcggggcaagcgcctcaacgatcacgcgcgacacatcgccctcatcggcggcgcggcggccctcctgcgcttcggtccaagcggcatcgatggcgtcggcggaacgcaccaccgactggccgtgaccagacgagctcatcaccggcttgaccacgcacggatagccgacttccgaagctccggcgcgcagctcttccagcgagccggcaaaacgatacggtgtagtcggcaagcccaattcttcgtgggccagtacgcgcaggcgctcgcggtccatgcagatcgcggcgatttcggcgctcggcaccacctgggcgcccgcggccgcagcaccggccagcacatcggtggcgatggcctctacctcgggcacgatgatgtccggcttgatttcatcgaacaatgcctgcaattcggcggcattcgccatatccaacgcgcggtattcatgcgccacctgctgggccggagcgccggcataggagtcagcagcacacacccatgcgcccagtcgcatgagttcaagtgtgacctccttgcccagctcgccagcgcccaaaaacagcacacgggtggggtgcttgcccagcggtgtgcccagcgggtggttggctgcgcgagttgcgggggagacggcggaagtctcggcgggaattgcgggagaggaggcggaagtcacggcagtattcacggcgttctcagtcatacccacattctgccatgacgcgatgatttcggtatgtcgcgtgagcggagtgcctcgcgcggcaaaattacgggcggaatatccggcttcatggggcggtaaattccccatggggcggtaatgagtccatggggcggtttgttggttttgtgaaaccgcggaattaagccgttttgccttaccgccccatgggaatttcaccgccccatggggtaaataccgccccatgggcaggttgccgccccatgaagattcagatgcccgtaacccgccataaatactgcgtatagacacgccattgcgtgtgtaacagagccgtcgtaccttagcaattaccggccgatgaagtatggggcggtcgggccaacattttgggatgcgacatatagcgaatagcggcgtgtcggttccggcgtttcaggctacaagccggcacgctggcaatagtcgaagtacttaacgattccgcctatgcggggctcgaattcggtgacgtacgctcgctgagcctgctggagactccgggcgcgctggacgtggcgctggaacttggctcgctgtccaaaatgtatatggtggccggctggcgcggtggcatggcgattccgccgcattcgtggattggctgctcaacacggccggcgtggcgctgatgccgggggcctgcttcggtcaggcgggcgaaggctgggtgcgcatcagtctgctcaagcacaccgccgagttgttccaggccgtggcccgcgccgatcgtgcgctgcgaagcgcgtgattcaatattgggcaaaatgcggcagcccataccatttccggcctatccaagcagcgcggccgacgctattgccgcgcggtggtttaggatgaggcaatgcgcgaaaacgggattgaagagagcattgatcgtccgctgactatcgctcttgtggtcgatacggtgggcaatcagggcaacggcacctccaattcggccttgcaatgggctgcggaattggagcggcaaggccatcatgtgaggcttgtcggtataggggcgcccgaatatccggcgcgtgtgaataaggtgccactcgtctcgtgggtggccgccaagcagctcatgcaattcgccgaacccagcgacacgttgttccgcaccgctttccaaggcgtggatgtggtgcatatctatatgccgttcaaattcggccgtcgtgccgctaaagtcgcccaccaaatgggcattcccgtgactgccggattccacctgcagccggagaacgtgctgtattcggccggcccgctacgtcgcattcccggtatttccagcttcctgtactggctgttcaagcactggctgtacaagcacattgaccacatccatgtgcccaccgaaatgaccgcgagcctgttgcgcgcgcacgggtataaagccaagttgcacgtgatttccaatggttattcaccggtgtattcgccgaagaagccggccgatccggatgcctcggctcccgtgccgttccgcgtcatcgcttccggccgactggctagcgagaaagatcagattacgctgatcaaggcggtgtcgatgtcccggcacgccggcgatattcagctggtgatcgccggtactgggccgctcaagcagtatctcaagttccgcgccgggcgtttgctggcgcgcaaggccgatatcggattccacaagcacgccgatatgcccgatttgttgcgttcgggcgatttgttcgtgcattgttcgattgccgacatcgaatcggtgagcgtgatcgaggcgatggcgtgcggattggtaccggtgatcgccgcgtccgaactgtcggcggccggccagttcgcgctgatcgacgagtcgttgttccccgtgcgggacgcggccctgctggcccgacgcatcgattggtggatcgcacatcaggccgagcgcgccgaatggggcgagaaatacgccgaatacaccaaggcgcattattccgtggaagcctcggtccacaagttcgtggatatggaacgcaaggcgataggggagtaggagccttctcgtttgcggagaggttttccctcagtccgcctgcggcggccagctccctcatcggcgggagctacgaaaaaacctccctctgatgagggaggtggcatcgcgaagcgatgacggagggagggattagcgaagggttttacaacaactcaataagctgatcgacttcttcatgcgtggtggcccagctggtgcagatgcgcatcacggtatgcgtgtcgtcggccttctcggtgaagccgagcttgacctcgcgctccagacggtcgatggtcggctgatccatcgtcacgaaaatctggttggtgggcgcttcgaaagtgagcatgtagcccttggcgcgcagggcctcgcgaatacgatcggccgcctcattggcgttgcgggcgatcttgaagtacagattgtcggtgaataaggcgtcaaactgcgcgcccagcacgaagcccttggccagcaaggcgccgtgctgcttgatgcgggtcaggaagtgcttcggcgtgttgtgcttggtaaacaccacggcctcgccgaacagcgcacccaccttggtaccgccgatgtagaacacgtcggcgatggtcgccagatccgtgagcgtcatgtcggaaccagtggcggtcagcgcgtagccgagtcgcgcgccatccacgaacagcggcatatcgtacttatgcgccacatcggcgatagcctgcagttcggctttggagtagatggtgccatattcggtgctttgcgagacgtacacggatccagggaacaccatgtgctcgtagttgccgtccgcatagaaggtcttgcagaactcgtccagttcggttggatccattttgccgttgtgttggggaatcgtaagcaccttgtggccggagaactcgatggcgccggcctcgtgcacgttcggatggccggaggcgaccgcgaccacgcctgcatacgccggggtgatggtgtcgatgacgacctggttggtctgcgtgccgccgacgaggaaccacacatccgcgtccggctggccgcaggcctcgcggatcttggccttggcctgatcgctcagttcgtcggacccgtagcccgaatacagatggttgttggcttcagccacggcttcaagcactgcgggatgggcggcgcgggagtaatcgttctcaaaagacagcatgacggaccttttgtccttgtgttagatgaattggatatgcccgagtgtacaacgtggcggttcccggcaggagcggggaattcatggagaaaaacaaaacccttccgcgaacggaagggttttactggggtggccaacgcggctcgaacgcgcgaccttctgaaccacaatcagatgctctaccaactgagctatggccaccatggtgtcgtattcagcaagctgaattcgcacaacaggtgaatactatacacaactttgcggatgtgtgctcatcggtgtgtcgcgatggaatcaagcggttggtttcattcttggggccaggctgtgggctgtctcaaatggtgggatgtggacgagtgggtcttgtgtggcgattgatgaaaagtcagggcacacaacggcgtgatggtgcggctggggattgcagagatgattacgtgagcgttcacaatgtgagcattatgtttcatatcaaccgcgacccgcctagtttcatgcgatgttacctacaccgaacaagggaagagaaacaccatggaaaaggttaaagcctttgcagattggctgaccaagtggtttacggtcatcgtcatcgtctgggccgtcttcaactacttcgtgccggccgccagcctgtggggcaaggcgtacaccggctacatgctgggcatcgtgctgttcggcatggggctgaccctgacgctggacgatttcaagcgcatcctcacccagccgatgatggtcatcgtcggcacggtggcccacttcgtcatcatgccgctcgtcgccgtggccctgtgcgcgatcttccacctgtccggcccgctggccgtgggcgtgattctcgtcggctgctgcccgtccggcacctcctccaacgtgatgagctacctgtcccgtggtgacgtggccctcgatgtctccatcggcatcctctccaccctgtgcgccccgttcatgattccgctgctgatgcagctgctggcctcccagtatgtgagcgtgccggtcgaatccctgttcctcaatgccgtcaaggtggtgctcttcccgattgccctcggtgtgatctgccacatgatcttcggcaagaagatcgagaaggtcacggtggccctgcctatcgtttctcaggtggccatcctgctgatcatcggcgtggtcgtcgccgccaacggtccgaagctgttcgtggccagctccctgatggccatcccggtggtcatcctgcataatctgtgcggctactcgctgggcttcggcttctcgaagctgatgtacaggatctacccgaagggcttccgctacgcgcagcagaaggccatcacgttcgaggtcggcatgcaggactccgccctgggcgccacgctggccctgacctccttcgcgtccaacccgctcgccgccgtgccgtccacgttcttctccgtgtggcacaacatctccggctccatcctgtccagctggtggcgcaaccatgacgaccggcacgagattcattgggattctgacaacggcgagaagggctctgccaagagcaccgtttccgtggcccacccgttcgacgccgacaaggccgccaaggtcgctgcctgaaatcctgagatggtgagaaaggtcgggtaaggcacgactccagtcagtcggtcactcacctttcctacctcgcataacatagccgctcccgcttactcccgattaatgtatcgggcgtttcgcgagggcggttttgctataattagtaatgcagaaagcggcaaggtgatacggcaaagaggccgggtcgctagaggttcccatcggatatggaagagcacgagggtgtgctggaaacagataacacagaagcggcatgtggtgaaaagaaacataatgtaacctccttggcggtgcccccgtgtgacatagtctccgcgggggcacctgctgtgtggcgttcgcttttttgcgacgcattcccgggaatgttgcgttgggagggcgtgtgtgcgtgtgttgtgcgacgcattcccgggattgttgcgccagaaggagaggaaaagtacagggcgcggattgtcccaagctagtgagtcgaggcccggcgcgtcgttgtccggcggaatcgtagtatagatattcgtgtgtgccagcagcacgccttatgtaacaggcgagcatgctgggatatccttcaaaccgctgatcgcacgtagtaatgcgccgacgggaggggcgaaggccatcgggccggtggactgggctatcttttccgattcgtcgggtgtcgccaacaggcggatgccaagcgagtgtgctgaaaagtgtgggcgcagtgcggcggtcacacaaaagcaagagaaaccactgaatcggagaattcaagttgcctactattgaacagctcgtccgtaagggacgtcaggcaaagccgaagaagtccaagactttggccctgaagggcagcccgctgcgtcgcggcgtgtgcacccgtgtctacaccaccaccccgaagaagccgaactcggctctgcgtaaggtcgctcgtgtgcgcctgtcctcgggcatcgaagtcaccgcctacattccgggcgagggccacaacctgcaggagcactccatcgtgctcgtgcgcggcggccgtgtgaaggatctcccgggtgtgcgttaccacatcgtgcgtggcgcgctcgatacccagggtgtcaaggaccgtaagcagggtcgttccctgtatggagcaaagaaggcgaagtaagagatatgtcacgtaagggaccttccaagaagcacgtcgtgctgcccgatccgatctacggttccaccgtggtggcgcagctcatcaacaagattctgcttgacggcaagaagtcgatcgccgaagacatcgtctactccgcgctcgatatggtcaaggagaagtccgaccaggaaccggtggctgtgctcaagcgcgccctggacaacatccgtccgtccctcgaggttcgctcccgccgtgtcggtggcgccacctaccaggtgccggtcgaggtcaagccgaaccgcgccaacaccctgtcgctgcgctggctgaccgacttctcccgcgcccgtcgtgagaagaccatggctgagcgtctcgccaacgagatcctggatgcctccaacggcctcggtgcttctgtcaagcgccgcgaggatactcataagatggcggaggctaacaaggccttcgcgcattaccgctggtaatcactcgccctgagtaaaactaaggaaaaagatggctgaagagatttcggacctccacgacgtccgcaatatcggcatcatggcccacatcgatgccggcaagaccaccactaccgagcgtattctgttctacaccggtaagaactacaagatcggcgagacccacgacggcgcctccaccatggacttcatggcgcaggagcaggaacgtggtatcaccatccagtccgctgctaccacctgcttctggagccgtcagtcccacgacaccaaggacaagttccagatcaacatcatcgatacccctggccacgtggacttcacggccgaggtggagcgctccctgcgtgtgctcgatgg

SEQ ID NO: 1606 - DNA, 30791 bp, Unknown
  R221_24m  MAG No. k141_55860
atctggtgcccgaagtcgagtcggccgcggagatcaagctcaactccaccaagccgttcgacgagttcaacgaggccaaggcgctgggcatcgacaccaagcccgtgttcatcggcccgtacacgttcctgaagctcgcccgcaccccggaagccaccgaactcgagctcgacaagggcctggtcaacgccgtggccgccgtctacgccgaagtgctcgacaagttcaacgaactcggcgccgcatgggtccagctcgatgagccgtacctcgtgctcgacaaggagccgggcgatgtggagctcttcaagaccctgtacaccaagatcctgtccgccaagggcaacgtcaaggtgctgctcaacacctacttcggccacatcgccgacgtgtacgagaccgtcaacctgctcggcttcgacggcatcggactggacctcaacgaaggccgtgaagagaacctcgaagccgtcgccaagtatggcgtggcctccaacaccgccatcttcgccggcgtgatcaacggccgcaacatctggcgcaacaactacgccacctccctcggcctggtcgacgccctgaagcaggtcaccgccaacgtggccgtctccaccgcatcctccctgctgcacgtgccgttcagcactgaaggcgagaccggcatctcgtccgaagacctcaagcacttcgcgttcgccgtggaaaagctgaccgagctcaaggaagtcgccgctctggccgacgccaccgaggacgagaagaaggcatccgccgccctcgccgccaaccaggccctgttcgacggcacccgcgtggccgccgacccggccgtcgccgagcgcatcggcaagctgtccgacgccgactacgtgcgccagcctgcccgcgaggagcgtcaggccctgcagcgcgaggccctcggcctgccgctgctgccgaccaccaccatcggctccttcccccagaccaaggagattcgcgccgagcgcgccaagctgcgcaagggcgaggtcaccaaggaagcctacgacgagttcatcaaggcccagatcgacgccgtcatcaagaagcaggaggagatcggcctcgacgtgctggtccacggcgagttcgagcgtaacgacatggtcgaatacttcggccagaacctcaacggcttcctgttcaccaagaacgcttgggttcagtcctacggcacccgttgcgtcaagcctccgatcgtctggggtgacgtgtcccgcgccaacccgatcaccgtggaatggtctgcgtacgcccagtccaagaccgaccacgtgatgaagggcatgctcaccggcccggtgaccatcctcaactggtcctggccgcgcgaggacatcacccacgaggagcagaccaagcagctcgccctcgccatccgcgacgaagtgctcgatctcgaggccgtcggcatcaaggtcatccagatcgatgaggccgccctgcgtgagaagctgccgctgcgcaagtccgactggcacgtcaagtacctcgactgggccgttccggccttccgtctggtgcactccgccgtcaagccgaccacccagatccacacccacatgtgctactccgagttcaacgacatcatccgcgacatcgacgcgatggatgctgacgtgatctccttcgaagcctcccgtggcgatctggtggtgctcgacgccattcatgacgcgcacttcgagaccgaggccggcccgggcgtctacgacatccactccccgcgtattccttccgagaaggagatcgaggatcgtatctacgagatccttgacaagatggacgtcaagaaggtgtggatcaaccccgactgcggtctgaagacccgtggtaacgccgagacctggccgagtctggagaacctggtcgccgccgccaaggccgtgcgcgccaagctcgacaagtagcggaaatcaccgagctccctctgtatgagggagctcgggtttatgtaaggaaatcagcatgcattccccgatgttcacccttgaggtctttcccccgaagcgcaacgctcccgtggacaccatctatgacacccttgacggcctggaggggctgaaccccgacttcatttccgtgacctacggccacggcacccattcggatcgcaccgccaccgcgcgcattgctcatacgataagcaaggagtacggcattcccgcagtcgcgcatctgaccgcgttgtattccgacaaggcgaaaatcgacgaggccctcgacatgttcgagcaggccggcgtgagcgccgtactcgcattgcgcggcgactacatcgacggcgagcagctggtaggcgagttcaaccacgccagcgacctcgtgtcatacatccgctccgtgaagccgggcctcaaagtgttcggcgcctgctacccggaaggccactaccaggctgactcgctggaccaggacatcgaaaaccttaagatcaaggtcgatgccggcgtcactcacctgatctcccaactgttctacgacaacgaggacttctatcgcttcctcgacaaggcgcgcgccgccggcatcaccgtgccgatcgaggcgggcatcatgccggtgcgtggtgccaagtccgtgcgtcgcatggccgaacgcaacgcctcgcgtatcccggacaagctcaacaccctgctgaacaagtgggaggacgacatccagtccctgcgtgccgccggcatcctctacgcttccgagcagatcgccgacctcgtggcccacggcgtggacggcgtccacctgtattcgatgaaccaccccgccaccacgcgccgtatctggcgcaatgcggaaccgttgttcctcggtacgcaaggttgacgcatatcgcggcgcggcgcatctcaatgcgtcgcgccgcacgttaatctgctggcgaaacccagagttcccccagcggccgatggatatcatgaacgtacaagccaaccaaagcgatggaaggaagtccgttatgtgcactggtgtccgtttctccgatgatgagggcaacacctatttcggccgtaatctcgactggagtttctcatatggggagaccatcctggtcactccgcgcggctaccgctatgacacggtgttcggtgcgggcggcaaagcgaagccgaacgcggtgatcggcgtgggcgtggtcatggccgataggccgatgtatttcgactgcgccaatgaacatggtctggccatcgccggcttgaatttccccggctacgcctcgttcgtccacgaaccggtcgaaggcacggaaaacgtcgccacgttcgaatttccgctgtgggtggcgcgtaatttcgactccgtcgacgaggtcgagaaggcgctcaggaacgtgacgctcgtctcccagatcgtgccgggacagcaggagtctctgctgcactggttcatcggcgacggcaagcgcagcatcgtcgtcgagcagatggccgatggcatgcacgtgcatcatgatgacgttgatgtgctgaccaatcagccgacgttcgacttccatatggaaaatctgcgcaactacatgtgcgtcagcaacgagatggccgaaccgacttcatggggcaaggcctccttgaccgcctggggtgcgggtgtgggcatgcatggcatcccgggcgacgtgagttccccgtcgcgcttcgttcgtgtggcctacaccaacgcgcattacccgcagcagaacgatgaagccgccaatgtgtctcgcctgttccacaccctcggctccgtgcagatggtggacggcatggcgaagatgggcgacggccagttcgaacgcacgctgttcaccagcggatattcgtccaagaccaacacctattacatgaacacctatgatgaccccgccatccgttcctacgccatggccgattacgatatggattcctcggagctcatcagcgtcgcccgatgactccttcccggctcatgccccattcggagggcatgagcgtatatagtggaatcttatggaatcgtcgatgttcaaacccagctccatggatctcatcagggcaggtctgcaagacctcgacaaggcccgcaccttgttcgaccagctcaagacggacgacattcccgatgagcgatgcgccgaactgctgagcatgctggcccacgcctgcgaccccgatatggcattgagcaatttcgtggatatcgtcaacgcgatgcaatccagccagcgcgatctgaaacacgtcatccccgacaacgacgccctgaagcgtctggtcacggtgctcggcgtctccgacgcgatgggcaagttcatgcgcttcaagccgcagcttgtggaggccgcagcagtcgacaactgcaacagccatctgttcaatcacgcgcaacgccgtgcacgtctgctcaaggcggtcggcgcggacccggacgaatcggccatgcccgtcgcctccaaggatttggccgaagcggccacggccttgcgttccagctaccggaaccaactggccgccatcatcgcccaggatgccgtggcggacgacccggcctccatccaaccgaccatcagccgcgaactgtccgacctcgcggacgcggcgctcgaaggcgcgctggccatcgcccgccacgaaaccgagggcagcgagcacgtgcgcttcaccatcatcggcatgggcaaactcggcgcacaggaactgaactacgtctccgacgtggacctcatctacgtggtcgaaccggccgacaaggacgtggaccatcagacgctgatccgcgtgggcaccaagatgggcaccatgctgcagcgtgtctgccagtccgccatcatgggcgtggccgagcagccgctgtggcagatcgacggcggcctgcgcccggaaggcaaggacggcgcgctggtgcgcgtgctctcctcgcacaagaactactacgagcagtgggccgagaactgggagttccaggcgttgctcaaggcccgcccggtggctggcgaccctgacctcggccgggcctacatggatatgactcggccgttcgtgtggagcgcgtccaagcgtaagaacttcgtctacgactgccagaaaatgcgcaagcgcgtggaagatctgattcccgcacctctgaaggatcgcgaaatcaagctcggccgcggtggtctgcgcgatgtggaattcaccgtgcagatgcttcagcttgtgcacggccgtaccgatgaatcgctgcgcaccagcaacacgctcgactcgctgcagcgcctgtccgaaggcggctacgtctcgcgcaaacaggccgtgcgcatgtctcaggactaccgcttcgagcgcgtgatggagcatcgccagcagatctggtccctgaagcgcacgcacctgttcccggacctcggccgggcctcggtcggaggcctcgaaaagaagcgcgacatcgacgtggatgagctcaaccagaaccaggagctgcgtcgcctcgcccgcgcattcggcctgcacccggaagaactcgtcgacaaatacgacgacacccgtcgcgaagtacgccacctgcacctcgacatctactatcgcccgatgctgccggtcaacgcccagatggagaacgaccagatcgtgctgagcgtcgaggccgcacaggaacgattcgaatccatcggcttcggcgacccggacgccgccatccgccacgtgcaggcgctcactgccggcgtgggacgcgcggccaaaatcaaccgcatcatcctgcccgccgtcttgcagtggctgggcgagggccagaacccggacatgggcctgctcaactggcgcaagctggaggagaacttcggcaccgaatccggctacctcggcttcctgcgcgactccacctccgctgcccagcgtctgtgccacatcctgtccaactcgcgattcctgggcgacgcgctcaacaagtcggtcgaatcgatcagttggctcggtgatgacggcaatctgcaggcccgcacgcgcgaggcattggatgtgcagaccggctcggcgctggaacgtttcggctcgaacatcaacgagttcgccgcctccatgcgcgccatgcgccgccacgaaatcgaacgcatcggcctgtcttggatgagcggtgtgatcagcgactccgacagtctcaaggccatgaccgacgtgtatgacgcgatcatcgacgcctcactgacctgggccgtgcgccaccagatcgccgcgttcggcgtcgaaaccgcgccggccggcatcaccgtcatcgccatgggccgttacggcgggcgcgaagtgaacttcagctccgatgcggatgccattctcatctaccgtccggccgacgatgccgacgacggccaagccaacgccttcgccaagaaggtcgtggaagacctgcgcaacatcctgcaaggcccgacgacgctggaaccgaagatcgaactcgacctggacctgcgcccggaaggcaagaacggcccgctcgtgcgctcctacgcctcctgcgaggaatactacgaatcctgggcctcgacctgggagcgccaggcgctgctgcgcgcccggtacgcggccggcgacgccgaactggcgcgggacttcctgatcaacatcgccgacccgttgcgctacccgaccacggagctgaccgaggccgaattgcagaacatccgcaagctcaaggcccgtatggaggccgagcgtctgccgcgcggcgtgcgtcgagaacgtcatctgaagctcggcaagggcggtctgtctgacgtggaatggaccgtgcaactcatgcagctccagcacgccggcgatatcaaagatctgcgcgtcaacggcacattggaggcattggacgtgctggaggccaagaagctcatcagcgctatcgatgcgattcagctgcgcaaggcatggacgttgtgcaccgcggcccgcaacggcaactatctgtggagcgggcgcgccaaccaggccgatattctgcctgatgacatctattcgctgggcggcatcgccgtctacctcggctacggcgcccaccgcggccagcatttcgagaacgacctgctggccgtgatgcgcaaatgccgtgacgtatgccagcgcctgttctacgggcaggccgaagacgaggcgactgcggcaaccaccgccacggcctccgccgcaacgcagcagccgcaaaccgcgcctcgcccgcgtatgcacgtgatcgcaccgcgactggagcggaaccgacgccgcgcgcagcgatagacctttcttgtattgcgttcactacgttcattaggtcgattcatcgttcattaggtcggtccgccgccgcataccttgttggaatggcggcattccaacaacagatacgagggtgcagtgacctaatgaacgtcaaatcgacctaatgaatgagctctggcgttccaaagcagatatcagctatacagacacagcatattcgttggattttcaggtgaacactcggtgaatgcggctgtccgaaaaatggcgtaagttatattaggtcacacaagggtggccacctgaaaaccacgagcgaaaaggtgagccttgtctgaagaaacgccaatggtcggcaaaagcgtcgtaacgctggacggcctgtctacaaaccagattctcgacctgctgcataaggccgaatacatcgattcccaccgcaaagaggttgcccatacctgcgatgggcgagtgctggccacgctgttctacgagccctccacccgtacgcgcctgagctttgagacggcaatgctgcgtctcggcggcaaggtcatcggattcgccggcgcgcagctggcctccgtgaccaagggcgaatccatcgccgacacgttgaagaccgtgtccaactacgtggacgtggtcgccatccgtcacccgaaggagggtgccgcgctggtggcctcccgcgccgcatccgtgccggtgatcaacgccggcgacggcggccacatgcatcccacgcagacgctggccgacctggccacgctgcagtcgcgcttcggccgcatcaccgacctgaccgtgggactgtgcggcgatttgaccttcggccgcaccgtgcactccctgatcgagaccctgtgccgcttcggcaacgtgcgcttcgtgcttatcagcccggacgagctcaagaccccgcagtacgtgatcgaccgcatcaacgccaccgacaactgctcctacgtggaagtgcgcgacctggcctccgtgatcggcgacctcgacgtgctgtacatgacccgcgtgcagaaggaacgcttcttcaacgaagacgactacctgcgcctgcgcgacacctacattctcgacgaagaaaagctgcagctcgccaagccgtccatggccgtacttcacccgctgccgcgcgtcaacgaaatctccgtggacgtggacgacgacccgcgtgccgcctacttcgaacaggtcaagaacggcatgctcgtgcgcatggccctcgaaagcaccgtggtgggcgacgaactacccggatacgaaccgctcaaccccaaggaggttcaggcctgatggaagtcaccagcattcagaacggcatcatcatcgaccatgtgccggccggaacctcgctgaaggttctcgaatacctgaaaatcgacccggccaaaaccaagcttgcgctcatcatgaacgccaactccaagcgttacggctccaaggacatcatcaaaatcgaggatgacaaggacatcgacctcgatgtgctcggcttcgtggcccgccaggccaccgtagacgtggtgcgcggcggcaagatcgtcgaaaagaagcagccgaacctgcccgagcacatcgtcggcgtgatctcctgcgtgaacccgcgctgcgtgaccaccaccgagcccggcatcaagcagatgttccacctcgtgcactctgaacggctcgaataccgctgcgactactgcgacgaggaagccaaactgtgagcatcaccctacgcaacatcaaggtctggaacaccggcgaagtcatcgacctcatggtgcccgggaccgctgccgcctacttcgccgacacctccgccgtggctgacggtgccgatatcgacgccaccggactgaccgtggcccccggtttcgaagacccgcacgtccacttccgcgatcccggccagacctacaaggaatctatggcctccggctgccgcgcgtccgcatccggcggatacacgaacgtgctcatcatgccgaacacgttgccggcactggatgggcagaccgtgtctgacctggaagcggccggtgcgaaagaggttctggatgccggcttcgacaacgtcatcgacttcctgcagcagtacgatactgcgcacgatgttcaattgccggttcgttacgatctgtgcgtgtgcgcgtccaaggatcgcgccggtcatgaggcaagcgacgttgccgactggctcaggtacgtgcccggattcgaggtcgacgccaagacgccggccatgctcacgcaccccatcaccgcaattagcgacgacggttccgctgtgacgccggagatcctggaccaggtgctggagaacgtcaaggcctccgacctgtacctaatcgagcattgcgagcatcacgatacaggtgccgtgaacgaaggcccggtctcgcgcgaacttggcgtgcccggcattccggaagacaccgagctcaagatcgtggcccgcgatatagaagcggcccgccgcactggtgtccacgtacacttccagcatgtgagcactgccatctcgttcgaggcgattcgcaaggccaaggccgaaggattgccaatcacctgcgagaccgcgccgcactatctggcgttgagcgacgaggcgctgctcaagtacggcacgctcgccaagatgaatccgccgctgcgctccgaagcggaccgcaaagccaccatcgcggccatcgccgacggcaccgtggatctgctggccaccgaccatgcgccgcacacgttggcagagaaggaactcggcttccttgaggcgcccaacggcatcatcggactggaatgcgcgtacggcgtgtgccacaaggtgctcgtcgacggcggcttcatttccgatgagcgtctgatcgagctcatgtccgtgggacccgccgaactcatggggcatgtgccaaccgacgtggccgcgctggtcgaggactacgccgaacccgcgcccactggggatgatccggatggcgtgattgcgggggagagcgacgctcagccgcagcgtgaaggcgtcaaccgactgctcgacctgagccgcgtggatgacgccgacaatgtcgacctcgtggtgctcaacaccgctgaggaatggaccgtggaccctgaacagttccactccagggctcgtaacaccccgttcggcggctggcaggtcaccggacgccccctcgccacgatcatcggctcccagctgatgttcagccgtctgtagataacataaggagcagcatggatcgcctgatcgaagcgattgacaacactcagaaccccagcgtcgtgggcctcgaccccaccgaggcgttggtaccgccgcaggtcgtggcgagctttgccgacgaggtgcgtgactcggtcgaatccccggaggaaatcgaatccgcgcagctggccgtcgcctacttcgaatacaaccgcacgatcatcgacgccatcgccgacatcgtgcccgccgtcaaaccgcagatcgccatgtacgaggcgctcggccccgccggcgtggacatctacacgatgacctgcgaatacgcggcccagcagggcctctacgtgctcggcgacatcaaacgcggcgacatcggctccactgcagccgcctacgcccaccacctgaacggcgtgggcgacttcgacccgtggcatgaggatgcggtgaccgtcaacccgtatctcggcaccgacggcatcaccccgttcgtcgaggccgccgccgaagccgacaaggacatcttcgtgctcgtgcgcacctccaacccgtcctccagcgaactgcagatgctcgacctggccgacggcacgaaggtctacgagcatgtggccgatctcgtggaaggctggggcgccgagaccatcggcagccacggctactcccgcgtgggcgcggtggtcggtgccacccaccccgaggaaggcaaggcgttgcgtgaacgtatgccgcacacgttcttcctcgtgccgggctacggtgcgcagggcggcacggccgcggacgtggcaggcatgttcgacaagcagggcagcggcgccatcgtcaactcgtcgcgcggcatcatcggcgcatggaagaagagcggcaagtactccgaattcatgaccgccgacgaggcgctggaccttgtggcgagcagcgcgcgccaggcggcgctcgacatgcgcgataatctgcgggttgccgtatataggtaggtagattgtccggctgtgggctatacgtgagtgtgggctggaaaccggagccgagtgtgtttaactacccctcagtcaacctgcggttgacagctcccctgatagggggagcttgatgtgctgaataggaatgaaatgacaactttcacccccacccatgatgtggttgcggaggcgactgcggccggattcttcccgccgcgccacaacgtcgaaatcacgcaggttacggaactgaccgaccgcgtgatgcgactgacattccgcgacccgttcatcgcctcccacgccaagcccgcccagttcgtcaacctgttcacgcacgacgacttcatgctcatgccgcgtccgttcggcgtcagcgaagtcgacggcgacgaagtcagcgtgatcttcgccgtcgtgggccacggcaccgaacagttggcaggactgcaagacggcgacaccgtcgacgtgctcggcccgctcggccgcggcttcaacctcaaggaagacgccaactacattctcgtcggcggcggactcggcgtgcccccgctaatctacgccgcgcaaaagctcgccgaacacgacgcctcctttgccaccgccgtattcggctaccgcaacgaccacttcgctgaggaatacgtctcccggtacgcggactggtcgtggagcatcgacgacgccgaaggcaacgtggtcgacctgctcaacaaactcgaacaaggcgacgacctgaaggcctacgatcgcaagccgatcatcttgtcctgcggaccgctgcctatgatgaaggccgtggccgcttgggccgccgaacgcggcatccccgcgcagctgagcatggaacagcgcatgggctgcggctacggcacctgcgtgctgtgcaccatcgacaccgtggacggccggctcaaggtctgctccgacggacccgtgttcactcgcgaacagctcggatggggggagtgacgatgagcgcaaacaaccagtccgcgcagggcagcgacaaccacatcaacctgtacgagccccacgtgtggaagcaccacaccaaggtggccggtctggaatggaagaacccggtcggcaccgcctccggcaccttccagtacgccgccgtccgctggttctacgacgtcagccagctcggcgccgtatgcaccaagggcgcctcgcccgtgccgtgggagggcaacccctcgccgcgcaccgccgaatcgccggccgcgaacatcaacgctgtgggcctgcagaaccccggcatcgaccattacttggccgaagacctgcccaagctcaaggccgcgggcgcgttcgtcatctccaatgtcgccggacattgcgatgacgattacgcggcggtcgtggaaaagctcgccgactccgacgcggacatgctggaaatcaacgtcagctgcccgaacgtttccgccggcggcatgagcgtgggcaccgacccggtggccctcgccaatcttatggaccggctgcgcccgatgaccgacaagccgatgatcgtcaaactcacgccgaacgtcaccgacatcaccgtgccggcgcgcgcggccgtggaacacggcgccgacgcgttgagcatgatcaacacgctcaaaggcatgcgcatcaacattcgcaccggccagccgatcatcgccaacgtcaccggcggcgtatccggcccggccgtgctgccggtcggcctggcagccgtctatcgggtgcgcaccgcactgccggagattccgatcatcggactcggcggcatcgacagtggtgagaaggcgctcgaatacctgtacgccggcgcgaacgccgtcgaagtgggtgcggccgcgctcttcgacccggtggccccgctgcgcgtcgcccgcgaacttgacgacctgctggacagccgtcccgaactcgctgctaaactggccgcaggacagacttggaggtaaggaacatcatggcagaaacactcgcacatcgcttcactgaattcctgttggaatccaacgcgctgaagttcggcgacttcacgctgaagtccggccgcaagagcccgtacttcatcaacgccggcgccttcgacgacggcaagaagatcgccgcgctcggcacgttctacgccgaaaagattagccaggccatcgtgcacaacacgattccccgcaacatcgacaccgtgttcggccccgcctacaagggcattccgctggccgtgtccaccgcgatcgcgctgaacgccggccacaacatgaccgttggatacaccttcgaccgcaaggagaagaaggaccacggcgacggcggctggatggtcggcaccccgctgaccgacggcatgaaggtgctgctcgtggacgacgtgatgaccgccggcaccgccgtgcgcgaagtcatccccaagctcaaggccgaggcgaacgtcgaggtcgtgggtctcgtgctctccgtggaccgcatggagaagaccaaggactccgacctgtccgccgtgaaggccgtggaagccgaattcggcttcccggtgctctccatcgccaacgtgcgcgagatcttcgacgccgccgccaagatgaagaactccgacggcaccccgttgctcagccacgatatccagcagcgcgccgccgcctaccttgaggaatacggcgcctgatcgtcttcaacctaaaaccaaaagcgggcttgcgagcccgctttttttattacgatccatgaacagcagtaccatattaaggcagaagctttggcaaggagcgtgctatgaactggttagttggtatagggctgtttgcgctcgtggggatatgcagttacttcggcatcgagcatcatctggacagcaaagcgaacaagttgtcgcaaggtaatgaagaagaccgccgagatgctgccgaattacgtgatatcgccgccaaaatcgatcacggtaagtattacccgatgctgtaacgggcaatctgggcctaaattgatgctatctccgtttcgaggggctgatgtcgtggtttccagagatctacttccgtttcgaggggctgatgcccaagtagaagcagcatgaaaatggcggaatgacgttggggtgatgccgctcatactcgggatatgacggatgaacagccccttgaaacggagatagatgtctccagaaggccaaatcagccccttgaaggcgagatagggttttaaactctgggaccgactcgcctgtgatgaaaacccgctcggcgtagaattaccgtaggttcgttacattcgaacaaggaaggccgccatggggaacatcaccgacgatatccggcaacatttcgacaccttcgccgcactgccgttcaccgaggcggacagtctcgccctgtcccagctggcctacgcgcgcatgccggataacgttccgcgctatcacgaggattcggcggacgtcagcggcatgattcccacggtctccatccgcgacctgctacgcgccgaatgctatgacgccatgttcggcaaggtgtggtcgccgcagatgaacgtcgatctgctgcgtgcgatgggggagagcccgcgctggcgcgacctgcgcgtcggcgaatacgtggatgaattcgacgccgaaaccaccaaacagttctcggcctgcgtcttcgaactgggcgacggcacgctgtacgtggctttccgtggcaccgacagttcgatcgtcgggtggaaggaggatttcacgatggccttccgccgtccggtcgcctcgcaggaggccgctgtgcggtatgtgacttatattgccggccgctgggccgggccgattatggtcggcggccattccaaaggcggcaatctggcggtatacgcggcggccaatgtgcccggcgaaattcagggacgtatcacggccgtgtattcgcacgatggtccaggcttcgatgaggcgttcttcgatgaggatgggtatgcgcgcattgcgccgaaaatccataaatcggtaccgggatcgtcgatcatcggcatgctgtttgagactcgtgagcatgtggaagacggctatacggtggtcagcagcgacggtgccagcatcatgcagcatttcgcattgcactggcaagtcgatcatggccaattcgtacaggctgatggactgacaagtagcgcgcgatacctggcacgcacgatcaacggatggatggcaaaatacgacgacgagcatcgccgcaagttcatcgaaaacctgtttgccatcttcgaggctggcgggtacgtcacgttcggcgaactcacttcgcatttgacacagtcactgccgattatgctcgccgcggcccgcagcattgatgttgaagaccgtgacgtgatgattgaggtgcttaagggatttgccgcgacagccgctacgtcggtaatctcggccaagtagccggaggccatcaaactggttttgccagtcagtctcaatagcgcaagagccggcccctgagatactcaggggccggctcttacttccatttccccagcggggttggcttaatcgcagtatatctcactgctgaccatgactgttttacttactcctaatcaatgagcttgtagccgtgatcggcgactacggacttgagcttggtgaggtaggtttcggcggccttggatagcttggaacgctcgttcgtgatccagccgaccagcatcgtttcgtcggtgtcgagcggcacggtgacgatcttctcattgttgaggtcgccgttgtcgatgccggtgcacaccgtgtagccgttgaggccgatgatgaagttcagaatcgtggcgcggtcggtcacgttgatctgcttgggggagtattccggccagaccgcctcctcatagaagtagaacgagccttcctcgccctgttcgtactggatgaacggatagggcttcagatcctccatggtgatgatctttttggcggccaatgggttgtcccgtgagatgaacacgtgcaggggggcgcggaagagcggatggaattcaaggtgtttctcgcgcaggagtttgccgatcacgtccttattgaagtcggacagatagatgatgccgatctcggactgcatgttcgccacctggttgatgatgtcacgtgtacgggtctcacggatcgtgaactcgtattcgtcggacttaatggagttgatcatctccacgaaagcctcgacggcgaacatgtagtgctgggtggagacctggcacagctgcttgcgcggcttggcatgcttgtaacgctcttcgagcaggtcggcctggtcgagcacctggcgggcgtaggtcaggaattccgcgccgtccacggtcagggcgatgccctgcgaggagcgggtgaaaatctcgatgcccagctcgttctccaattccttgaccgacgagctcagggccggctgggagacgtacagggcatgggaggcctcgttcatcgagccgcactcgacgatcttgacgatgtatttcagctgcagcagtgtcataaagtctatttatatcgctagggatggtcgccacacgggtttataacctcatcaatccactatggcgacacaatatgagatgcctcgcatatcgcggacgctgtgtaacgggatatgcgccacattggtaacctgaggcaggaccagtacgatgccatccagaccttctccttctccagtatcgaccgcttctccacgccgagcctgatgaccaggctcggcgccgacgtgatgaacatccagaacgccttcatgatgattctgcgcatggtgccgcgtgccgcgtcgttgaagtgctcaccgaacagtgcgacatgccggtcgccaaacggccggtcaccgtcgtcaaggacgggtccatagacttcaactgccgcgacgcaatatttggcgacttacaggcgtacgccgagttcggcgagcgattcgcgcgcctgcgacgcgttctcgaagaggatgctgtggatgccgacctcgttggcgccgacgatgttcttggcggtgtcgtcgaagaacacgcagcgctcggccgtgagaccgaagcgggtcaggaccagctcgtagatgtcggcgttcggcttgtgcatcttctccacgccggagaccacggtgccctgcagcagctgttcgaggcgcgggtacttctcgaaggccaggtggaaggtctcatgcgaccagttggtcagaccccatacgccgtagccgtgggccttcaaatccgccagcagttcgaccatgcccggcagcgtgcggggcagcgcgtccgcgtagtggccgatgtagaacttgaagatgtcggcgagttcctggccttgttcgcgtaccacatccgggtagatgtccgcgaaatcctcgccggcgtccatgcggtcctcgtagtggaagaagccgcaggggtcgtcgtcggcgcagatgcgttccacgatttcatcggggaatcggccttcaaggcatgcgcgggtgttccagtccagcagcacgccgcagaagtcgaaaatcacgtcggtgatgggggagttggccatgatggttccttgtgtgtttgggtcgttgggtggggtctgcgatttagtgtacggggtttgtgtataggtcggggtatgtggagtttgaggctgatggttctctccctccgtctcggctttgccgagacacctccctcgtcagagggaggtcaacaaggttatgcgacggcgtcggcgatggcttcggggatggcgtggatcacgtcgccggccacgattgggtggccgagcgtcatgaagcgctggcgatgctcgcggccgatcagttccggctcctgccagccctgctgctcggattcggaggcgatcgccgccgccaggccatgcaggtaggcggccgaggccacggtctcgcccgtggtggccacgtcatcctgctgggcgagtagggcgccggtcagaccggccagcacgtcgcccgcgccggcggtgcccagccaggccggcgcgctgcccgacgcatagacgtggtcctcatccaccacgatggtcaccgcgcccttcagcaatacggtggcaccggtgagctcgtgggcgcgcttcgcgctggccaacgggttcagccgcacgtcgtcggcggtgtacggctcgtgcgaatcggcatgctccgcggtgctggcggtggtttcgaaccggttgagcagtttcgccatctcgccggcatgtggcgtgatcaccacctggccgggcacacgctccggcagcaggtcgagtgcgccggcatccaccacgattggcggcatgtcgtaggcgtccttgttctcatcctcgctgccgagcgcgtaatgcttgagcaatgcggcgatggtgtcccgctgcatatcgccgtcggcgccctcgacgctagcctcgggcacgccggaccccacgacccaggactgcacatgtcccttgccgatcacggcttccggcagtgcggtgagcaccatgttctgcgcgcgctccgggcccagataccggaccatgccggtgttcgcgcgggcggcggcgctggtggtgagcacggcggcaccggggtagcgctgcgagccggtcaccagaccaaccacgccccgggaatatttggaatcctcgaaccgggggagacggaccgcgtcggacgcgaacgaattatccaccacctcgacgtccggatccttgtcgtcgatatcgaatccgaaatcgaacaactcgatacggccgcaggcgaacgtggcgggcggcagcaccgcgcacggcttcatcgcgccgaacgtgaccgtgaccgtggccggaatgtacgggccgggcagagaaccatcgttcacaccgacgccggatggcgtatccacagcaagtaccagcggaaaatcgcctgacgactcatggttcggcagggcgggctcatcgggagactcgccgtcgagaccaagggcggaggcgagcgcggcgggaatgccgcgtagcgagccttgaatgccgatgccggtcatcgcgtcgatgatcagatgcgatttcctggccacggcgatggcggtctgcaatcgctcgccggcctcaccggcggaaaacccggacgcgcaaccgggaatatcggctgccgggtcaagcaccagcaccttgccgccggcgcgcacgagcgcggcgaatccggcctcatgcagcgaccggcccacggcgatggcagtgacgttcgcgccctcctgggccagcgcggcggccgcgaacagaccatcgccaccattgtctccggccccggccagcagcacgatcgacgtgtcctccagcgccagatcctcgtcgtccagcatgccggccgccatgtgggccgcggcctgggcggccatgcgcatcagcggcacgcctttgtccagcaggggtcgctccatggcccggaccgtatcggagtcataggcgctgtgcagcagcagttcgcgatgatcggcgtcttcggtgtattccatggcaacccctttcttgtgtttgttacttgcggcccgtgtttacaggccgtacacctcgtgggcgaacttttcgagcacggggatcgaacgcttgactttctcggtgtcgatgcagtaggccatgcggaagtatccgggcacgccgaagctgtcggacggcacgaggatcaggtcgtattccttggccttcatgcagaacgccacggcgtcgtcctctaacgccttggggaagatgtagaacgtgccgccggggcgcaccacgtcgaagccgatgccggtgagcgcatcgtagagcaggttcatgttcgtctcgtagacgttgaggtcggcggtctggtcgatgactttggctacgcccagctggatcgagctcggcgggcagttgtggccggtgccgcgcgagatttggcccatcatcggcacgagcaggtcggcgtcggtggctgcggggttcaccgcgacgtagccgatgcgttcgcccggcaggctcagcgacttcgaccacgagtagcaggtcagcgagttcgcatagaagctggccgggtagggctgggtggctccgtcgaacacgatttcgcggtaaggttcgtcgctgatcaggaagatgtcgtggccgtactcggcctgcttggcggtcaggatcgcggccagacgcttgagcgtgtccgccgaatacaccgcgccggacgggttgttcggggtgttgatgagcgcggcctgcacgttcgggttgagcgcggcctcgaacgcctcgaagttgatctggaagttctcggtgtcggccggcacgatggtcagcttggcgccggtgcccttgacgtacggctggtattcggggaagtagggggcgaaggtgatgatctcgtcgcccggcttggtcaccgcgcgcatcgcgtgggacagcgcgcccgccgcgcccgtggtcgggaagatatggttgccggtgtatgccatgccgaaacgttcgttgaggttttcggcgatcgcatccttgacggacgggatgccgagcgagggggagtagccgtggatggccaccggatcgccgttttcgtagaggtcgaccatggcgtcggtgaaggatttcggagccggcaccgagggattgcccaggctgtaatcgaacacgttctggtagccgatttcggcaccgcggctcgtggcatactcgctcagctcgcgaatcacggacttgccgccaagcatggccttgtattcctcattgatcatggctgttctcctcgcatggttgtactggtatgcaccacgctactactatcgcggccggtttgcgccatttaccgcgccgtgcctaagtcggctgttctatttgttctattagtggagtttgaaccggcatatacccttgcaataaagccatttgtagggtctgaggctttccggggttgcttgtctcatagattttcggcctcttgatatttgcggttgatagctgtgatgtgtgtgggcgatggctgttgaggcatcatgggggtctcttcgactgtccgccgtcgccatgccgccatgatgcctacagaaagtcgagttgcgtatttccgccaagcagggtggtgaccggtggggggcgatcggtggggggtgaccgacacccgctataggcagcaggcagccgcacacatcccaatatctgtgggacggcagacgagtcaatcgtttgtcgtccgcgccgtccctcaagggcgcgggatggcagacaagtcaactgtttaacgtccgtagcgtcccacaccgacgactgtagaaaccgcggaataacgccgattctcgctgcaactccatgattatgcacaaccgttcatagcgagcgctgtgggacggcgggcggaaaacggccgaatccgcgtgccgtcccacacctcgtacaatccgcgttttgggaaagcatcaccgtaaggctgacgcgcatccgcatccacagcaggagccttaccggccgtaatcccgcactcgattattttttctgacaggaaatcgaacccgaaacactaacccatgcccgccccaccgcaaacagcgaataaccaaaaaaatgcatgatctatccttggtgccgaataatgagagcctgactgtagtggctacgggtagctatatcggagaaggattcgatcagaagcgtttcgacacgcttctgcttgccgctccggtctcgtttgagggtactctctcgcaatatgtagggcgacttcatcgcgagaatgatggcaagaccgaggttcgtgtctatgattacatcgacgtgaccgtgcctttatccgctgtcatgtatcgaaaacggctgaaggcatacgcaaatcaaggatattcggtaaatcctgaccatactgacaaaatggacatgctcagtgcaaaggcggaagcgttgcgcgcttgcatgacggccgcgacgcagggcgaagatgctgcggatgcgttgctcgacacccggtctgacggattattcgaaggcagcatcgttacagccacgaattatgcagagatactccgcaaggatattgccggttgcgcacgttccctgattatctcggctgaatatgtatcacaacagggactcagcgcaattgacgatgaattgctccgactggccgacaggaaagcgctcatcgaagtttatgtccgtttgccggcgactgctgcggtggcaaccagaacacgaatagaacggaatattaatcggctgcgtgctattgggtgcattgtccggaccatcgaatcgtgttccgattttgccataatcgatgacggattgatttggtttggaggcatccctttacttggcaatccaaggagtgacgactgtgcacttcgattcaaagatacgaaaatcggcgagaatctagcagatggactgaaacgacggtcgtcctgagtcaatattcagttaagataatcgcgcagtacgagggcgtgattgatatgcgggtccttggcggcatagagcagggtcacgtcgggatgctccgcgcagatgtggcgcagattgtccacggcggcattggcgtcgagctcggcgatgtaacgcatgcggaattccgcgaatttggcggggtcatggccgaaccatttgcgcaggaggggagagggagcgacgtccttcagccacaggtccaacgccgcacgctctttcgtcatgccgcgaggccacaggcgatccaccagcacccgatacccgtccgacgcagtcggctcttcatatatacgtttgattgcaatacccatacgccccatgattggcgtgcgcttgccggaagtcaaggggagacgcgatccatctacccgttcgatttctgggtgttctgtctaaggccttgtgctatgacagctagcgattcagcagcttttggtgatatcgtccaaccggaccgccttgcccctgtcgaaggtgttcatagtgagatcgacgggtttggtcttgatgaacgctgacagcgcggtgtgcggcgggttgtcgatcaagtgggtgatgggggcaatcgcctcctcgacgctgacgcccacaatggcgtaaatggcacgcgccagcagcttcatcagtggcgaatcgaaactgttcaatgcctcattgctgcgcacggcccaagggttgaacaacacatagtggatgcggcctccggtctgctgttggttttccgcgaagagcactcccagcagatcgttcagacgactcgtacagatagtcgcgcaatgctagaacgtgattgatgtgcacccttcattgacggtctctcaattgatctcctgcgattcatgccgtataaggaagttctcgaccaaggcgatcatcgtgtccttccccgcaggtgcggacagcgcaatcatcagcgtcatcgccgccaaggcgttaccctccacaagcaggggagtcatcgtcgcccagtatactgttgccgttcaggaaatacacgaacagtgcggcggcacaacgtttattgccgtcggagaacgggtgatccttgacaacttgatacagcaggttcgcggctttctcctgggtggaacggtacagttcttcgcctccgaacgtctggtagagtcctgcgacgattccttggaacgaaccgttgcgtttcctcccgaacagatcggattgcgtgtagaacggcatcgaccggatgaacagcatcgcgtcctcataggtcaagacccactgggactcgtcgcccttgggtatagggacattgcctgtgtcatagtcgttaagcagcacaagactcggcaaatatcgttccaagatctctgcggtgccagcaatttccggttcggtgggcctcgatagcaccttgacgacggcgtgaagtgcgtcaagccgcttgtgattgatggtgtaaccatcaacgagatgctgcttcagaactgagttggcccatcgccgggaatagatgccttccttggatttgacgcggtatccgaccgacaggatcatatccaagttgtaatgctcgacttggtatgtcttaccgtcagatgcagttgtcgcaaattttgcgacaactgaaaatccattgagctcttccctcaatgcattgccgatatgcttgccgattgttttgatatcgcggccaaacagcaatgccaattgctttctgttaagccacaccgtatcctcgtccaccttcacatcgaggtgcacggtgtggtccgcgctttcgtactgccggtcgagaaccgggtggcaagggcggccaccaccagtatagtcaccacaccggcgcacaggatgccggcgatggaggccacatccgaagcgatgtccgcacctgcggccggcagcagtgtgccggaagcgtagtcgaagcgcgcgatgtacaggatgtagagagcgaccgtcaccaccgtctgcaatgccacgtacacggcgtagataccaaacagggcaaggattttcgcattgatgatcgtggcgcggtccagatccttgtacaggaacatgcggccggaggccacgggcgtatagatggcaccagccaccagataggccatgaccaccatcggcagcatcagcatgttctgtacgacgaactcgccagcgaggaaatccagcacactcaccgaaccggtctttccgctgactttcatgaaatcggagttgaacaggttcacggccggcagaatcagtatgaatgacggcggccggatccaaagccgcgaccgccgcacgtttcgcgacaccgagcggccggccaagctcgataaccgtgatccgcttctgttcgccagcgaattcgtccgcaagccggccgcctttgatgaacaggaatcgcccgcacaactcctgcaattcgttgagctgatggctggagatgagcatggcgatgctgcggtcgcggtacggccaaagtcccacaagttcaagcaccgggcggattgggaggcgcgagcggtgggtcggacgattacagtgtgagccgaatacgttcatgaatcatcgaatcacaaggcgaggcggcccgcaagtattcgagagtcgccagttcggtcgatttcaatgacaatggtgtggacgattacgcggatatcgtggcgggtgcgcgcaaggacgccgaaaaccatccggcttacgattccggctactatcagggcggctatccgccggccgatcgcggggcgtgcaccgtacgtgattcacaacatggcgcagcggcagcgcgaaaacgactacttcgccttcaagaagcacatgacggtcaccgggcactaccgtttcgacgcttcgaaagtgctgtagagcgtactcagggcttggcggtgacggtcggagcggcgtcggcattgccggctttggctccggctgcatcagctgaatcggtgccggccgcactggcgttagcactatcgtcagcgttggcaccgccggctttggccttggcatcagccgcgctcccgccatcgatcaccagtcgcagataatcgcggtcggcggacttgcggcgcggcacgaaccgactgatgatggagtttttcttgccgcggttcttcacgtacaggaagccgaacacggagaacacgaccgcgccgatgaagttgacgataagatcctccatcgtatcgatcagaccgatgtcgaggtagccgccgaggcccaagtcttggccattgaccgtgacctgggtgatgtcgttgatgcgaatcgcatggttggtgtgcgtggggtcgagcatcaccgagctgatggaatgcacgatggcgtctttctgcatgtcgaatccgaacaactggtccatgccgaattcgaagaactcccagatcacgccgatggtcatggagaagcagaaggagacgatcgccagatacaggggcgaaagctcgaacttcacccggtcggaccggttgagcaggtcgaccagcgagaagccgatcgccgcggcgaggaagccgttcatcgtgtgcaacaccgtgtcccagaacgggaagatctcatagaacgaactgatctcgccaagaatctcggacgagaacacgaacaccagcacgatgacttccagcaccgaaggcagctcgatgcggaactgcacctggatgaacgccggcgccagcagcaacagcaacgtcaggatgcacaggaacacattttcgtagtcgccgttaaagaactggagtattgccatggcgagcaccagcatgcgcagcaccacatagaccgcgaatgagcttttgtgttcgcggatttccatgtctacggctcggctcatggtcttccagcgtacgcgccaagacggtttgcgttgtgcgtcgtgctgttgtgaccgtttccgggtcattcttgcctctttctcgcattgttctcgcgccagtctatccgaacctgcttacaggcaatcggcaagaacgggcgatagtctggccgcatgaaccgaatggaaaccgatgctgcctcgattgtggaccgcacgaatcatgcggcgatgctcgatagggccattgtgccggcggcacgccaccgcgtgctgattgcagtgctcgccgtgctgctgtaccgccgtatgggcatgattacaccgctgatcgtggctcatggcatgtatgatgtctccgccgccatgaccaatctgaccggaatcgccggctcctcatggtcactggtcgtagggctggcaatcatggccatgccggtggtttgggctatcgtgaggtgtgcgagataggctttgtaccggttggcagcaaatcaaaccagcgagacaacggaatgaacgaagcgaaaggaacggtatctgatgactccgattgaattgtcaacccgacgccgggttacgggactgacttcggatgagttcgccaggctgttcgtctctttgcaacgcgatgtggacggcgaagccgcgcattggagcgccacggacgtcgaatcctgggagctggtcggcccgccggtgaccgccgaacagcatcttatcgacacgttcgccgcggccaacgaattcgtggccacgcttgcggaccgtctgtaccacacgatcatgccagtcacggaagaatcggtcatcaccgcatacgctgatgacctcacattctgggcatcgcatccggaccttggcggagtgccgtgcgcattatggaacatcgccgcactgcaggcggccgaatgggcccgcaaggaaaccggcatcgcctgtgaactagacgtgcgcgaaccgctggtgtgacagctgagctcaaacatgggcgtaggtaacggcatggtttgaggactatggtgttgcgttaccggtcggaaaggatatgatggtggggcgtcatagcaaaaaagcgcgtggacagtcgaggagacatgcgcgaaagccctccgtttggagtgaaattcgcggctatctgctgacggtgatcgcggtgatgctggtcgtgttgctgggacgcaccttcgtgttcaacgtctatgtgattccatcccgtagcatggaagacacgttgcaaatcggcgaccgcgtatttgcctcgcgattgactccgagactctttgcactgcaccgtggcgacatcatcgtgttcaaagatcccgcagactggatggagggggagcagcttcccaccaatctgatgtcgataatcgacagcaatcgttacctaatcaaacgtgtcatcggtctgcccggcgataccgtcgcctgcaagggatccggggagcccatcacggtcaacggcaaacccattgatgaaagcgcttatcttaagtccggcgtgaatccaagcgacagtcctttttccgtaaccgttactgacggcaacgtgttcgtgcttggtgataatcgctccaattccagagattctcgataccatcttgacgacggcaacaatgggctagtgccatacgacgatatccaaggtgtggcgttgttccgcttctggccatttacgagaatcggcttgctcaattgagtttggcgtgaatacgcaagttgacatgtgtcgcacggcccggtgcatcctgcagtcggaccgtttccggaaccctccccccgaaatctgacgaccccctgtctcacagctatcgtacggctccgatacgggaaacgtgcgggtgattccataacgactacgtatttcaggaagtgacgtgtatcacattatggtcatgtgttcagtgccgcagataggcgaagtttattcatgagccgaatagggccggtgaagcgggctctcactgcgttcataatacggcatatcgtgaacggcgttatcatcacagtcaggccgaattaaaggaggctcggtcatggtcgccgcatccacggcattcagcccgtcaagcacgatgacggccagtttggtggaatcgactggcctgcccagtgccgctattcctgtgcgcgaggatggtaacaacggcaacggcgacagtagtgccgatggcagcggcgacgacggcggcatggtcagatcgctgagcctgtggaactacttcaccatgggattcggcgcaatcatcggcaccgtatgggtgctgctggtcggtgactggatgatcgtcggcggtggcccggtcgaggcgatgatcgccttcgtgctgggcgccgtgtttctgctgccgatcggctcgacgtccggcgcggttaccatggtcgggtcgtttctgcccggagtgctggtgatgacgccgctcttctacaccggtttcgacacgattccgcagagtgccgaagaggcaagcgaaggccttgactggaagaagttcggtatggtcatctcagcttcgctgctggccgccggcttaatcatcattggcctgcaggtgctgccgttctccccggccgcgctcaaacccacatcatgggcaatcgtggcggtgtggatttgctgggtttggcattgcgttggatcagtgcacgttcacggcgcgaatagcggtgcgccggtaggtcgcgagccgttcagtcgcgcgcgacccaaagcgtatcgaggtcgtcggcctcggtcgcctttttgcgcttgcgtacccactgttgcaggaaatacgccccatagcaggccacgatgaacacgagctcggccacgagcgcgaaccgttgctccacgtcgaaaatcaccaatacgaacgatgcggtgcacaggatgaacgccgcccaagacacgtacggatagccgggcgtgcggtatttgagttcgctggtggaatggccggactccagccaacggcgacggaacacgatctggcagtaggcgatggcgatccacaccaccacggcggacaggccggaaagcgccaccagcaccaggtacacagtcgaggcggcgatcacggaagacaggagcgccagcaggccaccggccatcgcggcgcacaaggcgagcatcggcacgccgcgacggttcgttttggcgaaccagcgcggaatcatgccttcgttgcccatcgaccacaccatgcgcgtggaggcgtacaggccggaattcgaggcggagagcacggccgtgagcaccacgaagttcatgatgtctcccgcataggggatgccgatgctgttgaagacgagcacgaacgggctttcgcccacgccggcctggcgccacgggatcagcgcgcacatcacggtgatcgagccgatgaagaagagcaccagacgccacagggtggtgtggatggctttcggcacggcggtttgtgggtccctcgtctcaccggcggtcacgccgatgagttcggtgccggagaacgcgaagttgacggtcagaatcgtggcgaacaccggcatgaagccgttggggaagacgccgtccttgatgagattgccgaacatcggggcatgttggtagccggcgaccgggatgacgccgaagatggcgagcgatccgatgacgatgaacgcgcagatggcgaacaccttgatggaggcgaaccagaactccgcctcggcgaagaaacgcaccgacaaggcgttcagggtgaagatgagtgtgatgcacgccgcgctccacgcccatgtgggactgttcgggaaccagcgctgcatgagcagcccggcggcggtgaactcggatccgagcgccaccgtccatgtgagccagtactggatcgcgatcacgaagccggtgccagggccgatgaacttctcggcatacacatggaaggagccggtcaccggcatggccacggacagttcgccgagcgtgagcatgaccaggtagacgatcagcgcgccgatgccatacgccagaatggtgccgatggggcccgcctgctggatggtgtatccggagctcaggaacaggccggtgccgatcacgccgcccaacgagatcatctgcaggtggcgggattccatgccgcgcttcaggttggtatgcagcgcgtgctcgcctttgccgtcatgtggcgactcggactggctgatttgcgctggttggttcacctgttccggctggttttgacggccatccgtctgaatctgcggttcctgctgcgaggacggcgactgtgccgccgtgtcggtgtcgggctgactcatgtttctctctttgccatgcgtgcgttcc

SEQ ID NO: 1607 - DNA, 25285 bp, Unknown
  R221_24m  MAG No. k141_55965
ccctcgtacaccacgctgttcctcgacgaggcgctcatcaaggccgacggtcgttacacgcagcgcgccctcacggtgctgccgcgcctcggattccaggtcatcgtctccgccccggaaagcaagaccggcgaaatcctcgaggtctccaccaaggcctacgtgacctacaaggaccccgacaccggcctcacctccctgcgcgaggccgtgctgcatcagaatgacatggacgatgaatcatcgtcaccaagcatcgcaccataggcacctctgtcgagctgatctccaaagtcgtcgttcctgacgaatcaatagccatgcgtgtggttggtcgtacgctggcggcggaatatcgcgaagcgcaccgtcgcacagattccactgacaggattcagcggcaaatggctgaatgagtcaaaaaccaatcgtcgtaaggccatttgccgactgctcggtgtcgaaacgttgggtctgtcgaaacggccgaccgaactgcggttccgttatctcgatccgggacacgacgattttggtaccgatcgtactgaacgcagcgcgaagattgctatgcgggagcctaagccgacgcccggccttcaatcggcggagcgacgtctttatgaacgactgtgtgctgacaaaaccatcgcttatcggcgtatcgaacaggaacgcattcccatgcgtgatgcagttgacgaattacgcaagcttggcatccccgtggagtccattgaagattttgtcccggttcgaacatcaatcgtttgacggacgtaccggggcagaatccgttgtcccggtttgtgatttcgggtgtttttcgcgaaccgggacatgttgtgttgccccggtatgggcgtcaatcgtttgatgcgagaatcgggacaacatggcgattctgagattggctttattccgccgtttccgttcgcgttttatgtggttcgtggaaactggaatgtcctggttctcgaaaacaggccaaaatcacgaaccgggacagcgggttttgccccgatgcggacgtcaaacgattgacatgtgaaccggggcaaatcagaggaggagaggtcttcgggatagagcttgactggggctgggcgcacggttgatgtcgcgtgggccggctcttgcgtttcggtccactgatggtccggaattttgcatactatggttcggttttccggcctgacacgccatcgaacaagcgttcgaatttggtcgtgtgttcgggtatccttgggacagatttggcgcgcgcataaccgtgcgcgcggaacggtgagatggaaggtggggtgtggctgtggcggcaacgcggactggcgcaaggcgcgcaacaagcgcaaagggcgcgaaaaccagcaagggcaagaacggtgaggtcatcgtcgaaaaggtgatgaccagcgactccttcctgagccgggaaatcaaaaaggcgccgctgatcgaacacgatggttcgctggtagctgatatctcgcacatcccgaacgatctcaagatcacgattcagggtgcgcgcgaacacaacctcaagaatgtcgacctggcgattccacgcaaccgtatggtcgtgttcaccggcctgtccggttccggcaaatcctcgctcgcgtttgacaccctgttcgccgaaggccagcgacgctacgtcgaatccctgtccgcctacgcccgccagttcctgggtcagatggacaagcccgatgttgacttcatcgagggcctgagcccggccgtctccatcgatcagaagaccaccaaccgcaacccgcgttcgaccgtcggcaccatcaccgaaatctacgattacctgcgactcctcttcgcccgcaccggcatcccgcactgccccgaatgcggcgagcccgtcgcctcccagaccccgcagcagatcgtcgacacgctgctcggctacccggagcgcactcgattccagattctctcgcccgtggtcaagggccgcaagggcgagttcgtggacatgatcgagctgctgcgctccgacggctacgcccgcgcgctcatcgacggcgagatgacacagctgtccgacgacatcaaactcaccaagcagaagaagcacaccatcgaggtcgtggtcgaccgactcgtggtcaaggacggtatccgccaacgtttgactgattcggtggaaaccgccctcaagctcgccaacggcagcatcgtcatcgacttcgtggacgaggaggaaggcagcccggcccgccgccagccgttctccgaacaccgcagctgcccgaacgggcacacgctcgaactcgatgaggtcgagccgcgcaccttctccttcaacgccccctacggtgcctgccccgcctgcaccggtctcggcttcaaactggaaatcgacccggacctcatcatctccgacccggacaagtcactggccgacggcgtcatcgaaccgtggagcggcaccaagatgacctcccagtactacggccacatcctcgaaggcttggccaaggaaatgggcttctccatgaagaccccttggaaggacctgccggacgacgtcaagcacgacatcctctacggccacgacttcaaggtcaacgtctcctaccgcaatcgctggggacgcctgcgtgaatactccaccggtttcgaaggcgtgatccgcacgctcatgcgacgccacgacgaaaccgattcgcagtccatgcgcgaatactacgagtcgtacatgcgcgaagtgccctgccaggtctgccacggacgtcgtctgaagcccgaggtgctctctgtcaccgtggacggcaaatccatcttcgacgtatgtgacatgcccgtcgtacgcgaactcgcctggatcaacggcctgaaactcgaaggctcggcacagctgatcgccggcgaagtgctcaaggagatcaaggcccgactcggcttcctgaacgacgtcggcctcgactacctgaccctctcgcgcgcggccgccaccctgtccggcggagaagcgcagcgcatccgactcgccacgcagatcggctccggcctggtcggcgtcatgtacgtgctcgacgagccgtccatcggcctgcaccagcgtgacaacgaacgcctcatcgaaaccctgcaccacctgcgcgatctcggcaacacgctgatcgtcgtcgaacacgacgaggacacgatacgccgcgccgactgggtggtcgacatcggccccggcgccggcgaacacggcggcgaagtcatctactccggccccgccaagcacctcatcgaagccaagcgctccatcaccggcgactacatcgcccaccggcgagagatcgccgtgcccgccaagcgccgcaagatccacaagacccaggtgctcaaagtcgtgggtgcccgcgagaacaacctcaagaacatcgacgtgagcttcccgctcggcgtgctcaccgtggtcaccggcgtctccggctccggcaaatcctcgctggtcaacacgatcctctacccggtgctcgccgacaagctcaacggtgcacgcatcgtacccggccgccacaggcgcgtggaaggcgtggaccaggtgcgcaaggtgatccacgtcgaccagaacccgatcggccgcacgccgagatccaaccccgccacctacaccggtgtgtgggacaagatccgcacccttttcgccaagactcccgaagcccaggtgcgcggctacggccccggccgcttcagtttcaacgtcaaaggcggccgatgcgaggcctgccacggcgacggcacgctgaagatcgaaatgaacttcctgcccgacgtctacgtggactgcgaggtctgccacggcaaacgatacaaccgcgagacccttgaagtcacgtacaacggcaagaccgtggccgacatcctcaacatgcccatcgaggaggccgccgacttcttcaaggcgtacaccggcatctcccgatacctgaagaccctcgtggacgtcggcctcggctacatccgactcggccagcccgcacccaccctgtccggcggcgaatcgcagcgcgtcaagcttgccaccgagctgcagcgccgatccgacggcaaaaccgtgtacatcctcgacgagccgaccactggcctgcacttcgaagacgtgaacaagctgctcaaggtgctgcagtccctggtggacaagggcaatacggtcatcgtcatcgaacataatctggatgtgatcaaggaggccgactggctgatcgatctcggtccggagggtggcgacggaggcggcaccatcgtcacgcagggcacgcccgaacaggttgccgaatgcgaatcctcatggaccggcaagttcctgaaatccatgctttagccttccattgcagctgacctcgggtgggttggggtggtatgttgctggacacgctccgggccgctcaggccaagtctttacggtccagcagcacataccaacccgcccaatccctgatgattggttttgcttaatagcgaggaggattatgacgaacgatattgagcggcatagtccggatgagtggcggaagaccgcggcggcgttaatgccggaaagcgtagctgtgggtgccggggaaacgacggcgaaggtgaatgcgaatggggcacctttgctgggggattctcgcgacctgttccgacccaagacctcggatattcccaccaaacccggtgtgtacaaatggcgcgacggggaagggcgcgtcatttatgtgggcaaggcgaagaacctgcgcaacaggctcaccaattatttccagccgctgtatctgctgcatccgcgcacgcagaccatggtgctgaccgcacgcagtctggagtggacggtcgtcgccaccgaactggaatcactgacgttggaatacacgtggatcaaggaattcgacccacggttcaacgtgcagttccgcgacgacaagacctatccgtatctcgcggtcagcacgggggagcgaattccgcgcgtgtgggtcactcggtcgcgcaaacgtcgggatacccggtatttcggcccctatgccaaagtatgggaattgcggcacagccttgaccggctgttgcgcacgttcccggtccgcacctgcaccaccaacgtattccacaaggcgcaactgaccggacggccatgcctgttcgcctccatcggcaaatgctccgcaccctgcgtgaaccgtatcgaagcggacgaacaccggcggctgtgcgaacagctggtcggcgtgatgaccggacgcctcggacggccatacatcgcccagttgacccgcgacatgaaagaggccagcgccgaactcgaattcgagaaagccgcccgactgcgcgaccagatccaaatgctggaaaccgtggtgcaacagaacgccgtcgtcttcgaccaggatgtggacgcggacgtgttcggcttcgccagcgacgagctcgaagcctcggtgcacgccttttatgtgcgcgccggctctattcgcggcgaacgcaactggagcgtcgaacgagttgaggacatcgatgacgccgacttgatggccgaccttctggtgcaggtgtattcggacgccgccggggacaatcacccccagtcggccgcgaccatctccaccaatcgcgaggccatcggctccacacagaccatcacggccacggacgctgtggcacgcgcccaggccacccgagaacgcaacacccgtcaggagaccaccggacgcgcggacctgctggcacccatcgcaccggtaccgcgcgaaatcatcgtgcccgtcgaaccggcccgccgcgaggaactcgaaggctggctgaccaatctgcgcgggggcgcggtgaccatccgcgtggcctcgcgaggcgacaagaagcagcttatggaccgcgccaacgagaacgccagccaagcactgcaacgcagcaagatgagccgcatctccgacatgggcgcacgcacccaggccatgaacgatgtggccaaggcattgggactcgcgcaagccccgctgcgcatcgaatgctacgacatttcgaacactgtgggcggtgccttccaagtggcctccatggtggtgttcgaagacgcgatcgccaagaaatccgaataccgacgcttcgccgtccgaggcaaggacggcaaaggcgcggtggatgatctgtccgcgctttacgagacgctcacccgccgcttcaggcacggcaacatcgccggcgactccggcgaaagcatcgacgcggaacagcgcgcggcctcggccgccggcaagatgaccactgccgtggcggcggagacaatcgttgcgaacggtaacgacaatggtgagggcggttccgacatcagtggcaaggggcacgcggtgccggtcggagtgcagaacgatgcacgggagtcctcgcccgacatcgtccagcagaacacaaaccggcatcactttgcctacacgccgaacctggtggtggtcgacggcggtaagccacaggtcatggccgccgccaaggcgcttgaggactgtggcgtgatcgacgtggccgtctgcggactggccaaacgcttggaagaggtgtgggtgccggacgacgactatccgatcatcctcaaacgccagtccgaaggcatgtatctgctgcagcgtgtacgcgacgaatcccaccgcttcgccatcacctaccaccgccaacagcggcgcaaaggcgccctgcgcagcgcgctcgacgagattcccggcatcggcgaaagctaccagaagcggctgctcaaccacttcggctcggtcaaagccatgcgcgaagccagtgtcgaggacttcgagaaggtcaaaggcatcggccacgccaaagccaaagcgctgtacaacgcgctgcacgagcagtgagccggcccggtccagcagcccagagtgaattttcggttgcggggcctgtggttgacatattcgaagcaaagtgtcggctagcatggaaacagacatcaaggaggggatatggccaatcatcgttgcgctgtactcggcaaacccgtcgcgcactcattgtcacccgtgctccacaacgcggcttatcgttcgctgaaactcgacgattggctgtacgacaagcacgaggtgggggaagacgacctcgacgctttcctcaaaggccttggctcgacgtgggctggcctgagcctgaccatgccgttgaagaagaccatccaaccgtacggtgttccggaaaatctgtgggccaaggaactgaaggtggcgaataccgcggtattcgactggagtgtggctaccgatgatcccgcttggccgaacggcaagccgggcatcaagctgtacaacaccgatgtcatcggcatccaactcgccttcgaccacgccaatcgcgaactcggcgaacaccacaccgcatcgagaagcggcgccgcgctgatcctcggcaatggcaacaccgccacttcggcgttggccgcatgctgcatgatgcccgaaatcggccatatcatcgtcgccgcccgccaccctgggaaaaacaccgggcttaaaccagtggccgaaaagttcgtcaacgtgcataacccgtacagcgaaatcgaattaggcgacgatcaggccctgctcgaggcagcccgcaacgccacctatgtcatcaacacgattcccggacatgcggccgacaacgtcgcggatgccctcaccaatgccggaaccgagccattctccggactgctgctggacgtggtctacgatccacgccccaccaagctcatggaagtctggcgcgctcatggcggtcacgccatcggcggcgaagaaatgctgctgtaccaagctctcgtacaggtattgctgatgaccggtatctgggatgacgacccgcccagcgatgccgaccagcgtctgcaggacaccaccaccgaagacgaccagctggagatcgcgatgcgcaaagctcttgaggaggcgttgtaatgagtcaacagacaacaatccgcgataccggcgaggcggccgccacgaatgcgccggcgaattccgcgacatccacatcgactccggacaaccagccgaccccgcttgatgccttcgaggtgctgctcatcaccggtatgtccggcgcaggccgctctcatgccgctgactgcgtggaagacatgggatggtatgtggtcgacaacctgcctcccaaactgcttatcccgcttgtcgacatgatgaccacctccggttccggatcgggatcgggcgtccacaagcttgccgccgtcatcgacgtgcgctccagctatttcgacgagctggccgccgtgctcggccatctggatgatctcggcgtcaaaacccatattctgttcctcgacgccagcaacgaagtgctcatcaagcgctatgaatccgtgcgccgcccgcacccgctgcagcacggcaaccgactgatcgacggcatccttgaggaacgtcacctgctggaagacctcaaggagcgagccgactgggtcattgacaccagctccctgagcatccaccagctgtccaccaaactctacgagacgatgctcggttccggccccaccaccgtggcggtacacatcttcagcttcggcttcaaatacggcatgcccatcgacgccgatttcgtggccgatgtgcgttttctgcccaacccgttctgggttcccaacctgcgcgagcttaccgggcacgacaagccggtcgccgactacgtgctttccagcaagggagccaaggaatttctcgacgcttatgagaaagctatcgagattgcgttggaaggatacgcccaggaagacaagcactatgtaaccatcgccgtcggctgcaccggtggtcagcaccggtcggtggcgatgagcgaagagctggctcgccgcttacgcgcacatgggctcaacgtaaccgtttccgcgagagaacagcataagcgtcactcatcgtaagcaggcgtcgagcggtcatcgggcaagcgttcggtgcccacactgcgagaaagcaaagcccataatacgtatcaaacgggttcgcttgtccaccagattaggtatcacagaaagccgatggcttccgaccgtatgacagcagataacggcacgaagcgcctgaagcattgagaagaacgggactgtaggaggtagatcttggctcttctggacgatgtcaaaagcgagttggcggcctttgaaggcgattcaccagccgcgatcaaggcccaagctgcggccatgatccgttttggcggcggtcttcgaccggtacagaatacatacgttatccaagccgtattcacctcgcttgacgttgcagaatggctgaagaacacgttgaggaacacgttcgggcatgaagccgaggtcaaccacctcacccgtcagaccccgaacggccctgtcgagacctacgtggtgctcatcacccgcaacgtagtggccttggctttgcagaccggactggtcgaccgccgcaagcagcaggtccgtggactgccgtctgaagtggtcaacggatccatcgcccaaatcaaagcagcatggcgcggcgccttcatggcccgtggcttcctatccgatcccggtaaggccagcttcctggaaatcgcttgccccacggaagaggccgccatggccctgtgtggcgtggcccgtcgtctcggcatccaggccaagcatcgcacgctgcgcagctccgagcgcgtgaccctcaaggatcccgacgccatcgaacgcatgctcaagctcatgggcgccacccgttcggcccgcgaatggaccggcaagcgctccgacggcgaggcccgcggcaaggccaaccgtctggccaacttcgatgacgccaatatgcgccgttccgccaaggctgccgccgaagccagcgaaaaagtgcagcatgccttcgaagtgctcggcgataacattccggacaacctccgtcaggccggccagctgcgcatcgatcacgtggacaagagcctcgaggagcttggcaagatcgccgaaccgcaaatcaccaaggatgcgattgccggccgaattcgccgactgcttcagcttgccgagaaaacggagaaggctcgcgcagccgaaggcaagtaacccgacaacgacgtaacgaaacaccgcattcagtcagtaggcgaatgcggtgttttgttccggaatgcctgtaatatgcaaagtggcaaaattggccactttgacgtgcgattcgtcaaggaaaggatattcatgaagacactcaaggaccttggagatctcaagggcaagcgcgttttggttcgcgctgatttcaatgttccgctggacggcaccaccatcaccgatgacggtcgaatcaaggctgctctgccgaccatcaagaccctgcgcgaagaaggcgccaaggtcatcctcatggcccaccttggccgcccgaagggcaaggtcgttcctgagctgagcctggccccggttgccgcccgcctcggcgagctgctcggcaccaacgtgccgctggccaaggacacctacggcgaggacgctcaggccaaggtcgccgccatgaacgatggcgatgttgtgctgcttgagaacgttcgcttcaacccggaggagacctctaaggacgccgacgaacgcgccgcttacgccaagaagatcgccgccctcggcgaggccttcgtttccgatggcttcggcgtggtccaccgcgcccagggctccaactacgacgttgccgccgatctgccggccgccgcaggcctgctggtcgagaaggaagtcaaggccctgtccaaggccaccgagaacccggagcgtccgttcaccgtggtgctcggcggttccaaggtctccgacaagctcggcgtcatcgagaacctgctcgacaaggccaaccgtctggtcatcggcggcggcatggtgttcaccttcctcaaggccaagggctacgaggtcggcacctccctgcttgaagaggaccagcttgagaaggtcaagggctacatcgagaccgccgagaagaacggcgttgagctcgtgctgccgaccgacgtcgccgtgaacgccggcttcccggccggtgacaccccggttgctccggaagtcgttgccgccgacgccatcccggccgacaagatgggtctggacattggcccggagtcccagaagctcttccacgacaagatcgtcgactccaagaccgtcgtgtggaacggcccgatgggcgtgttcgaggttcctgagttcgcctccggcaccaaggccgtggcccagggtctggtcgacgccaccgcagccggtgcgttcaccatcgtcggtggcggcgactccgcctccgccgtgcgtaacctcggcttcccggaggacggcttctcccacatctccaccggtggcggcgcttccctcgagttcctcgaaggcaaggagctccctggtctgaaggtgcttgagtaatccattttctagctcccctccttgaggggagctacgtattttttagaggggaaacatatggcgtccaaacgcattccgttggtggccggcaactggaagatgaatttcgaccatcttgaagccacttacttcgtgcagaagctggtatggctgttgcgtgacgctcgctttgacttcaaacgctgcgaagtcgcgcttttcccctcgttcacgtcattgcgcagcgtacaggtgctggtcgaagccgacaagctccatgtcgcctacggcgcacaatccgtttccgtgaccacccaaggtgccttcaccggcgatgtgtccgcggacatgatcgcccatctcggctgctcgtacgtcatcgtcggccactccgaacgccgcaaataccatcctgaagatgacgccaatatcgtcgatcaggtacgtgccgtgctcgccgccggcatgcagccgattttgtgcgtcggcgaaagcttcgaggaacgacgtcaaggcattgaactcgatttcgccgtgggccaggtacgagacgtcacccgcgatctcaacgaagaacaagccgccgaactcatcgtggcctacgaacctgtctgggccattggcaccggcatggtggccactccgcaatccgcccaggatgccgcaaacgccatccgcaacgatttgaagaccacttttggcacgaaggtatccgatagcgtacgtatcctgtacggcggatcggtcacctcgaaaaacgcggcggaactcatttcccaacccgacgtcgacggcttcctgatcggaggggcggccctggatgttgaggaactcgccaaaatcgctcgactggcactgaaatccacgaaatcacggaactaataccacggttttcccgtgtgtgcgctatgctggtcaacagtccaatcaatccggaggtaccctgtgaccgctcttaagatcacgctgcaagtcatcgtcgtgctgctcagcttcgtgctgaccctgctcatccttatgcacaagggcaagggcggcggtttgtccgacatgttcggcggcggtctgacccagaacgccggtacttccggtgtcgccgaaaagaacctgaaccgttggaccgttatcatcgctctcgtgtgggtggcattgatcatcggcctcgacatgatgaccaagttcaacctcggctgatcggcttgcacgccatatagacttgtcgctcgcgacccatgaccgttaccgtcggtcatgggtcgtatgcgttctatcgagtattacgaaaggacatcaccatggtcactatgaaccgcaacaaagtcgttatcgtcggcactggccaggtcggtgccaccgccgccttcggcatcgtcacgcacggcctgtgcaatgagctcgtgctcatcgaccgctccgccgccaaagccctgggggaggcccgcgacctcgatgacggcagcgaattccaggaccgccacgtcaaggtgcgcgccggcgactacgccgactgcaaggacgcggacatcgtcgtcatcaccgtgggccgcaagccgccggccaactccaaccgcatggccgaactcggcttcaccgtgggccttgtgggcgaagtggtcgacaacgtcatggcctccggcttcgacggcgtgatcgtcatggtctccaacccggtcgatgtgatggcctggtatgcctggaaacgttccggcctgtcgcgcacccaggtgctgggcaccggcaccgcgctcgacacctcgcgtctcaagaccatcatcggcgaagagaccggcctcgacccgcgtaacgtgggcggcttcgtgatgggcgagcacggcgactcccagttcaccgcatggtccaccgtctcgctcggcggcaagccattcgcccgcttcctggccgacaaccaagaccgtttcgcctccgtgtccaccaccgaaatcgaagagaagacccgcacccgtggcgatgagatcgtcgcggccaagggcggtaccaacttcggcatcgcctccaccgtggccggcatcgtgcagaccatcctgtgggacgaacgccgcatcgtacccgtctccaccctgctgaacggcgaatacggcgaacatgacgtgttcctcggcgtccccactgaactgcgcgccaatggtgccaacgagatcgtcgaactcgatctgagcgaggacgagcaggccaaattgcaccattccgccgaactcgtgcgtgaacactgcgaggggctgctgtgattctcgacgccatcacaccgaaacaaccccgactgctggtcgccgacctcgacggtacgttgctgcacgacgccgaggtattcgaggaccggttcatcacccagagcagcatcgacaccatcaaccgcgcgcacgatgccggactgaaattcgccatcgccaccgcgcggccggtgagtaccggcctccagttcgccgaaaaactgccggtggacgccgtaatctatctgaacggtgccctcatcgatttcgacccggcccactccgacttcgacctgctcacctcaggtgccacgccggccgatgagaaccatttgatcaagattggcttctcctcacggcgtgcctgcgaagtctgtctgttcctgctcgatcgcatgcccggcctgaagctcggcatcgtgatgaacgacgtgcgctacaccaacttcgatgtgcgcgtgtattggaaaacacaggccttccaatatacgaacttccacgacgtgcccgaaggcgtggcggataagatcaccatcttccccgagcctgaacagtggaacgagctgcgtgcgctgattccgccggacttcgacatctccattagcgaaggcgtgatgtggatgctcatgaacccgcaggccaacaaggagcacgcgctgcacctgctgtgcgaacgactggacgtgccgctcgaacagaccgccgccttcggcgacgacctcatcgatatcaacatgatgagcgaatccggccggggtgtggccgtggccaacgcgaaccccaaggtgttgtctatcgccgacgagatctgcccgcccaacaacgaggacggcgtcgcccaatggattgaagcgcagttgggctgagccggccgagactcgagaacacgccaaaattgaacttgtgttgaaccgggagtatgctttgaactgttgttcaaaagataaattgaactcccggttggaggcataaggatatgagcgtatcggtgtttgcggaacgtctgcgcaatgcgatgaacagtaggggattgaagcaggtcgatttggtgcacgccgccgaacatcgtggcgtaaagatgggcaagagccatatcagccaatacgtggccggcaagaccatgccccgcgaagacgtgctcgaattcctggccagcgaactggacgttgacgcgaactggctgcgcggcgaggaatccaccccgcaattgaactcggacgcttccaacagcgtcacggacggcgaacacgccgccacgccgcttgccacgggcaccgccaagcccctgacggacagcgagattcccgtgggccgccgccgtaccttcggcaaatcgcacaagctcgacaacgtgctctacgacgtgcgcggcccggtcgccgacgaggcgatgcgcatggaggccaacggcacccacatcctgaaattgaacatcggcaatccagcacccttcggcttccgcacgccggacgaagtcgtctatgacatggcccaccagctcaccgacaccgaaggctactcgccgtccaagggcctgttctccgcgcgcaaggccatcatgcagtacgcgcagctgaagaacatcccgaacgtcaccatcgacgacatctacaccggcaacggcgtcagcgagctcatcaacctgtccatgtccgcgctgctcgacaccggcgacgaagtgctcgtgccctccccggactacccgctgtggaccgcctgcgtgaacctggccggcggcaccgccgtgcactacctgtgcgacgaacagtccgaatggtatccggacatcgatgacatccgctccaagatcaccagcaacaccaaggcgattgtcatcatcaacccgaacaaccccaccggcgcactttacccaaaggaagtgctccagcagatcgtcgacatcgcgcgtgaacaccagctcatcatcttctccgacgaaatctacgatcgcctcgtcatggacggcctgcagcacatctccatcgcctcgatggccccggacctgttctgcgtgaccttctccggcctgtcgaaatcgcacatgatcgccggctaccgcatcggctggatgatcctgtccggcaacaagcgtatcgccaaggactacatcgagggcctcaacatgctcgccaacatgcgcatgtgctcgaacgtgcccgcccagtccgtggtgcagaccgcgctcggcggccaccagagcgtcaacgactacatcgtgccgggcggccgcgtgcacgaccagcgtgacctcgtttacgacatgctcaaccagattcccggcatcaccgccgtcaagccgaaggccgcgttctacatcttcccgaagatcgacgtcaaacgcttcaacatccactcggacgagcagttcgcgctcgacctgctgcatgacaagcacatcctcatcagccacggcggcgcgttcaactggcatcgccccgaccacttccgcgtggtgtacctgccgcgcatgggcatgctgcacgaaaccatgggggagctcgccgacttcttcagctactactggcagagctgatccttggtacaggcgaacacgatcgatgccgggctgggcaccaaaccggtgccccgtctggccctgaccatgtcggtccccaccatcgtggcgcaggcggcgaacgcctcgtacacgatcatcgaccgactgttcatcgggcacatccccgaagtgggcaacgcggcgatgaccggcgtgggcatctgcttcccgattctgctggccgtcaccgccttcacctcgctgatcggcgcaggcggcgcgccgcgcgcctccattgaacttgggcgcggcaacttcaagaaagccgaacgcatcctcggcaccagcgccgcgttcctcatcgccatagccctgaccctcaccgtgctgctgcagttggcgaaaccactgtggccatggtctccgtactcatcggcaccggcatatccatccttcttgaccccgtgttcattttcgtgttcggatggggcgtcaggggagcggccgccgcgaacgtgctcgccacattccccggcttcttcgtctcatggttcacctcggaacagacggtcatcgacatcgtgacccgcatgatgccgattttcgtctgcggctggggtatcttcggcatccagatgggcgcgcaatgcgcactcgtcggcatgggccaggccaaacagtcggtgttcttggccatcttccgcaagatcatcctgctcgtgccgctcgcgctgctgctgccgcactggatcggcgtcaacggcatcttcatcgccgaacccatctccgacgccacctccggcatcgtggccggcttcctgttctatgccacctaccgcaagattcggcgagatatggtctagactcctgattcaatggatgtgccgtctcatgcgttgcgaaacacgggacggatagaatgcctcgcaaaacgggtgcccgttgtttcgtgatatgaaggagattttatgccggtggtgtcgcgtcgtacgcagccaacgtgatggccataatcgccgaaagcagggagaacaatggcagcacgcacaacacgacggtcagcagtcccaaagcttcacggccgatgcaataagcgacaagacctgcattgtcagttgccgatagcgctgggcagaaatcggtgtgtctaccagtgttgtagctgtaggtaaagaacgtgagacctgaccagaacagggcaacgggaacagagccgatggcgcgaaaagccctgtactcccgcaacggtcagacagagaatcgcgacaacactcagcgcagtcaccgtcataaaccacagtggtgaggtgacgcagactccataatcgtcagttgcttggcccgagagatagtaggtcattctgccaatcgccggacagttcggatgcagcatcatgccgccccaaatgcgctcatatagtggtgtatagtggtgcgaacgatacaccggcaccgctgagcgtcgcaacaaccgccatcaccgaccgaccgccagactccggcacagaccgggaagaactaccgtcgcggagcatcggcgataccaatggcaacaccgaggatagccgggaccacccagccgagctggtattgctgcaagggcagcatggccagcgtcgtgtccagccagccgatggagccgccgaagacggtgatcaggctggagatgcaggtggcgaaggagtcgatgcccaccagcagcacggtccagaagtagacatgcgggaatcgcgcgccgagcgacttgtgggtcagcgccagcagcaccagcacgatggcgatcggatacagtgcggacaacaccggcacggaaaccttgatgatcgcgcttagcccggcgttggacacgatgaaactgaacacggtgaagatgacctgccaggtgcggtagctcaacgttctccctgcaacggtctggaaccgagtgtggaagtaggtggcgcaggtaccgatcagtccggtgcatacgttgaggcaggcgatgacgaagacgataccgaggaacgcggtaccgaacacgccgaacagggacgaggtgagattggtgagcacggtcgcgcccgtgtctttggcgggatcgatggtggcgatggcgccggacaccacgcccacgtagctcagtgcgccgtagatcacgatcagcagcacaccggtgccgagtccggcatacgcggtctccttctgcacttgcgattcgtcatcgacctgctgggtgcggatattcgcggaaatcacgatgccgaaatagagcgcggcgagcagatccatggtctggtagccgtcgaggaagccacgtgcaatctggtttgtggagtagtcgcccatcggtttggccggggtaccgataccgtggattaggcaggcgatgaacaggacggcaatcagcaccagcagcaacggtcccatgaatcggccgagcactttggagagtttttcgggatgctgggcgaacaggaacgccagtgtgaagaacacgagcgagtagatgagttgggccagccagccgtaggaggacggcacgaaaggcgccaccatcatttcgaacgaggtggtcgccgtacgcggaatcgcaaagcaggggccgatggtgagcatgatcgccaagccgaggaacaaggcgaatttgggggagacccggccggcgagtttgtcgaagccaccggcgaaggtgaccgccagcacgccgagaatcggcaggccgaccgcggagacgatgaagccgatggccgccggtatggtcgcggaaccggcctgagctccgacaaacggcgggaagatcaggttgcccgctccgaagaacatcgaaaagaaggtaaaggtcatcaccaaccgctggcgtgcgacaagtttgttcattacggttcggcctttctctcatgtgctcgtactactgtagcaacaaacgtaagaagccccgaccggttggggtcggagcttctgtgagctaatcagttaatgcgcgaaatgcgcatcagctaataatctcaggcgttcacgcggtcgatgccggactggacgtcagccagcacggaatcccaggacttgatgaaggcggcgacaccgtcggcctccagcttgtcagtgacgtccttgaggttgatacccagctcagccagcttgttgatgacggcgtgggactcctcgtaggtgccctcgatggacggagcgccgttgccgtggtcggccagagcgttcagggtcttctccggcatggtgttgacgatgtgcttggcaacgagctcgtcaacgtacttgcagtcggagtaggcggcgttcttggtaccggtggaggcccacagcggacgctggaccttggcacccttggcagccaggtcggcccaacgcggatcctcggcaaacttcttctcgaagagctcgtaagccaggcgagcgttggccacagcggccttgccctccagagccttggcctcgtcggagccgttggcttccagcagcttgtcgacagcggtgtccacgcgggagacgaagaaggaagcgacggagccgatgtgcttcaggtcgtggccgttggcgtcagcctgggcgatgccctcgatgaaggcgtcgatgacctgctcgtagcgctcgagcgagaagatcagggtgacgttgacggagatacccttggccagggtggcggtgatggccggcaggccttcgagggttgccggaatcttgatcatggcgttcggacggttgaccttctcccagagttccacagcctgcttggcggtgttctcggtgtcgtgggccagacgcgggtcgacctcgatggagacgcggccgtcgacgaagtccgtagcctcagcgatctcgcggaagatgtcggtggcgttgcgcacgtcggtggtggtgagctcgcggacagcggtctcaacgtcaaccttgccgagctccttgagctgagcgtcgtacgggccgacctggctcagggccttctggaagatggacgggttggtggtaacgccgaccacgttcttgttggcgatgaggtcctgcagggagccggactcaatgcgggagcgggacaggtcgtccagccagatggaaacgccgttgtcggacgtacgctgagttgcttcagtcatttattttctccttggattcaagccctaggctcccctctcctgggagaggggagctgtccgcaacgcggactgaggggagtgggctcaagcattgctcccctcagtcaagctttcgcctgacagctcccctcagggaggggagccaacaattattgaattattgcttagttgctcacttggcggcttcgacttcggcgatggaggccttggcggcttccaccacgtgctcggcggtgatgccgaggtcgatcatgttctgagcgccgtcaccctgcaggccgaactgctcgatggagacaggcttgccgtaggaaccgaggtacttgtaccacggcatggcaacgccggcctcgacggagacacgagccttgacagcggccggaagcacagcctccttgtactcggcgtcctgctcctcgaaccattccatggacggcacggacacgacgcgagccttgacgccctcgccggccagggtcttggcggcagccacagcccactggacctcggaaccggaagccatgaggatgacgtccggagtaccctcggtgtcgaccaggatgtaagcgcccttcttgacaccgtccttggccttggcagcggtctcggcaagaaccgggacaccctgacgggtcagaaccatggcgccaggcagggtgttcttcttctcgaagaagtaacggtaagcctcggcggtctcgaaggcgtcggccgggcgaatgacctcaagctgaggaatcgcgcggaaggaagcaaggtgctcaaccggctggtgggtcgggccgtcctcgccgacggcgacggagtcgtgggaccagatgtacaggttcgggatctgcatgagggcggccagacgaacggcggaacgctcgtagtcggagaacatgaagaaggtgccgccgaacggacgggtgtgggaacccagcaggatgccgttggtgatgcagcccatggtgaactcgcgcacgccgaagtgcagctggcgaccgaactcgttgcagttcggccactgcttggtggcgcactcggccggggcgaaggtggcagcgcccttgaggtcggtcttgttggagccaccgaggtcggcggagccgccccagagttccggcatgacggcggcgatggcgttgagcacggagccggaggcgccacgagtggcgacacccttgccgacttcgaaggtggcctcaaggtcgtcaagggccttgtcgaagccttccggcagttcaccggccttcagacggtcgtacagggcggccttgtccgggttaaccttgcgccaggcgtcgaacttctcgtcccaggccttgtgggcctccaggccgcgatcggcgaccttgcgggcgtgggccagggcttcttcgtcgacgtggaaggactcctccggatcgtagccgaggagtttcttgaggccggcgacggcctcggcgcccagcttggagccgtgggaggacgggtcgttggtcttgcccggggtcggccaggcgatcagggagtggaccttgatgagcttcggctggtccggggcggcggcttcggccttggcgatgacgtcggccagaccctcgatgtcctccttgtaggagccgtcgggctggatgaagctgaactcgtcggtgtaccagccgtaggcctggaagcgcttgagcacgtcctcggccagcaccaggttggtgtcgccttcgatctggatgcggttggcgtcgaagatcacggtcaggttgccgagcttctggttggcggccagggaagcggcctcgccggagatgccctcctcgatgtcgccttcaccacagatggcccaaatcttgtggtagaacggggaatcttccttcggggtctccgggtcaagcagaccgcgctggaaacgctcgccgtaggcaaagccgatggcggaggcgaagccctggcccagagggccggtggtcatttcgatgcccggggtcaggccgtactccgggtggcccggggtgcgggtggcagcgccgccacggaagttcttaaggtcgtccagggtcacgccgtagccggagaagtacagctggacgtactgggtgagggaggcatggccaccggaaaggatgaagcgatcgcggccttcccagttgggatcattcggatcgtgcttgatgaagtgctggtacagcgtgtaggcgacgggcgccagggagacgggggagccggggtggccggagcctgccttctcaaccgcgtcagccgaaaggaccttcgccatcttgatggcgcgctcgtcgagctcggtctccttgaattcggtcatggattactttccttccaattggtcgggccgcgtatccggcttgtgccgggcgcttgacgccctcacattgcgattaccatgctagcgtcggtttgcgacgttgcggtgcaattttggcgtgttttggtagtttgtgttctgttagcgttcacagtgaacattgctacgctgcaaacgaacgcattagcactcaagcctaaggagtgctaatacaatgttctaaggtgaagtgcgccacctgcacgtggcggagccaagaaagaggcaatatttctgggttcccgcgtgtcgcggcgtggcgaaccgaccgtcggggtacgccctgagtgaaccgtgactgatatgaatatgtatgcatatataaggaggcgcgcatgacgcaatcaagacgcatgctggtgctgcgcgccgtggtggaggattacatccgttctcaggagcccgtgggctccacttcgctgacgcgcgaccatgatctcggcgtcagttcggccaccatccgtaacgacatgtccgctctggaggatgaaggatatctgattcagccgcacacttcggccggtcgtgtgcccaccgaaaagggctatcgatactttgtggaccgacttgctaccgtggtgccgctcagcgaggcgcagcgccgcggcatcaacagcttcctgtccggatcggtgagtctcaaggacgcgctgcagcgttcggcacgactgttgtccgaaatcaccggtcaagtggccatagtcacctcgccatcgctggccaaggccacattgcggcacgtggagatggtgcccgttgccatgaccacgttgctcgcggtggtgattaccgacaccggccgcgtggcccagcacggcctgaccatcgcatccatgcccgccgtggacgagatcaaccggctctccaacaccgtcaacgaacaatgtgtcggactgtccctatcgaaatccgcggagaccgtgcgatccatcgccgccagcgccggctacgagtcggtgcgcggcgtggccgacgcgctggccgacgccttcgaatcgatggcattggacgaacgcgcggacgaactgtacatgtccggcacctcgcacctggcccactcccggtccctggccgatctggccccgctcttcgacgcgctggaagaacaggtcgtgctgatgaagctcatgagcaacctgggcgaggagacgaatgcatccggcgtgggcgtggccatcggctccgaaatgcacacccccggcctactgcatgcctccgtggtcagcagtggctatgggcgcagcggtgcggcgggcgaaccggcggggaacgatcccgtaggcgaacccgaaaccgaatccgagacggagagccagacgaacgacacggaacccatcgccttcgtcggctccatagggccgacccacatggactatgcggccactatggccgccgtcagggccgtagccagatatttgaccgccttcctctccgagggccggacccaagactgaccgccgtctgtggcacaatgacccgcagaccaaacgaacacaaaggatcaatcaagtggcagattattacgagacgctgggtgtggaacgcggcgccagtgacgacgagatcaagaaggcataccgcaagctcagccgtaagtaccaccccgacatcgcgggccctgaattcgaggacaagttcaaggaagtgaacaacgcctacgatgtgctgtccaatccggacaagcgccgtatgtatgattcgggcgtcgacccgaacgatccgaacgccggtgccggcggcttctccggggcgggcttcggcgatatgagcgacgtgttctccacgttcttcggttccgcgttcggtggtggctcacagggcccggtgccgcgtacccagcccggccgcgacgccctggcctccgcgtccatcgacctgaagaccgccgtgttcggcggcaccgcgcacgtcaagatcagcacgttctccctgtgccaggagtgcggcggctccggcgcccagggcggcgcacagccggtcacctgccccgactgccacggccagggattcatgcagaaggtcgtgcgcaccatgctcggccagatgatgacctccgccccctgcgaacgttgcgagggccacggtaccatcatcaagaacccgtgccccagctgcatgggccacggccgtgtgcgtaccacacgtaccgtgggcgtcaccgtgcccgccggcatcaacgacaacgcgcgtctacgtttggccaaccagggcgaagtgggtgagggcggcggcgctgccggcgacctgtacatcgacattcgcatcaaggcggataagcagttcacccgcgatggcgacgacctgcactgctggattcaggtgccgatgagctgggccgtgctcggccacgatctgtccattgacacgttcgatggtgagaagaccgtgtccatcccggccggctgccagcctgaggacactgtgacgcttaagggactgggcgtcacgaacatccgcaacaaggacgagcgcggcaacctcatcgcccacgtcaatgtgctgattcccaccaagctcaacgaaaccgagcgcggcctcatcgaacagttcgccgcctcgcatgattcaggcgccacgcacgtctcccaggcatcccgtccacaggctggccaaaagaaaggcttcttcagcaagttgaaggacgcgctgagctgagagtggatgcgttcttggctcccctcagagaggggagccaagtctgttacttcagcagggagcggcacatggagcggtattcgttgacgtagccgccgccgaagaaga

SEQ ID NO: 1608 - DNA, 4467 bp, Unknown
  R221_24m  MAG No. k141_56055
ggccatctcgcttgccggttgcgctactttcccgggaatgttgcgctcgtggcaagagacggcaagttcaggcggccgagattggcgatacccgtcgtgtagtcgaacgttttaccggactgccttacgagcgttgctgacggtagcctacactgagaaacagcctacactgagaaaccatgagcaagcaccaccatcgcgaccgtagctgggccccggcacctgaagcattgccggacgacgcccagaccatcgacaaccacactcacgtggcctccgtaatccctttcgcgcgcgctatgagccatgaggcgcaggagaaggggcagcccgaagtcccggtgtacgacgtcgaccaattgctggcgcaggcgcaatctgtcggcattgggggtatcatcgactgcggttgcgagctgccgcacctgatgaccgccgtccagatggccctcgatcatccaggtaacgtgcacgcggcgctcgcaatacaccccaatgagtccgtgctccacgggcatcgcggtgtgccggggccggatggtctgcccctcaaatacaagccttaccatgacacgtctttcgaggacgcgctcgccgaagtacatcgcctcgccaccacataccccgagcaagtggtggctatcggcgagaccggcatggacctcttccgcaccggcgaaggtgccaaggaactgcagcgcgaggctttccgcgcgcatattgccctggccaaggaactgggcctgcccatgcagattcacgaccgcgactcccatcgcgaggtcatcgaaaccctgctggccgacggcgcgcccgaacgcaccgtattccactcgtattccggcgaccgtgagatggccgagattgcgcgcgaacatggctggtacctgagcttctccggcaccgtgagctacaaaggcaatgacggtatccgcgaatcgctgcggattgtgggtctgggccatgcgatggtcgaaaccgacgcgccgtatctgacgcccatgccgtaccgtggccgcaccaacgcgccgtacatgatcccctacaccttgcgggccatggccgatacgctcgacctgtccatcgcggatgtggcgcgcggcacccgcgataccgcccgcgccgtatacggactgtgagggccgggtgtgcggccgtcgcggcgatgtgttgacttgtaaaatttgtcagaattgtgaacgaggtctaccatgatgtacctgacataagcgagggggatgatctccacctcaatggaggactgaacgtatggctgagtcgaaccaaaggaccgcacgcgcccaaaaagcctcaaaggcccagacagcccaggctggcgccgccaaagccaaggcccgacaggaagaagaagcactgctgagggccgacacctttaccaacgctcccaaggtgtcccgccgcactctcaccaaggaggagcgcgaggcactcgccaagcagagggaagccgaaaccaaggaagccgagaaaatcgccagcgcatggtcgaaaggcggcctcggccgatggtgggcccgcttgcaatccagcccagacaaggttacctggggcatggcgatcgtggcgctcggcgtggtgtacggcgacatcggcacctcgcccctctacaccgcgcagaccttccttgccggtcagggagggcttggcagcgtaaaccgagaggccgtgctcggcatgctgtcgctggtcttctggtcgattacgctgatcaccaccgtcaaatatgtgctcatcgccatgcgcatcgacaacaatggcgaaggcggcatcttcgcactgtactcgttgattcgcaagtacggcgcatggctcgcgattcccgccatgctcggcggcgcggcattccttgcggattcggtacttaccccggcggtttccatcagttccgcagtcgaaggcttgcagaccctgccgccattggaagggttgttcgacgaaaacccaagcctgaccctgatgattaccgtcgtgatcatcgtgattctcttctccgtgcagtcgcgcggcaccgaaagcatcggcaaagtattcggctcgatggtgctggtctggttcagcttcctcgccatcgtaggcgtcacgaatctctctaacgactggtctgtgttcgcggccctgaacccggtgtacggcatcaaattcctgttcagcccggacaatgctgccggcatcgccctgatgggcaccgtgttcctctcgaccaccggtgccgaggcgctgtactccgacatgggccacgtggggcgcggcaacatctacttcacctggccattcatcaaggttgcgctggtgctcaactacttcggccaaggcgcgtggatgttggccaatagcgataacccgcaatacaccgcgatgaagtcgctcaacccgttcttccagatgatgaccccgaacgtgcggtacctggccgtgattctgtctgtttcggccggcgtgatcgcctcccaggccctgatcacgggcgcgttcaccatggtttccgaggccacccgcctcaactggatgccccatctgcaggtgcgttacccggcccgtacgcgcggccagctgtacattccggtggtcaacggcgtgttgtgcgtggccacgctcgccgtgctcgccatcttcaaggattccgaacacatctccgccgcgtacggcctggcgttgaccattacgatgatcaccaccaccgtgttgctcggcgtctacttatggcattccggcaagcgggtcggtgccatcgtgttcaccgtgctgttcttggcgattcaggctatgttcttcatcgcgtctatggccaaattcctgcacggtggttggttcaccatgttgctgaccgccgcgattctgttcgtcatgtacacgtggaatgagggcaccaagctcgaacgtgcgcaacgccgtcacatgcggcccaacgacttcctacccgcgctcgacaagctgcacggtgatttccgcatcccgtattttgcggacaacatcgtgtacctgacctccgactcggaaaccaagcgactcgacacggacatcttcttctccatcttcgccgaccaccccaagcgtgcccgtgcttggtgggcagtcagcgtggaaaccaccgacgagccgttcacccgtgaatactcggtggaggacttcggcacgaactacatctaccgcgtgcgcttccgtttgggcttcaaggtttcgcagtccatcccggcgtacatccaccagatcatgcacgacctgtccaaaaccggcgaactgcctaagcagaagtcgatttaccccaaggtcgacgccgatccggacatcggcaccatccgttacgtgctgattcacaaggccctgatgccggaatccaaggtttccgcacgcggtgccctgtcgttgcaagccaagtacgcaatccgccgcatggccggctcgccggttaagtggttcggtctggcaccttacaacccgctggtcgaggtgcagccgctgttcgtctccacccgccgcccaccgcgtctgaagcgcaccgatacggccaagaccatcacgacgcccacgccgactcgtgcagtggccgacccggccgccgtccccgacccgatggacaccacgtccgggctcgggcgattggtacaggagctcgatgccgccgtatcggccgaggaacggaagatcgctgaggccgctgccgccgctgcggtcgctgagcagggcgataagggcaaggccaagaacggcaaacccgccgccaagcctcagcgctccgccaaacagaagcgataacataccagtttgcagcggcgctgatgcgctctataaagaatggctataacggtcgccgcacgtcgccgcacggtttcggtaagttgaaataccatgtgcagattactgggatacgcgacggcaggtttcaacctgagtctcaacgccgtgttggggcaagacaatgtcgaggatttccgtgaactgtctgaaatccacaatgatggctggggtgtagcccagctttccgatcccgccgaagcgccgcacgtgcgcgacggtggcgcacccaccccggaaaccggcacccgaatctacaagtcgaccatcgcggcccgtcatgacagcacgtttgaggcgctggccgacgaaccgtctcgcggtgccatctggcacctgcgcttggcaagctccaatctgccgctcatcatggagaaccagcacccgttctatgcgaacggcctgagcttcatccacaacggcgatatctcggacgccaatggccgcaacattgtcaccaaccgctcatacccggtgaaccacagcgtgctcctctccaccggcggccgttccgactccgctatcttcttcgcggtgattctggactacatcggcttcggcttcccgctcgacgaggccgtggcccaggccgtgcgcgaactgcgccaagcctacccgaagtccagctacaactgcatgattcagtccgaggac

SEQ ID NO: 1609 - DNA, 4059 bp, Unknown
  R221_24m  MAG No. k141_56849
gatcccgccccgccctggccgcgcccgccaccacgcagctggccgagtgagaaatcagcctttcaaccgataccgctgtaccgagtcgtcggcgaacttgactcgggcgacccgcccttccttcatcagctcgcgcatgccggacgtggcggccagcggagtcaactgcagttcgcgcatgatctccttgacgctcatcgccgaatgccgttccagtacggtcataatcgccttgaccacgtcacccggtgaactgttcgccatcgtgcgctgcttggtgatggtcatcgtgaacgtgttgatgtcgttgcgcgtggtcgccggctcgatgccggcctcgcgcaacgcggcggcgatgcgctggtagccgtcgccgccttctgggttcacaaacccgccgcccggatacggcgtggactccagcagcgtgaacaggaactggtttcgggtggagacgaacggcgcgcccgtcaccggatgcggactcgccagcacatcatgtgtcaccatgccgtacaggccacccggattggtgatctcgatgcgatcggtgaacacgctgatatgcacctgcgtgccgcgcgcatcgggcgaataatcacggtgggtgagcgcgttcgcaatcgcctcgcgcaacacgagtggcggataatcgggcttcttcgcgccaatccaacgcatcaacgagtcgaccgcatcgtcgatcatcaccggaatcgaaccgaccaccgacttcgaggcgaccaatcgctcgtcgccccggaacacatcgtcccggctcgtccccggaaacacggctatcgaaatgccgagccgcggataaaacttctgcggatagcggcccaacgccagcagtccggccaaggtgggacgcagtattccgccgacctccgactcgtcggaatcatcatggcgcaacacctgcagatccagcagcacatcgatgccgtctcggtcggcgaacacgcgcggatgctgttcgcgcacgcgtgccaacagtccggcaacaagctgcgggtcgaggtcatcggtcgtggcgtcgggcacgatatccagatcgtatgtgggctgcagatgctcctcgatgagccggtcgacctcataggaggtcatgcgccggtcgccgtcgccggtgcggatgaacgagccgccgtgcggtccgagcgcggtggtgaagcagggcttgtcgcgcggcagcatctcgtcgatgcgcgcgaacaccagattcgcgccttcgaacgggcaggtgacgatcacgggccgcaccaccggcgtcatcttctcgcacgcctggctcagcgcctcctgcatggcgcgcgcgtcgaatccctcgaccggcgtgaacccgttcttttcggacaggccaaggatgatccagccgccggagccgttggagaacgcggacagcgtatcggtgatggtcgaggagatcttgcgcttgcattccttgacctcgcactgctgcgtatcgttgccgatcaggcgcatgagttcgatcagctcagtcattttggcagtatagtcatcgaccatggcggcctccttgacaccattgtgccccataatccgccgcccgctcgcctccagacccgccggttcactccaattcatccagaattcatgggttactggtcaaagtacgaatgattgccgagaggctgtcgtatatgcgcaatagcggctgcaaactgtgttgcgccagagcgttcaagtcttttagcaaagtcgggaatgtttatcggtggccgatgtcgagaatcgataagctcacgtatggcgctagctgtggcttccggatttcgtctaagtaatacacagagcaaatcatctggcgtgatgacctgaatggagaaagagtcaagcagtttctggggaaaatccttgatattgcgcgtggccagtgcgtctgcttgtccctgtgccgcagccgcaagtacgtgacgatcatccgggtcaggcagatcgaattggctccattccgattcctcaacatgtatggaggattcggggaatgcctggtccatcattatcagtctttttcggaaggcttgttgtgcggcgtcaggcagtgttcgggaggcggcttcctgtgcttcttgtaatacgttaggcgaccacaggggaagaaaaaggtcatgctcggccaaggtgagcagaacatcggtcaaggtgatggaatagatgacattggcatcaagaaacaccgacagcatcggcccgtactctccttacctccgataccgcatgcatggcttcctgcggggtcggctcgggcaggtcgtacaattcggcgtcttccccgacgccgatcatttggctcagggcacaatccttggtgtgtttcgaggctcgcttgtattcaagtaggtcttccagccggatgcgacggtgattggacggacgtgaaaaaggaataagtcctttatcaagcagtcttatcagtgtttgccgcgaaatgccgagcattgccgccgcctgttcggtagtcagatcttgttcggtggcactgatcattacacttttgccttcggcgagaaggatggccgtctgcctgacggcgtcgcaaagctgcgaaggtaggggagtctccacgccgctggcatctttgatgaagatccgctcatcaagaaatcgtgcggtgaatgcctccaatgtcgtcatgtcgtcaatgttgatggatggaaggattgttcgtggaatggtgagtttgtcggattctgccatggtgacctcctttttatttatcacagtataaaacgtccaaagcgaccaaaacgcctaaaacgttcaaattatgcgaattgacgatggttatcgagttttcgaatatgggttgctactggccgctaacgaggtcgaggagggcggactatgttgggtggccgtgggaatcttgcgtgtgattgatgctgccgttgctccgattgagggtatgtgggccaagggccgggtgaagttggcgtccgagccgaagggcaagcggttcggtttgttcgatgccaagggtcgcggggtggatatcgaggcgccgatcggccccgattggaaaggcgcgaacggcgtgaagccgattcgtgccgtcatggtcggcgattcattggtggccggatgtggcgtggacgaccagtcgaaaggcattatgccgctgcttgccgcgcgcgtcgcaagcgtaccggtcggccggtggcctggcgtacggtcggcaagctcggcgcgaccgctcgacgtgtgcgctaccggatgatcggcgatatcaatgaccggccggatgtgctgatcgtgtgcgtgggcggcaacgacatgctcgccggccgttcggtgcgcgaatgggccgccggcctcgcgccggtgctggacgcggccaagaacaaggccggcaaggtggtgcacacttttgctggtcactccatccaccactgccgcgaaaccatcggtgatgatcagcccgttctcattgagcgactggtcagacctcttgccttggcagtgctgttctatgatgtgcatagcgattttcgattccatggttgtcagaacgcttaaaggcggctactggctcattatgatggcagcagtgacatgcggatatggggggcgctgtctaaatgaaagtgcaacaccctttagattggagattgtccagataaccagtgaaagggtgttgcactttcatttagacagcggggggacgattgagaagtcataattccgttacactggcaaggacaaggaactaaggtatgcgaggattatcggtattgagcagggcgttgcgatgggcgttggtgggtatgacgttttcgatgctgtccaacgcgattttcgaggggtcggtgattccttcgattctgatcgtcggactgccggcatgggtgatcgcgttccgcaagacgttcaatctggtcatcgacttcgcttctccgatatccgcatggatcgtgcagcggttcggctcgttccgttcgcttgcgaccacggagggcgtggaaggcgtactgtgcctggcggtcgcgctggtgcccaacggttggacgtattggaagtggctgctgctggccc

SEQ ID NO: 1610 - DNA, 2540 bp, Unknown
  R221_24m  MAG No. k141_58839
gccgattccgcaccacacttacctcagcacgccctcaatcaatcgcgtgatgagttcggtgtagctcactccggtggcatcccaagccttgggatacatagaaatcggcgtgaagccgggcatggtgttgatttcgttgaccatcaccgtgccatcaggcgtcacgaaggtgtccacacggctcaagccggcaccatccacggccttgaacgcgcgacgggccacgtcacgcacgtcctcaagcacgctgaccggcagattggccggcacttccacgtggctggcggaggcatccatgtacttggagtcgaaatcgtagaactggtcgtcgttctgatgatcgagcacgatttcgccgggccagctggcctcgggctcgtcaccggccttcgggcacagcacggcacattcgatttcgcgaccatcaatcccctgttcgacgagcaccttccaatcgtgctcgccggcggtggcgatggcggcggccagacgatcctgctgggtctcgcggtcatcggctttctcgaccttggtcacaccgaagctggagcctgcgcgcgaaggcttgatgaacagcggataggtaagaccggcgtcctcgatcttggcaagcacatcggcggcggtgaagttgcgcgcatcgaccgtcacacccggcgcggtgggaatgccggcggcacccagcaccaccttggtgtaatgcttatccatgcaggcggcggaagcaaacactccgcaccccacgtacggcacacccatcatttccagcaggccttgaaccgtgccgtcctcgccataggggccgtgcagcaccggcagtaccgcgtccacatggccaagggaggtcagcgcatggtgcatttccgggtcgggcatgctgacgaagctggtaccgaagccggaatcggcggaattgatgtggcgggtctcgccgatgaagaaaccgtcctgtccgcgagaggggtcaagcatcaccgggcgcgattccggggtgatctttacggtcggcagctcgccgccatccagattccagccacgaggatcttcgccgttgatgatccacttgccgtccttggtgatgccgaccggaatcggctcgaaccgttcagtgtccatggcccccagcacaccggcagtggagatgcaggaaatcgaatgctcgtctgcacgcccaccatagagcaccacaacacgcttcttggccataaccatccttttattgaaactacaaccgttttcaagcctatgctttgcaccgccaaccggaccgaaccgcgctcggaccgccgcgcacaagagacgcacaccagtctactcgcgcacgtcaacgacgtatacaccacacgactttgcacgtacgacgtatacgccacgtatacgtcgcttctctcgttattcgccggtaacctcgtgcccgaacagtccggcaagcatctccgagcaggaaatgccttcgttcagcacgcggctcatctgatacgccaacggggtcggcacatcaagctgctcgccaagagccaccaccgcatccgtggtgggcacgccttcggccaccccgttgctgaccttggtggcctcctcgaccgtcaatcccttgccgagattcgcgccgaacgtatagttacgagacagcggagagccacaggtggcgatgagatcacccacaccggccaagccgaagaaggtcttgggatcggcgccagcggctgcgcccagcgcggtcagttcggccagtccacgagtttcgatcatggctgcggtgttctcaccgtagccggcaccacgggccatgcccacggccagcgcggtcacgttcttcaggctgccgcacatttccaggccgatgacgtcggtggtcacgaacggcttgaaataggaggtggtacatgcctcggccaccttcgtggcattatcgaggttcgtacaagccaccacggtggcggcaggatgacgatcggcgatttccttggacaggttcggtccggaaatggcggcgaaccggtcggccggcaggtcaagggattcgcggacgacttcgtccatacgcttgttggtgccacgctcgatgcccttcatcaggctgacgacgatggcgtgatcgggaatcagtcccttgaattcgacgagtgccactcgcgcgaactgcgcggcgatggccacaaccacgatgtccgcgttcttgacggcttcggcgcgatccccggtggcggtcatgttgtccggcaacttttcgacggacggcaggcgcacggcgttgtggtggtgatcgcgaatgccctcgacaatccgctgctccttggcccacatggtcaccgtgttgccggcgtccgccagcacttggccgaaagcagtaccccatgctcctgcgccgagaaccgttatatttttacccatatcagattcctaccttcgcttgtcgcgcaacttcatcggcacaatcttgtgccatgctactcgcctaggctccccgtacgggaaccggtgcggctacttctcagccgggaacgggccgccggcttccggccaaggcttgcgactca

SEQ ID NO: 1611 - DNA, 9965 bp, Unknown
  R221_24m  MAG No. k141_58940
ccttctccgtcggtgacgatgaaggttttgtagtcggcgatcatccgcttggacatgcgccggccatcccattgaccggctttcggatcgttggcaagaccgttggagggtacggaggggccacgcccggtctcgccggccgcaaagtcatggcgcttgggttcgggcttggtcgtatgcaactccggcatgattccctccttgcggaaagcattagttcccctctttgagggggagctgtcgtcgtaggcgactgaggggagcttcggaatagctcttcggactcccctcagtcagctttgctgacagctcccctcagagaggggagcctactcacgaataaccctacttggcctcttcgaaccactcgcgggtggtgccgtcatccagcgtcacacgaccggtttcgccgctcatgtgcttgactcggtgggcgatctcctcgtgacggccgtgcaccatcgggcgctggaccgggctgccgaggtagccgcaggtgcgcttggtgacgttgcacttgtccgggttggagttaccgcactccgggcacttgaagccttcctcggtcggctcaaagtcgccctggaagccgcacacgaagcagtggtcgatcggggtgttggtgcccaggtagccgatgccgatgttgtaggcgtaatcccacacggcttcgagcgccttcgggttgtcctgcaggcacgggtactcgcagtagttgatgaagccgccggaagcgtagtacgggaagtccttctcgtagctgagcttctccatcggggtgggctgcaaccacaccgggtagtggaaggagttggtgtagaagtcgtggtcagtcacgccttcgatacggccgaacttttcacggtccatgcggttgaagcggtcggtcagggattcagccggagtggagtacacggaatagtggtagccctccgctttgctccactgcttgcacagctcgttcatgcgcttgacgatggacagcgcgaactccttgccttccggatcccagccgtggtcgcgaatccagttcttgccgtagaagaccgcggtggtctcggcaaggccgatgtagccgagcgacacggtggcacgctcgttcttgaacagctggtccacgttgtcgttggcaccgagacgaccgaacgcaccgaagcggaacagggtcggggcgttgaccggggtggcttccttgcagcgcatgatacggaactggagggcctggtgggcgacttccatacgctcgttgaacagcttccagaagcgagccttgtcaccgtgggattcgatggcgatacgcggcacattgacggtgaccacgccgaggttcatacggccgtcttcttcatccttgccggtctccgggttgatccaaccctgcaggaaggagcggcaacccatcggagccttgaaggagcctgtgatcttgacgatgttctcgtagaacaccacatccgggtacatgcgcttggtggcggactcgagggcgagctgcttcagatcgtagttcgggtcacccgggtcggcgttcacgccgtgcttcacagtaaagacgagcttcgggaagatggcggtgtggtgttccttgccgaggccgcgaatacggttcagcaggattgcgcgctgcacctcacgagagaaccagtcggtgccgagaccaaagccgacagtcacgaacggggtctggccgttggacacacggttggagttgatctggtattccatggtctgcatggcatcatagatggccttgcgggtacgaatcttggcgaggatttcacgctcctgctcaagttcgtcaacgtcggtgtggaacggggtgtccatcggcagcggttcgcgggaaccgaaatgcagcttggcgggctcgttcttcttggcgctctcgacctgacgacgggcgaattcaaccggcatgccgtcggggatggtctcacgagcttcctcgaggaacttctcgtaatccttcttggcatactgggcaagatgctcgtcggcacggttggcggtctggccaccatactggctggaggccacgtccttcatgatctgggtaatctgggtggccgcaatggcgatggacttcggggaagccatcggagcgttgccaagagtgaagccattggccaacatgtcccagaagttcggcaaggagcagttggactgggcagtgaacggcgagtagtcggcatcgtggaagtgaatatcgcccttcatgtgggcgttggacaccgctggaggcagcatgttgaacgcggcagccttggacacggcaccagccagcaaatcacgctgggtggagtagacgttggaatccttgttcgcgttctcgtgaatcagggtcgggtcatgattaatgaagcgagcaacggcctcgttcacatcagtggccttggcgcgctgaatgtccttgtcgagacggtagttggtgtaggcgcgagccacatcgtacaggtgggcgtcaatgagggcgtgctctacgaggttctggatgtcctcgatcttggcggggccggcgtaacgccccttgatttcgccttcgacttggttggcgaaaccacggatcatggcatcttcttcggggccgacttccttgttcaggtcaccgaaagcagacttgaccgcagagatgatgttaatggggtcgaagtcgaccacacgaccatcacgcttctcaacgagcacggtggaggccttggcggccaccttggtctcgttatcggtgacgatttcctccaacacctgtgcgcccatcgggcacccctttcctataaggcgaacactctcctgagttccgcattttggccacactcgacgtgggccacacgaaattacattgatgtcgttttcttgaacctctagaagaatacggcatccccacccctatatctagtgctcaacagcggtgtgtcgaactatttatagggttttcggctattttccgccaaaaccacaagtgtgtgattagcgtaactgtttttctgcttgcgtgtcgcacagcgagctcactgacgactctcaatcgtcagcgcaacgcatatctcactcctcttcatagcacccgtttcttcgccataatgactcctttcttctgatgcaccagaccatctccatcatcgtctgatacatcgcttcgtacggttctcgcattcatcatcacaccgttttcaggcgacggtaaatttttaccgccatcaaccaacgcacttatagtggaatgcatgactactgcaatgggctacccatctaccggccgtccaccgaccgccgcttcactggcctcggctggctttgagccgggtcaaggcactttcgcgcctgatcagggcaccatcaatctgccgaatgagcctcgccctatcgatcagctgcctgcacgcgccgctgaaaccagcgcgcaaaatccgtggccggtaagtgtgctgagccagaagttctacggtgccgtggaacgatggccgtccgcgtgggtcaccggccagatcacgcagatcaatacccgtcgcgccggctcggcctacatcacgctgcgcgacgacttcgaggatatcgccatggaagtcaatggcttcggcaggttcgcggccgcggccagccagttcgttcagggcgaccgcgtggtgattcatggcaaaccgaacctgtggatgaagcgtacttcgctgtcgttgcgcggagacacgattctcaaggtcggagccggtggcagcctcaaggccatgatcgacgaattgcgcaagcagcttaagggcgagggcctgttcgatgccgatcacaaactgcctctcccggagtttccgaagactattggcctgatttgcgcacctcaggcacgtgcggaaggcgatgtgatcaccaatgtgaaccttcgttggccttccgtaaccttcaaggtggtccatgtgcatgttcagggcgagcaatgcccggccgaagtggttcaggccattgcacaactcgatgccgacccgagcgtggatgtgatcatcgtggcccgtggcggcggctcgtttgaggatctcatcggtttctcggatgagcgtgtggttcgtgcggcgtatgtctgcaccacaccattaatctcctccatcgggcatgaggatgactggacgttgctggatctggtcgccgatcttagagcctccacccccaccgatgcggccaagcgcgtggtgccggatgtgcgtgagcagtcgcagctcatcgaaggtgccatcgaccgtatgcggctgcgggtccgttcgcgcgtggagaacgagattcgacttatcgagggatatgcgaaccggccaagcctgacccaaccgcataccatgctcgaaccgcatcagcggctaatcgacgattccctgcagcggcttgacatcggcctgcggcgtatcgtggacgatgcccagctcaccgtcgagcgagctcacgcctcactgaccgcactcagcccgcaatccacgctgaaccgaggctatgcggtggtgcagtcctccgatggccatgtgctggatgacgcttcgcgggtcagtaccggggatgacatcaccgtcaccctgaaaaagggcgtcattaccgccaccgccacatccgcaaccgcaaccgcgtaatgcaccatatgcattcacgcatatataccgtatatataaggagaacaagatgaccgagaacaccacacccaccgacaagaacacccccgcctcgtccctgacggacaaggaacgcgagctcatcgcccagatgccatatgaggaggcgcgcgacaagctgattcaggctgtccaggcactggaaaccggcggcctcaatcttgaccagtcgatgcgtcaatgggaaatcggcgaggccttggccaagcgcgcccagggcctgctcaacgacgtacgagccaagctcgaccaggcacaagccgagcaagccgccaacgaagccaccgcaggcacgcagtccaacctcgactgagttgcctcccggcgcggcatcatcgtgcaagcttgcggatgatgccgatgcgctcctgcatggcggagcagatggcgtcaatcacatcagcggacagccggcggttggtggcgagctgtgcccgtatcagttcaggcacctcgtcgagcatccccaaatcataacggtcccaatcgtcgataagtcccaactgccagtaggcgttgtccgcatcgccgtagtcgtcgacccagaacggcttcgccggatagtcttcgttggtgatggcttcggggtccatgccgttccacaggctggcgccgctgtcaaaaatcggggccgggcgaatctcgaatgattcgacgtcacggatgagaccgaagttgttgtaatgccggtcggtgttgcgcagaagaaaatccaggaacagaaaatcgttggtcgccgcatttgccgtatcacggcttacgccgagttgctgacatgcgtccagccatatcatcttgcgttcggtgttgtcgccgcgtcggaagatgcgcataacctgccctgcgggaatcagctcttgcgtgtcttcgagcatttcatcgcagacggagacccggatgcccttggcgcggccgatgcggtattcgacatggtcgatgccgaacagtcgtgccgtctgccaggcgatgcgctcgttgtccggctcctgaccggtgcgccttcccttgatcaggctgcggacgccatcgggaccgataatccaacgtttcggcaggtcaccggcactggtgacatccggggtgttcacgttgccgatgcgcgacgaattaccgaagaataaggcctgcccaagtcgttcgtcaaaatcgttgtggaaaaagttcagtttttcccacgtcagatcgggccggtcgagaggccgcacccaatactggtccgacaggctgagtcccaaggaacggtccagcagatcgttcgtcgaagcgatacccgaaccggcaaatacggaacgcataccgtcacgggtcatgggaatgccgcgagaacgccaccacccggtaatcgactcaccggtgggctcaggtttgccgtccacatacatgccgatcgggattcgggactcgtcgtagatctcccctgccctcagggcgtatccgccgcgttcgaaatactcgaactccattaccggatgggtacggcacatcagcatgcggttcatggtcatgtgcgcctcccgttattcagtccaccgacgatatccgcgtcatatcccatcctatccgctttaggactcgtatatgcggcccactgaagcttcagcgccaaatcatcagtcagcatcctttcccgcgtcaattactcatccgcggcatcccgcggctcgcacctgaatccggactggactgagttctgcttcccggcatacgatagtggtgattaggccacattggtagcagttatagaagggaaatcccatgtcaacgctgattcttgtattccatccgcacctgaaggacggctcgcgagtgaacgcccgtctgcttgccgaactcaccgcacaaggcgaggacgacatcatcgtacgcgacgaatacgccgaatatccgaacttctccgtcaacgccgacaaggagcacgagctactggaggccgccgaccgcgtaatcctccagttcccgttctactggtactcctcccccgcgctgctcaaggaatgggaagacgaggtcatcaccgcaggctgggcctacggtggaggccacgcactcaagggcaaggagctcaagctggtggtcaccactggttccgacgccgccaagtaccgcaaggatggcgagtacagccgcaccatggaggagctgctgagcccgtttgaggtcgtggcgtacaagatcggcatgaactatgctgagccgttcctggtgcagggcaccgccaccatcggcgatgcggagctggatcaggccgccgccgattatgtttcggcgattttggactgaataagctgaggccgggtgcaagtcgcacccggccttgttgtttcgcgggctagccgcggtctctcccagtcagcctgcggctgacagctccctcgtcagagagagcttattttttggatcagagggagttgatagctacttcttcaacggcacgtagatcacgtcgtcaatgagctcgcgatagtgctcaacgatttgcgcgcgacgggtcttcaggctcggggtcagcatgccgttggcctcggtgaattcgtctggcagaatctcgaacttacgaatcgactcggcgcgggaaacgccctcgttggcggcgttcaccgcacgctctacctcggcatgaatgatggcgttcttggccagcgaggccagatcgggttccggtttggcgccctgggattccaaccagttgttggcatccgccagatccagcgtgaccagagcggccacgaacggcttcttatcgccaataaccaagcactggttgaccacgggcgaggtcatcacggaagcctcaagcagacccggcgacacgttcttgccgccggcggtgatgatgaggtccttcttacggccagtgatggaaatgaatccgtcttcggagatatcgcccaaatcaccggtgtgcagccagccatcggtgatctgctgggtggtgactccggggttgttgtggtagcctttgcacaccagcggtcccttgaccaccagctcgccgtcctcagcgatgccggcggtgatgccgcacatcggcatgccgatggtgccgatgcggttgtcctctggcaagctcacacacaccgggccgcaggtttccgtcatgccgtagccctcaagcaccggcatgccgatgccgttgaagaagtgggaaagctcggagtccatcggagcgccgccggtgatggcgaagtcggcgttcggaccgaaaatcgtgcgaatcttcttgtacaccacctgctcgtagaaggcgtgggcgatgcgtccggtaatcggcagctgctcacccttctgctcggccttggaccattcgcgcgcgttctcggcggcgcgcatgaacatcttgcccgcaaaaccgctgccggcacgctgggaggcggcattgtagaccttctcgtacacacgcggcacggcaagcagcagcgtggggccgaaggtctcgaagtccttgaccatcgtcttcatattggagctcaaggccagcgaaatcgtgccgccaaaactgaagaattccaggaatcgggcgaacacatggctcaggggcaggaacagcagcagacggcggttgggccatgcgccggcacgaggcatgtactgcagggcggagcgcaccaggaacgcgaagttgcggtgggtgagctccacgcctttcggggtgccggtggagccggacgtgtaaacgatggtggcgcggtcgtcgccgtgggaggcgttcttgtattcccagaattcggcatcggtgacgctttcgccataggtcttgatggcgttcaggccgcctgcttcgatgacgaacacgttgcgcagggtgggcacctcgctgcgcacggattcaatcttgtcgcgctgaccgtcatcctcggcgatggcgagcgtgaccttggaatcgttgaaaatccagctgacctggctggcggagttggtctcatataccggcacggtgagtgcgccgatggacatgatcgccatatccagagcggtccactcccaacgcgtgcgagacacgatggccacggagtcgcccttgttgacgcccagaccaatcaggcctttggccagatcgatgaccatgtcgcggaagacctgggcgctatacggctgccaggtgccatcctcagttttatattcgatcatggcgccatcgggatcgcgcttggctcgctcatcgagcagatcgaacaggttgatgtcgctgtcgatcggctccttgacgggattggtgaactgcttgacgatacgagtatcgtttatggccttatcagcgatgttttcagtcatactccccatgtaactccacggatgctacaaaacacgcgcgaaacaacggattgtccagaccaaatggccccggcaatccgttatttcgggcaaaccaggtaaatctgtcgcaccgtacattcagcagattactcggcggagtcattggcctttttcagctcgtcgcgaatctcctgcagcgtggcgagagtctgctcttcaacgctaggcccctgttcttcagcgtcagcctcatcctgggcagcagtgagatcacgaagcttattaatcggcaaaatcacacagaaatacaccgccacgccaacaagcaggaagctaatcagcgcgttaagaatcgcaccaaatgaaacagtcgagttgttgaacgtgatggtcagcagtccggaaagatccggtacgccgccaatcatgccgattaatggactgatgagattgtcgacgatggaattgaccacagcggtaacggcagagcccatcaccacacctaccgccatatcaatcatcgatccgcgcgacaggaatttcttaaagccattcaacggacctttatcggtcaaagcaacaactttgcgagcggttcctcccgtggccttggcaaagtcggtggcaatattcatgggattgtggttactcataacggcactccttacgaaattcagacacttcacttgtatccgactggttttcccacgactccattatgccgcttgttggaatatccctataccactgcggcgtcccgtacgtgactatgtacgagaacgccgccacccctgtttgctgagaacctgttagagctgcttagaactgaatgtaatcgacttccgtatgttcgccggtttccaagtatttcgccacatcatcaggaccggcgaacaccagttcgaccgcttgcgcaatcatcagattgacacgatccattggtgtaaggttctcgaaatagccgtacaccggaattcccagcgcatgcgcatatccgatttcgaacatcgtgcccgggtcctcgtccataagattggcgaccacggctttagcagcattaatgccatggatatc

SEQ ID NO: 1612 - DNA, 14898 bp, Unknown
  R221_24m  MAG No. k141_60260
atccattggtgtaaggttctcgaaatagccgtacaccggaattcccagcgcatgcgcatatccgatttcgaacatcgtgcccgggtcctcgtccataagattggcgaccacggctttagcagcattaatgccatggatatcgtccgcaaagcatccttcagggcctacttcttcgatctggctgacaaaccgcggcttgaacagtaccttgccatggtcttccaatatcttttccaaacgttccatacttgccgtttgttcaggatcaaagaacggaccggccacatagaagtcatactgtttgtcttcactcatggtctctagtcatagcgcagccgcgtcggacgccagccgttattttcactgtatggacaaggggtcgtatcgtgaacattactacgggataaccgtcaatgactacgtacgttgcccccgatcagcacactccgccactttcgcccccctcccgtatcgtcgagcacgcgaaccaagccgaccaaatagccgccatctcatgcgctgattaccgtatccgaatgctgcaatgccttgaacaaccgttcgggccactgcgccgattcccaaccaaccgacttgaacagcgcctcaacctgttcgacagtaaaccgcttctcttccgtgtattcgatagccatggaccctcacgataaccgtgaagccccacatgtctttgcatagtttcacatgacgggatgatggatggtggaacctatacgtttacacatgcctaatgcctatggctcatcaccgatgaatagaggctgagataccgtcatgtttccgaagccaagtgcccgagatcggattcgaaccgacgacacccgctttaggagagcggtgctctatccactgagctactcgggcaacgacgtttcattgtacacggccgcacgcccagtcgcatcatgttcgcgtggcagcctacataagacgcattgcagtctgtgtaagctacctggcaggacccgccaccaaggcatggccggttttcgtgctggtttggtgcgaactgctcttgcgcacagcgaaaagacactgaaagacaagccgcacacggtacagtggcaaatcgcacgaaaagcaaggtaacagtaaacaagccggaggaaagggcagcatggcaaaggcacggagtactaccacaggtgcaagcgtacgagctcgcgccgctgccaagccacgctctgccaaagccacggcacgcccagtatccaagtctgccgtgaagccacacaaacggcatcgtctgcttggttttctcgccacgatgttcgcgcttcttgcccttgccggcactgccgcccgcgcgctgcctgccgatttacaggaactgccatttgtgccgattgtggtatcggcaacgccctggttcacgttgcttggcctgattgccctactgttggccatcgtgtcgcggcgtatccttgccgcactaatcgccatcgccgcaatcgcatgcaatggctattggcaatatccgttcttctactcgaccgacccactcccccaagccgcgcagaacgccgtggctgcggcctcccccaacaccagcgatgcctacgcgcgcgtcatgaccttcaatgtatacaaggggcaggccgacccacaagccatcgtcgaactagtccgcgatcagcgcgtcgaagtgctcgctttgcaggagaccaccgaggatttcgtcaaaaaactcaacgaggctggcattgagcactatctgccgtatgcgcaggtctcatcgtctgacggcgtattcggtaacggcctctggtcggccacgccacttgccgatccggccgacgatgacgtgaattccagcgcctcattcatgcccggcggcacggtggatatgggtggtcagcagattcgattcgtatccgtgcacaccaccgctcccgtacccggctattggcggcagtggaagcgatcgctggatgagttgggtccgatgcgcgggcatacggatacacggtatattttcatgggcgatttcaatgccacttacgatcacacgccattccgtgattttcttggcgaccggttcgtggatgccgcacgtgaatccggacatgggtttacgttttcgtggcctacgaaccgcgtgtatatgccgatgttcgccggtattgaccacgtggtgcttgatcagggcatgaaggccgggcaatgcaaggtggtcaaagtcgagggctccgatcatgcggcgttgttggctaccgtggcggttgggtgatttcgtattcctcgcccagccgcatacactgggacacggcttccagaatcgcctcgatgccggacttcttaattgagccgtcatcctttaaatacttcatcaggcgcactgtggatttggtgctggcctcggggtcagggcgagcgccgggagcggcgtcgacgataagcatgtggatagtgttcgaaccgatatcaagcacaccaagtcgcgtggtgcgcgaacgcagattgaccatgatccctattcccgaccttacctaacccgtgatggccgaacaacgggccgaccatcgcaatcagccagccgtgcgccaccatggcgagtcgttcggccggcaaccaacaccgcgaggccagccgaacatcacacaaactcgactactgtacaacaatcacaccggctgccgcgccgttcacaacgattcgacgaacgttccgagacgttccagcccctcggtcagggcctcacgtgaggcggcatagctcaggcgcacatgcgtatccgctgtggccgcaccgaagtcgcggccaggagtcagagccacatgggcttcatccagcgcgcgttcgcagaacgtccaggcatccagaccagtacgggagatgttgaagtaggcgtagaacgcgccattcggctccacctcaaccggcaaaccgatgcgcttgagcccgtcaatcacaatgcggcgacgggcaagcaattcctgacgacgagcttcacattcggccaaactctccggcgtaaaacaggcgagcgccgcatgctgggtgggcgtgtgggcgcacaggtagtagttggtggccaggtcgtcgaccgcttccagcacggtggggtcgtcgggcagaatagcccagccgagacgccagccggtcatgccgaagaacttggagaagctgttgcacacgatggcaccgggatcgcaggccagtacggacttgacttcggtgccgtccggctcacggtcggccaaatcaaggtaggtttcgtccacgatgcgccatgcgccgcggctggcggccagcttgcacacctcgtccaatacgttgaagtcgatggtggtgccggtggggttggacggcgacgtgatcattacggccttggtcttgcttgtccagtactggctgcacaggtcggcggtcaggtggaagcgggtggcggccgaggtcggaacgtcgatgacccgcccctcaaaggagcgcacaagttcgcggttgcacgggtaggaggggtcggccacaatcacatcgtcaccggggtccacggtcagcgcggtggccaacagcagggcggccgaaccgccggcggtcacgcagatacgcttggggtcgatgtcaaggtcatgacgctcgcggtagaagtcggcgatggcttggcgcagttcaggtaggcccatggcggcggtgtacggcagggcccggccgtcgtactgttcgcgcatggcgtcgcgtacggcgggcggcgcgccgaaatcgggctcgccaaggcttaatttgatgacgctgataccttgggcgatcatcttgtctgcttgttcgccgaataccatggcacggaagggattggcctcacgcgctcggcgggacatgactggagacgcggccggagattggggctgctgcgctgcttcgttttccatatttcggttctatccgcctcacgggacaaggtttcttcttctataatcactgtaggtcgattgagtgtaccaacccgtattcaaggaggaataatgagtcgattcaatggcaaacgcgccgagttcgaggccagcggcgaaaagatcaacgtcgcgattctgggtgcgggccgcatagctcacaccatggccgacaccctgacccagatggctgaaggttcactgtattcctcatggattcacccgtatgcggtagcggcccgtgatattacgcgcgcgcaggcttttgccgaccaatggcattttgacaaggcttatggatcgtatgaggagttgacggcggacccggatgtggatctggtgtatatcgccaccccgcacagtctgcacgccgaacaggcgatcctgtgtatgaaagccggcaagaacgtgctggtggagaagtcgttcaccgcgaacgccgggcaggcacgtgaggcgctggccgtggccgaggaaaccggcatgctgtgcacggaggccatctggacgcgctacatgcccagccgcaagctcatcaacgaagttatcgagtccggcgagatcggcgaggtgaaagcggcgagcgccaacctgtgctatccggtgtccggcaaggcacgtatgaccgatccggcctgtgccggtggcgcgctgctcgatgtgggcgtgtatccgctgaacttcctggatatggcgatcggtgccgaccatggccgcacgctggatcatttcgatacgtcgatgatggccgccgaaaccggtgtggatgcacagaattccaccacgttgtattacgatgatggcacgatggccgtgtccaccagttcgatgctggtttcctccgatcgcggcggctacgtgtggggcaccgaagggtatttggtggtcaccaatatcaacaatcccgagtccatcgatatctacaacaacgatcacaagcccgtgcgcagtgttgcggtgccgtcgcagttgaccggttatgagtatgaggtggccgatgcagccaacgcgctgctggatggcaagatcgaatgcgaggcgatgccgcacgccgacaccatccgcatcatggagctgatggatgcgattcgcgaccgttggggcctgaagttcccgtttgaggtctgatttcagctcccctccagaggggagctgaaattattccgctgaatctgcatctccttcaacaatctgctcatacagccgtgcgaggcgttcgtcacgcacggctttcgttaattcgcactcccatacggtaattacacgccagccggcggcctccagttcagcccgctgcgcgatgtctcgattgtgattgcgcagtagcttcgtctgccagaattccacattcgatttcggcatcgaatgtttggaacagccttcatgcatatgccagaaacagccgttgatgaacacgatggtgtggtatttcggcagtactacatccgggtggccggggtaacgcttgtcgttcttgcggaatcgcaaacccttgcgaaacagatagctgcgtaccagcacctcgattttggtgtctttgccacgaatatgcgacatcgtgtacgaacgggtgccccgctcatacttctccactggctgtttcttgcgattcacgcactccagactaccgtgacgttgcggcgaggatgaaagcctgaacgaacaatcacccatcttgcccgtccgtgtctcttatcgcgggcaatgatcatctgccggtcgagactgcacgattagaccgaatcaaatggatgacatgatgattcatagggccacggcggccgatattccccaaatcgacgaactgctgcggcaggtgctcgaagtgcatcatgccggccgaccggatctgttcaaaggcggtgtcaagaaatacacggacgaggaattgaaggcgattctggccaacgatcagacccctgtgttcgtggcggttgcgctatctgccaatgacggcactgacgtcgaacataacgccgactcccccgccaccgaccaagtgcaatggcatagcgccaagcgacgtctgctttgcgagatttgcgagagatgaatgcgataccagcgttcatggctatgctccttaatccaatatcaatggatgaacctgccctgccccgtatgtcaccatcataatatatcgaatatcaatataaaaatatcgaaaatcactttcaccattcacccacacacatcgcgacgtgatcgaccgttcttgccttgctcgcagcatccacgaccaacacgggaaagtcactttaaaaaagcactttatcaatgtggataactcggaagctagaaccacatacccccgttcagcttgccaatcagaaacctcatcccataccgtcagatgcacccgcacgcaacgacgcgtcagacaacagaaagaaggaccaatgaacatctctacgtttacccacaactcccacccggcaattcggcatacgcattttgtctagtgcgagattgagagttatgatgacacgaagaaaactcatcatcaagaaacttcggcaagcggcaaagcagcgagggctcgatttctatttgttacggcaaggcagcagacatgaggtttactgcctggacgggttgaggatacccatcccccgccataatgaagtctcagaacgaaccacgctggatatcatcaacgagagcgagcagaaactcggaaaggggtggtggcaatgagcaactatgacgtgcttgtgcaacccgatggccgatattggtacgttcaggtaccagctatcgaacggtcgacccaggccaaaggacttgacgatatcgagccaatggctaaagatctcatcactgtcatgaacgacgacgacaatccggagctcaaggtgacgtttgtgttgccgaaacaagccaaacaacacgtaacagaaatgttccggcagcgcgaaatagcaaaaaaagccaacgcacaagcggctgccgaatcccgactcgccgcacgggccctacgcaacgagggactcacgtatcgacaaatcggagctttattgggggtctcctaccaacgagcatttcaattggtcaacggcaaaacaaagcacaaaacgacagcgtccgaatcgcctcagccaacaactgaatcacgctccccacgcacgcaccatgccacaccgctatcgactccggtctcggcttagcgaacgggtccacaaagcccagactgtttccatcaccaagctcaagagcaccgagcaggatcttctcatcccagcagattgaggagatcgtccttggtgagggtggcgatggaggcgggggcttcggtgagggcgctggcaccggtgccggcttcgtcggcaagcaaggaagcatcggtgaactggcgggcgagctcgctcttggtatgctgaagctccaagatgcgttcttcgatggtgtccttggccaccacctgatacacgttgacgtcttcggtctggccgatacgatgtgctcggtcggtggcctgatcctgcgcggcagcgttccaccatggatcggcgtggatgaccacgctggcaccggtcaggttcagtccggtgttgccggccttcaatgaaatcaggaaggcgggcgtatcgtccgcattgaactggtcgacgagttcgagacgcttctttttaggcgtggatccggtgatggtgtagtagcgtagtccttgcgcgtcgaaacgttcggcgatcagatcaaggaagctggtgaactgggagaagatcagcgccttcttgccttcattcacgcaggtttccaccagttcggtgatggcggcaagcttggccgactgatccttggcatcggcatacagcagccttggatcacagcagatctggcgcaacttggtcagctcggcgaggatgcgaatcttcgacgtgttgaaatcggcttcttcgctgtgttcgagctgcattctgagccgctgctcgtgggccgcatacagtttgcgctgttcgccggcaagctgcacggtcagcgtggtctccaacttgtccggcaaatcggtcagcacttgggacttcaacctgcgcttgatgaacacgcccaccaacgactgcaattggcgagacacccgggcggcctcaggattgacctgtgcggcggcccgaccttcggccgtgctgccatctgcagcccgggcgttggagatgggcaactcgtagcgctcatggaatcgcttgtatgagcccaatagtcccggcatcaggaagtcgaagatgctccacagttcggagagtcggttctcgatcggcgtgccggtcaaggcgaaacgatggtcggcggccacggccttgaccgctttggctatcttcgtggtgtgattcttgatgtactgggcttcatccagcgccatgacattgaaacgttgctcattggcggtgtaatcatcgacatcccggcgcagcaggtcgtatgaggtgatgagcacggtgggttcatccgcccggaacgcgcggccgatggcggtgcggcgctcggctttggtaccggccaccaccacggcgttgaagctcggggcgaacttggcgaattcggcaccccagttgtacaccaaggacgccgggcacacgatcaatgatggatgcggcccgccatcttcggaatcgaaagtaatatgaccggttacggctgattcactattaacagcattaccggcatccatgccttgagcggtcggcatgccactagattcgttgtggtatcgcgacagcaacagggcgataagctgcacggatttgcccaaacccatctcgtcggccaaaatgccgccaaaacccttgtcgcacaacgtgttcagccattggaagccttcgacctgataagggcgcagaatatgcttgagactatccggcacttcatacgacttagggtcgatgatcttgagatcgtcgatgtattcggtgaacgaagcgtccttgactacatcggagccgtcatccggcagctcaccatccagtaggaatgctcgaccgcccggcaactcgatcagcccggagttgagctgctgctcgctcagatcaaggtcgctggccaatcggtccaacgtgctgagattcgcgccgctgagtttgaccagcgtgccgtccttcaaatgatggaatcgttgacgccgacgatacgaagacagcaaggcacccacttcgtccggcggtacttcatcagcgaggggtgatatctccaccaaattgcctttgatggacaatccgactttgacgcttggcggcttgggcgcgatcagccggtcaaaagccggtgtggtgaagacctcccctacttccttcagtgcgggcaatccctcgtcaaaaagacgaacaatctgcgtggtgtcatcgcgatcgatagtggccgcatcagacacgaattgtttggcggtctttcgcgcggccggcgttcggaacccattcaccgtctgatgagtggcggccgcaacgcgcttgcgctggtcaggcatggtaaagaattcacgcactacatcaatcgcaagatgctcagcgtcgaaatcacgcccaatcacgccccgagacaaggggatggaacgctcatccctagcatgcaccgtcgggccatcgggtagcaacgggacaatggcatcgccgtagtgtgccttgacctcgcattgcacaccatgctcatcacgatccagataaaactggaggctgcattccgtaggacttaattcagccagctcgcgaggaatctcactggcctccaacagtccggcaccaaccagctgaggcaatagcgtgcgtgcgaacagggcgatgtcatcaccggcaatgacctgcccctcgccatcgggttcaaacaggtctcccaatagtcctcgcaacggaatcaatcgtttcgggcaacggacgaatcggcatcccgctgcgcttttacgctgagagcccgccatcatggcggataccgcaccggccggattagtggaggcgagcaacagccatacatccttgccaccatcaatcacggtttccaccgccggcactccggcaagcaggtatccggcatccggaccatacgtattgaaatcacgccgcgcaatgcgcataagaaaatctggctcgccaccatcaaccggcaccgatgcaggctgcccggagaaccatgtgttcaacacgagctgtacgcctctgccctcacgtacggacagcaaccgggccacttccggtgctgaaagtgtcaggtgacgatcgatggcgatatgcccgtaataccggtcctgctgctcggccgcacgacgcacggccatcgcgtcgtcaaggaagcccagcagtgggcgcgaatcatcgtcgaacatatccggcgtatgggtaaaggcaagcttctgcccataatccgtatagtcgccgttcgccatggtaagcacaaattgcggaatcgatttcagtacatagctggacccattggaagtcgatccgatcttgaactccacgctccacacgccatcgatgaaactcaatatcggaacaagctgcacctgccccaagcccacagtctcactatcgccctgatacccgccgcctcgggtgccggcacgagagccgtatccgctattcgtacgtcgtccacctgcgccatttcgtctttttgcagtatcgaatcggcgcatgagcgcattgcggcgacgcgctttggcttgagcatcttgcctatcgacgtgctccatatagtcgatcagcgtccgagacggcctcacagccccggcacggtacccttcaaaacgctgcggatcatcgcagaatatgaaggcgagcgcaatcatgtgcttgcacatgccatagccacggccgtaagccgggcatgagcacttgccaccgacggcttctcccgtatcgaggtcgaattgcacgctggtacgatacctactcgatgggctggtggtgccacgtagaataccgtcaagctcggcatacccggttcgatgattttcgctgtataccggattgataaccatggtggccgctttgcgcgcaatgctacgggcacgagcgagcacggtattcgacgatgacgattccacatcgttgcgtaacgcaaggatagggacggcatgggcttcggcacgcttcgcagccccggcgaaatggccttcgtcctcatcgtcgaaccatacggaacgtccttgcctgaaacgatagggcatcaccgcatcggcggcggacaaactgtccgttccgccaaacgttacggctctactgccggcagcgcctgtgcccccaagcattccacctgcctcgccagagataccgcctataccgctgctcttgccggcaaagaggcccctgtcctcattagtgccatctgtgtcatctgcgccatactgatcatcgtcgtaatcggcaccttcgtcgcctccccttttccaaggattgcgacggcgcaacgcatggccccaggaaacgccggaatcatcatcctcataaggcaggaggtcatcgtcatccgcattatcgggaacatggccaaatacaccataccctttgctcatgggcgagcctcctttccagcgaatgcatttcagtccaacacttctatcctagacgaggcgcgcggtagccttaatgtatggatgcagacaagccggcgcaacgcaaatcctatgcagggaacaccaccctcgaaatcttcgaggtgctgtggcgtcacagctactttggacatggcctgaccgtgcggcaaatactcgatgaacttgcccgtaaacaccagctggaagatccaagcgagctgccgaccgagaaaaccatacgaaatcagctcaaaaagcttaccgccacggaatttctcggcagacatatcgggcatctcaccgaaagcgaccttgccggcatcgaatgcaagaatccacaacccggctggtatcttgacgcattcctatccaccgccgaaatgcgactgctactcgacagcctcaccttgtctcgcatcagcctcgacaccatggacgatctcatcggtaaaatccgcgaactcgcaggtgccgctgggcaagcagtaggttaccttgagcacgtggccacctacacgcatatcaacggcgagttcctatccaccatcgaccaactgaatcaggccattgaagaaggccacggcgtaaccttccaataccgtgattacggcccggacggcaccctgataccgcataaaagccgtacgggcgcaggtcgaattacctacaccgccgacccttaccagatggtgtacaagaacggacggtattacctcatctgccatctacatggcgaggataatctccgcattttcgtggtcaaccgaatcgccaacgtcagcgccaaaggcaggaacggcacagttccactggaaaaaccagcgccggctgattttgacgcagtgaacttcatgcgtcaccgcccgtatcccgtagccgatgccccgattcgcatccgcatggccgtacgagacgaatccatgctcaacaatgtgttcgaatggttcgacgaccctcagatcaaacattcgccggacggcacacagttcgaagtcatcgtcgatgctcccgaacgcgccgtgttctggtgggcattgcagtattcctgggatggccgcgtagtgattcttgagcccgattcgctcaagcgcaaactctatgatgccgggcgtcgcatggccacagcctatgctcccgaatgatgcagcatcacatcgcacacctccttgccgagttgttcaccagcgaatttcaccggagaacctatcatcccatcgccaatcacgttcggtaattttttaccgaacaactcgatttcaagccattccacgaactatggcccccgcctagccgtacttgacgctaaggtggaaccatcacatgccgcgatgcacatgcaacgcaaacgcaacgatatgtaaggagcaactatgagcgaagagcgtaccgcatggggatggggtctggccagcgtagacgccgccggcaccaccctagacgtctggtaccccgaactgaatctcggtgaggcaccggtcgaggccgatcgtccaaaccacaatttcggcactctggctcacgatgaagccgacgcccgtggcatccgccgcgtgccggtattcgtcgtcagccagttggacgagccgatcagcaacgccgcggacgcttacctgaaactccatctgatgagcatgcgcatggccaagccgaacacgctgaaccttgacggcatcttcgcccaactcgccaatgtggtgtggaccaactacggtcctttcgccgttgaggacttcacactacgcaaggccgatgtcgaacgcgcctccaccgaagccgctctcgctttcgctgctcaggccggactgcctgccgcagctcctgccaccaccgtcaacgtgttcggtgtggataaattcccgcgcatgatcgattacgtagtgcccaccggcgtgcgtatcggcgacgccgaccgtgtgcgcctcggtgcttacctatcttccggcaccaccgtgatgcacgccggattcgtgaacttcaatgccggcacgctcggcgtctccatggtcgaaggccgcgtttcgcaaggtgtggtcgtgggcgacggttccgatatcggcggcggtgcctccatcatgggcaccctctccggcggcggcaagctgcgcaactccatcggcgagcactcgctgctcggcgccaacgccggtatcggcatctccctcggcgataactgcaccgtcgaagccggtctgtacatcaccgccggcaccaagatcagcatctgggacaaggccaaggccgcagccggcgagccgctcgaagtcgtcaagggtgctgagctctccggcaaagacaacatcctgttcatccgcaactcggtgaatggacgtatcgaagcccgctaccgcaaggtgggaattgagctcaacgccaagctgcacaagaactgaaattgaaataatggagcgttatcttcgttgctcctcggtcgacgtacttccgtacgccttccctcggtgcgcttcgatatcgcacacattatttcaatttcagaactagccctgctcgttcttatgcagccgtcgcagcatagctggtttgcgctgtacatatagaaagcgcttcactggaatctccagcgaagcgctttctcaaaccaataatcaccgctcgtccatcggcatgaaatcgcgctcgaccggaccggtgtagacctggcgtgggcggccgatcttggtgttcgggtcggccagcatctcacggtactgcgcaatccaaccaggaatgcggcccagtgcgaacagcgtggtgaacatggccggatcgaagccgatcgcccgataaatcaagcccgtgtagaaatcgacgttcggatacaggttgcgcgatacgaaatactcgtcgttcaacgcaatatcctcaagctcggtggccacatcgaacaacgcacgctcgtcggacggcagtttctgcgtatcctcgcgctccatgatcttctcaagatacttcttggcaatcgccgcacgcggatcatatgacttatacacacggtgaccaaggccggagatcttctggccattctccttggcatccgtcacgaactcggccacagacttgccggaatcacgaatcgccttcagctggcgcagtacggcctcattcgcgccaccgtgtaacggtccggacagggcattgacgccagcggccaccgccgaatacagattggcgtgggcggaaccggcgatacgcaccaccgaggtcgagcagttctgctcgtgatcggcgtgaataatcagcaaacggcccaaagcatgcacatacaacgggtcagattcgaacggctcgtacggcacagcgaagcacatgcgcaggaagtcgtccacatagccgcgcgcgtaatcggggtacagcatcggctcatcgcgacgacggcggaagatgtacgacacaatcgtgcgggccttggccatgatgatcttggcggcctcatcgagctggtcggtgtcggagatatcggtggtgtccggatag

SEQ ID NO: 1613 - DNA, 14486 bp, Unknown
  R221_24m  MAG No. k141_61024
gaaaggaaacacaatggatatcatcaccctcgcagcggtcgccggcaacctgtccgtcatcggttacggtctcggtgcgattggccctggcattggtctgggcatcctcttcggcaaggccatggaatccaccgctcgtcagcctgagatgtccggcaagatccagaccatcatgttcatcggcctggctctgatcgaggtgctggcactgatcggcttcgtcgccgccctgatcctctgatctgcgcaaatcaacagacgaaaaccgattatgtccatcactgaaaggagggcttgatgacacaagcagcaagcgggattgacctgttcattcctgaggtttatgacatcgtatggtcgttgatcattcttgtcatcgttgcggtgttcttctacaagttcttcatgccgaagttcaatgcgatcttcgacgagcgcgccgccaagattcagggcaacatcgccaaggcggagcaggctaagaaggacgccgacgaggccaaggccaagtatgaggcccagctgagcaccgcccgtgtggacgccgccaagattcgcgacgacgcccgtgcggaagcgtcccacatcatcgccgacgctcgttcccgcgccgagtccgatgcggcccagatcaccgcatccgcacagcgctcgatcgaatctcagcaccagcaggccatcgtctcgctcaagggcgaggtcggcgcacttgccaccgccttggccggcaagatcctcggtgccaagctggaagacagcgacgtgcagtcctcgatgatcgattcgatgatcgacgacctgggcgccaagaagtgaccgtgaccatccgtaaccagaaagggaggtgaccatgcgaggagaggcatcacgtattgcagaccgcgagtcgcgtgattcgctggccccgaaactgcgcgacacccgtgaggacgcgtggcggatcggcaacgaactgttcacgatcaccaaggtgctcgatgacagcattcagctggaacgcgcactgaccgacccgtcccgcccggtcgccgacaaggtggccgtcctgaagggactgctcggtgacaacgcgcatcctatgaccatggagatcatgaccgacttggtctcccgccgttggagccgtgcgcgcgacatcgccaacgcggtggaggacttcggcgtggacgccatgatgtactacgctgacgccaccgacgccacgctgcaggtatccatcgagctgtccgagctgcattccgcactgctgaacctgccggtcgtccgctccaagctgtacgactgccaggccaccagcgaggcccgtgtgaagctgttccgcgaggtgttctccggcaagaccctgaacaaggtcaccatgaggctcgccgaacacgccacctgcaacctgcgccgccgccgctacttggagaccatccagtggctgatcaacaagttctcccgccacatgggcgagtcgatggtcaccgtgaccaccgccaccccgctgaagaaggagcagattgagcgactggtcgaggtctactccgccaaggtgggccgccaggtgcacatcaactcggtggtcgatccgaccgtactgggtggcatgcgcattcaggtgggcgacgaagtcacggacaacaccgtggtcgcacagctgcagaacctgcatcgcaaggtgcagacggaggcgactccggcctgaccggccgagccaatccgtccaacaccacacacaagcaaagacttgactgaacaataaccaatagaaggagtgatcatggcagaactgaccatcgatcccgcctcgattcgcaaggccctcgacgacttcgtgtcgtcgtacaagccgagcgacacccccacccaggaagtgggctatgtcgccacggccggtgacggcattgcgcacgtgacgggattgcctggttgcatggccaatgagctgctgacgttcgaagacggcacgctcggcctggcgttcaaccttgacgcccgtgagatcggcgtggtggtcctcggcgatttcgcaggaattgaggaaggccaggaagtgcgacgcaccggcgaagtgctctccgtgcccgtcggcgacggctatctcggccgtgtcgtggacccgctgggcaagccgatcgacggcctcggcgagatccagggcattgagggtcgtcgtatcctcgaagcccaggcccccgacgtgatgcaccgccacccggtcgacgagccgctgtccaccggcctcaaggccatcgacgcgatgaccccgatcggccgcggccagcgccagctcatcatcggcgaccgccagaccggtaagaccgccatcgcgatcgataccatcatcaaccagaaggccaactgggaatccggcgacccgaagaagcaggtccgctgcatctacgtggccatcggccagaagggctccaccatcgcctcggtgaagcagagcctggaagacgccggcgccatggagtacaccaccatcgtggcctccccggcagccgattccgctggcttcaagtacatcgccccgtacaccggctcggccatcggccagcactggatgtacaacggcaagcatgtgctcatcgtcttcgatgacttgtccaagcaggcagaggcctatcgttcgatttccctgctgctgcgccgcccgccggggcgtgaagcctacccgggtgatgtgttctacctgcactcccgcctgctcgaacgttgcgccaaggtctccgatgacctgggcggcggttcgatgacgggtctgccgatcgtcgagaccaaggcgaacgatgtgtccgcctacatcccgaccaacgtgatctccatcactgacggccagatcttcctgcagtccgatctgttcaacgccaaccagcgccccgccgtggacgtcggtatctccgtctctcgagtcggtggcgccgcacagaccaaggctctgaagaaggtctccggtacgctgaagatctccctggcacagtaccgttcgctggaatccttcgccatgttcgcctccgatctggatgcggcttccaaggcccagctgacccgtggtgcccacctgaccgagctgttgaagcagccgcagttccacccgtactcgccggaacaggaagtcgtgtccgtatggaccggcacccacggcaagctcgacgacctcgacctgaaggacgtccttccgttcgagcagggactgctggactacatcgaccacaacaccgatatcctcaagaccattcgcgagaccgaggaattcaccgccgacaccgaggctgccctcgataaggccgtggacgagttccgttcgacgttcgtctcttccgccggcaagccgctggtcgagaagaagccggacgttgacaaggccgcgccggttgatcaggaaaagatcgtggcgggagaaaagtaagccatgggctcgcaactcgcattgaaatcacgcatccactccaccgagtcgttggcgaagatcttcaacgctcaggagatgatcgcgtcttcgcatatcgccaaggcccgtgatgtggccctgaacgcgaagccgtacaccgatgcgattttcgatgccgtgcaagcgttggtggcccacacccatatcacgcatccgatcgcggtgaaggacgagaagaacccgcgcgtggctgttctcgccctcacctcggatcgtggtatggccggcccgtacacctcttcgattatccgtgaaacggagtcgctgctgtcccgcctcgatgcggcaggcaagcagccggagctgttcgtgtacgggcgtcgcggttcgacgtactacaagtaccgtaatcgtgacatcgcggcgacgtgggaaggcgacaccgaccagcccggcgtggaaattgctgaaacgatctccaacactttgatggacgcctacatgaagccggctgagaaaggtggagtttccgaactctacatcgtctacaccgagttcatcaacatggtggtgcaaaaggtgcgcgtgctgcgcatgctgccggtcgaaatcgtgaaaaacgagaccaaggtgcccgatcctgatgaagaggcaccggctactgcggatgtcgctccgctgtacactttcgagcccagcctcgaaaaggtactggacgcgattctgccgaagtacattcagtcccgcatccacgagtgcctgctgaccgcggccgcgtcggaaaccgcaagccgccagaacgccatgcacacggcaaccgacaacgcacgaaacctgatcgacgaccttacgcgcaagctcaacgcttcccgccaggcctcgatcacccaggaacttaccgaaatcatcggcagcgctgacgcgctgaccaagaaggaagagtaggaacgcatatggctgacaaccagaccactgcggccgagcctaccaacggtcgcgtcacccgcgtccagggctcggttatcgacgttgaattcccggtgggtcatctgcccgacatctacaacgccctgaaagtaacgatcgtcaacaccggcgccaaggaagaaggcgaggcgaaggagaccgagatcaccctcgaggtcgaacagcacctcggtgattccacggtccgttgcgtcgctctgaagcccaccgacggcctggtccgtggtgcctccgtctccgacaccggcgccccgatctccgtgccggtcggcgacgtgaccaagggccacgtcttcgacgtgtccggtaacatcctcaacaagaagccggatgagaccatcaccgtctccgagcgttggcctatccaccgcaacccgccggccttcgatcagctggagtccaagacccagatgttcgaaacgggcatcaaggtcatcgacctgctgaccccgtacgtgcagggcggcaagatcggtctgttcggtggtgcaggtgtgggcaagaccgtgctgattcaggaaatgattcagcgcgtggctcagaaccacggtggcgtgtccgtgttcgcgggcgtcggcgagcgtacccgtgagggtaacgatctgatcggcgaaatggccgaggccggcgtgcttgagaagaccgcactggtcttcggccagatggatgagcagccgggtacccgtctgcgtgtcccgctgaccgcactgaccatggcagagtacttccgtgacgtgcagaaccaggacgtgctgctgttcatcgacaacatcttccgcttcacccaggccggttccgaggtgtccaccctgctgggtcgtatgccttccgccgtgggttaccagccgaacctggccgatgagatgggttccctccaggagcgcatcacctcgacccgtggtcactcgatcacctcgctgcaggccatctacgtgccggccgatgattacaccgacccggccccggccacgaccttcgcccacttggatgcaaccaccgagctgtctcgtgacattgcctccaagggtatctacccggctgtggacccgctgagctccacctcgcgaatcctcgatccgcgttacgtgggccaggctcactacgactgcgccaaccgcgtcaaggcgattctgcagcgtaacaaggagctgcaggacatcatcgccttgatcggtatcgacgagctcggcgaagaggacaagaccaccgtgaaccgcgctcgtaagatcgagcagttcctcggccagaacttctacgttgccgagaagttcaccggtcgccccggctcctacgtgccggccgacgagaccatcgaagccttcacccgcatctgcgacggcgtgtacgacgacgtcccggagcaggcgttctccggtatcggcggcatcgatgatctcgaagagaagtggcacaacatgcagaaggaactgggtgcgtgatggctgcggaaaaaaccacgatgaaggtcaacatcgtcgccgctgaccaccctgtgtggcacggcgaggcgacgagcgtgaccattcccgcctctgagggcggcatgggcatcctgcccgaccatgagcctgtgctcacggtgatcaagcagggtacgctcaccgtggttgagcccgatggcgatcgccacatgttcgaggtgaccgacggattcatctccttcgactcgaacaaactcaccgtggcggtcgagcgcggccacgacgtccagtactccggcaccgccgagtgatctgaaccaactcctcaaggggctctctggttttccagagagccccttttgctatgtatgccatgtgttgcgctacagtggtggcctatgcgagttattgttgccgactgttcggccgagtattcgggccgcctcaacgcctcactgcccctggccaagcgtgtattgctgatcaaggctgattccagcctgttgattttctccgaattgggctcctacaagccgctgaactggatgaccgcgccctgcacgattcgtgagatcgacccagccgccaaatccgcgcaacattcccgggaaagtgtcgctggtggggctgtggatggtgattccgcgacgcattccccggaaagcgtcgccgctggtgagccggaaaaggtgctacgtgtcagcgccgacaagggctctgacattcttgaagtgacgctgcaacacatctattccgaccaaacctatgatctgggcgaagatccgggtctcatcaaggatggcgtggaagaccatctgcaacgctatctggccgagcagatcgagcgtatcggcaagggagccaagctggtgcgtcgcgaataccctaccgccattggtccggtggatatcatggccgtgaatgccgagggcgagcatgtggctgtggaaatcaaacgtcacggcggcattgatggcgtcgagcagctgactcgctactgcgaactgctcaatcgcgatccgctgctggccccggtgcatggcattttcgccgcacaaaccatcacgccgcaagcccaggtcttggccaaggaccgcggcttcacctgcctcatcctcgattacgacgatatgaaaggcaccgaggacgacagtctcaggctgttctgattgttcttggcttccctcttgaaggggggtttcgaacgtacatagagagactgaggggaggcctcacggtatattccgtgaggcctcccctcagtcagtttcgctgccagctcccctcttggggagagccatcgagattgtttagtacgcggcgagaatatcgattacgaagaccaacgtggagttggcgggaatcgaaccttgctccttatctccataggcctgatccggcggaatcaccagcagaacctgagagccgacggtctggccgaccagacccttctgccagccctcgataacctgatgctggccgctggaatcgctgaacagatcggcgtcgattgtggaatcgcgatcccaggacgaatcgaactgcttgccatccgtaagccaaccggtgtacttgaccaccacggtgttcttgtcggtcagcttggcgccgttacccttgatcagcgtctgcgagatcagcgaatcaaccgaaccctgaccgttcatgtcaatggacggcttgccattcttggctcgcgtcaccttcggcagattggccggcacatccttgacttcctcgccagtggccttcttcaggtccttggacttggatacaaacgtcatcgccaaaatgtaagagtatccggacgaatcctgagcgttgacgccaaagccgatcgtggtgttgatcttggcacccttgatctggttgtagtaggtcgaggagagggtcttggaatccaccttcagcgagcaatccggcgtgttcttggtccaggtgtccatgagctcggtgccgtctttaacgttgagcgcgatgccttgggcgcagacgcggtcgccctcctcgatcacgtcgccatcgcccttttgcagcaccacataggagccgtcggacacggtcatcggcgtattaaaggagatggtcggcttctcgccgagcttgcccttggcggtcacgccggcaatttgccccttcttgtcagaagagccggaagaggatttcgagtccgagctcgaactggagcaggcagccagcgatacgcacatcgccagcgagcaggcaagagcaacggccttgccgagaggggataacatagatttaacagacttacgcatgacacaccaccctactggtgaaccttgattttctgcgctcctaggtaataaacaggtgaagattgtagaatggttaagttatgagtgctgaagaacagactacaagaccggataagggcgccaagcgtccatcccgtcatgccaagatcatgcgtggagtggtgacgcctatcttcggtctattggccgtggcggctgtggtgttggggtacatgaatgccacgatatggaagccctccactgaaatcaccgcttccgcaaccatgagcggctcccggtatgccgtcactgatccgaatgtgctgaccttgttggatcagaacgccacgataaccgtggactcgggatcctctcaggacgaggcgtgcgtggcgttgggtccgtccaaggatgttgccggatgggtcgcgtccgagaagtcctatacccgtatcaccggattggcgtcatggagcgagctgagcacccagaagggaagcagcacgagtcagggagcgcctgccagtgccgatgacgcggtggcgttcaaggattccgatatgtggactgccgtgaaatgcggcaccgggtccgtttcgctggagagcaagaagaccggcgcctcgacggtggccattgtggatttgggtgaaaatgccaccaacgccaaggtgcagctgcactgggtgcgctccgaagtgccggactttgcgatgccgttctatctgtccggtggattgctggccgtgctggccgtattgtgcgcctccgtgttcgccatgccgccgcataagcgccgcaagcgcatggtggaaggcacggcaagcgccgtaattgaggaagaggcacccgccagcatcgcagtgtccgggaagccggatggtgcaagtcgacgtaatcgtcgccgccacgccacaaatcggcgttcgggccgtgcgtcctcgcaatctgaagccaccgaaacaccggttatcatcgacccaagttcacgtaacctggtcgccgaccagcagactggtgccgagagcggcgctgagaccggcttcagcgccggcgataacgaatcgacttcggtaatcacccctgacgaactgcaggcctacttctcccgcttggcccaagaggtcaataccggagacgactcggccgatgacggacaggaggaaagctgatgaacaagcgatggaacaaactgtgtgtggccgccctcgcctgcgtggcgttggtcgtgccgttgaccgcctgtgaaggccggctgccgacgccggctgctgatacctccaccaaggttgcgccggatttgaccgaggcacaggagaagaagattcgcctgaagattctcaagacgatcgatgaagccgatcaggccaagaatcccgatggatatgcggccgttatgggcgggccccagctggacattcgcatcagccagaccacgatcaaccagcgcggcggcggtatgtccaaatacgcgaccattcccaaggacatcgcccagacggtgattcccatggacgacggatggcctcgctcggtgttcaccatcacgaccaccaccgaagatcagcagtccaagcgtttgctggtcttcgatcaggaatccgcccagcagaattacaaactgatggccatggctcgactgtttgagggggccaagctgccgaagttcgagattccgactattggctcgcagatgggcactgcaaaggatgagaagctggtggccactcccgccgatgccttgacccaatacgccgatgtgctgcagaacggctccaagagccaatacgcttccaagttcgcagacgatttgctgcgccaggaactggccaataccacggccaaggtgcaggaaggtatgcaacgcaacaacggtacgcaggagcagaaattcaccgttgtgcctgaacagatgtgggtgatgcgtgctgcagacggtgccggtgatttggtggttggccgtattaacggcgaatggactcgcaaggcgggggatggccgcgaatcgcagccggcttccgacgacgagaaggcgctgttcaatagcgacaagtacaccagcaccatgaaggtcacgtatgtgaacgtggtggccttgtacattccgttggcaagctccggtgagcaaatcaccgccgtgggtgccgaccgtcagccggtaaaggtcgaagcgctgtagttgttgccgccgcccaccgcgcggttaacgccccaccacgatatgattcatccaccacgatgtcggtaagttttacctttcgcacaatggtgccgttttgagtcacatcgtggtgggcgttttgctacgtggtgggaatttcaccgcgtagtggaagaatccctacgtggtgggaatcggcattacaatcaatgtcagcaaatgtgattgttgttgtacgcgaatcgcgtggaatcgggaggcattatggcagagcagcagttcaatccgggagtctcattggcgggcgccgtcgatttggaggcgctgaagcatcaggtcaaggccgagcccggccaggcgggtggcgctcctgccgctggtgggtacgtgatcgacaccaccgaaaacaccttccaggcaatggtgcagacttctgcgaccttcccgatcctgctgctcctgtggataccgaccgatgaccgcctgttcccgatggcccgtgcgttgggcgacgcggtgaacgccctgaacggccagattcagctctcccgtatcgatatctcgtccaatccttcgattgcccaagcgttgcaggtgcagggcgcgcccgcactgttcgcgttgattgccggccgtccgatgccactgttgcagggtcttccgggtgacgacgagctcaagcaacttaccgacgaggtgattccgaagatcattcaggccgccgcgcagtctggtgtgaacggtaccgcgccgtactcgggtgatcctgattccgatgccgccaagagcgctggtgccaccggtgccggcgtgggtgctgagcaggtgccgccggagcatgccgaagcccatcgtttggccgaggagggcgattacgccggtgccgccgccgaatacgagcgcgtgctcgaatccgacccgtccgatgcactggccgcccgcgaacgtgcgaaggcgctgttgctggcccgctccgggtccgctgatgtacgtgacgtgcgtgccgctgccgccgcagcgccggacgatgtggaagcgcagttggctgtggctgatatcgacatgatcggtggccagattcaagacgctttcgaccgtttgctggactttttggccgccgggcacaaggccgatatcgagccggttcgcaagcgtctgctcgaatacttcgccatccccgaacccaccgacccgcgtctggctcgcgcccgccgtcgcctagccaccctcatgtactgattggttttgactcccctctttgagaggagctgtcaggcgtagatgactgagaggagcgcgcgagcgtacttgactgcttcccctaaaccatccgattcttcccgaaatattgctggaaccttggcccctccagcgccagttcctcctcgaaatcatccgcccacttgcagaacggacggttggcgagaccatcgttattgaatcgcgcctgatcggtgatttcggtgatgcagaatttcggaatcgtcagattggtaaccggcccggatcgttcggcctcggctacgatcagcggcgcgttcggcccgccgaacacgtccacgctccagccgtcttccgcaatccacacggaataccggttcttgatgattaccgagccgccgcgcttgatgagttcggcggcgatgcgcgtgtcgatctcgcgctcgacctcgtagcgcgtgccacccacggacggacctttgacggtgacatacgcttccgagaaccggtcgcggtactcgtccagcacggccaccggatttacgtcggacgtcatgtcgacgtgaaccttgtgcgagaccagccgcacgcgcaaggcgtaattgtcggcatgcacgtagtagctctgaataatgagggtcggggcgtcgccgtcgtcgtattccgccggcagctcgcggcagaagaagcggcgttcgtattcgaagtcatctgtaggttccgacataaccccattgtagagccgatgatggcgattttctcgttattttggcgacgtatgtgccgtatgcagcgtgatgtggtgtacagtaaagaagttgctcgggtttgtagctcagtggatagagcgtctgtctccggaacagaaggtcgtgggttcgatccccatcaagcccaccagcatggctttcggctagccgccggaagccttttgcatattcggcgcgtgatattaagcgcgtgcaaagctggtgctggtgctggtgctggtgctggtgctggtgctggtgctggtgctggtgctggtgctggtgtcggggtcggtgatgccggctcgcttgggtcgtggaaaaaccgcccggtttggcgagaacggtagtcgaatcgtctggaatcgtctggaatagcaaggaatagtctgttgatggccgtatgccgggcatcatgcgcgctaaacgcgacttcgctcagtagactgctacgtaatcggcattgccaatcgttgccgatcgtgcgattggtcgtagccggtggtgatgtgtaccggcgccggccgcagcaggtgggcgcccccaagatgagaaggagcacaatatgagcgaaaagatggaagccgtagccacttccgaggcgccggccgcgctgggcgcatacagccaggcggtgaaggccaatggcttcgtgttcgtatccggccagctgggcattgatccggccaccggcgaactggcgggcgagaccgctggagagcaggctgcacaggcgctgaagaatattaagcacattctcgacactgccggtaccggcattgagcatgtgtgccgcgccaccatctacctgaagaacgtcgaggacttcaaggaagtggacgcacgttacgctgaggcgttcatcggctccgtcaagcccgcccgcgtggcctttggcaacaacatgattcccaagggtgcgctcgtggagattgacgccatcgcggtggagtgattcgaacgtttccccggcggcccgtctgcgcgcatggtgtgtgcagacgggccgccgcgtattgtgcgacgcattccggggaatgtttcgctgggcgtggggtgcgaggtgtggttccgcggcacattcccgggaatgttgcgctggaatcgttgggcggtggtccgtgccacaatagagaccatggcatccaaaggaaaaccgtcgccgcgttcggccgtaagcccgctgagtgatgagcaggtcaagcgtctggccgcccgccacacgcttgtggactcgacacagtattacccgaccggccctcgcacgcccaatcagccggaaatcgacgcccagaatcccaaggccaccaaacgactgctgggaggggtgtccattgtgttccgcgccagctgcaagaccaaggcctggggcttggaacaggtgccggaaaccggaccgttcatcaccgccgccagtcatatcaccatgtttgatgtgttcgtgccgatgatgagcctgttccacatgggccgccgcccccggtacatggccaaggccgagatggcgaagtggccattgatcggcaagtggttccggttggtcggcatgcagccggtgcagcgtcattcgggcaaggccaagcagatcgaagagacctcgattgatattctgacgtccggccgcccgctgacggtctggccggaaggcaccgtgacccgcgacccgaaaaagtgggtgatgagcattaaggagggcgtgggatacatcgcccttgaatcctcgcgcagactggggcatcaggtgccgctgtacccggcggtgacgtggggtgccgcctccatcaaccactggtggccatggccgcgcaaaaacgtggtgatgtgctatgaccatgcgctcgattactccgatctgcttgccgacatggactcatggggtgaagagccgcctgccgaggccgtgaacgagctgatgtggcgcgtgctcaaacgcatgaacacagtactggaggaaattcgtggcgagcagttccccgctgaaggctactgggactaccgcagcatgagtcgcaagccttggccggaagccggcggcccgttcccggctgagaagtagccgcaccggttcccgtacggggagcctaggcgagtagcatggcacaagattgtaccgatgaagttgcgcgacaagcgaaggtaggaatttgatatgggtaaaaatataacggttctcggtgcaggagcatggggtaccgctttcggccaagtgctggcggacgccggcaacacggtgaccatgtgggccaaggagcagcggattgtcgagggcattcgcgatcaccaccacaacgccgtgcgcctgccgtccgtcga

SEQ ID NO: 1614 - DNA, 7307 bp, Unknown
  R221_24m  MAG No. k141_61281
catccagtccgctgctaccacctgcttctggagccgtcagtcccacgacaccaaggacaagttccagatcaacatcatcgatacccctggccacgtggacttcacggccgaggtggagcgctccctgcgtgtgctcgatggcgccgttgccgtgttcgacggcaaggaaggcgtggagccgcagtccgagaccgtgtggcgtcaggctgacaagtacggcgttccgcgtatctgcttcatcaacaagatggacaagctcggcgcgaacttctactactccgtcgacaccatcaaggagaagctgggcgccgctccgatcgtgatgcagctgccgatcggttccgagaacgacttcaccggcgtcgtcgacctggtcgagatgcaggcctacgtgtggaacggcaccgaggagctcggcgccaagtacgacaccaccgagatcccggacgatctcaaggacaaggcccaggagtaccacgagaagctcgtggaagccgccgccgaagccgacgacgaactcatgaacaagttcttcgaggacggcgacctgtccaaggaagacatccgcgccggcgtgcgcaagctcaccatcgccaaggaagccttcccggtcttctgcggctccgccttcaaggacaagggcgttcagccgatgctggacggcgtcgtcgactacctgccgtcccccgaggatgtgccggccatcaagggctacaagcccggcgacgagtccgttgagatcgaccgccacccggtcaagaccgatccgttcgcggctctggtcttcaagatctccacccacccgttctacggcaagctcgtgttcgtgcgcgtctactccggctctgttgtgccgggcgactccgtgctcgactccacccgcgagaagaaggaacgcatcggcaagatcttccagatgcacgccgataaggaaaacccgatggaccgcgccgacgccggcaacatctacaccttcgtgggcctgaagaacgtcaccaccggtgacaccctgtgctccatcaacgacccgatcaccctcgactccatgaccttcccggatccggtgatccaggtggccgtcgagccgaagaccaaggccgatcaggagaagatgggcatcgccctgtccaagctggccgaagaggatccgaccttccaggtcacgaccgacgaagagtccggccagaccctgatctccggcatgggcgagctccagctcgacatcatcgtcgaccgtatgcgtcgtgaattcaaggtcgagtgcaaccagggcaagccgcaggtcgcctaccgcgagaccatccgcaaggccgtcatggaccagggctacacccacaagaagcagaccggtggttccggccagttcgcaaaggtcctgatgaacttcgagccgctcgacaccaccgagggcaagaccttcgagttcgagaacaaggtcaccggcggccacatctccgccgaattcatcggccccatcgaggccggtgtcaaggaggccatggagtccggtgttctcgccggcttcccggtcgtgggcgtcaaggccaccgtcaccgacggccagatgcacccggtcgattcctccgaaatggccttcaagctcgcaggttccatgtgcttcaaggaagctgccccgaaggccaagccggtcattctcgaaccgatcatgaaggtcgaagtccgtacgccggaagagtacatgggcgaagtcatcggcgatctgaaccagcgccgtggcaacatccagtccatgaccgacggcgtcggcgtcaaggtcatcgacgccaaggtcccgctgtccgagatgttcggctacatcggcgacctgcgttccaagacccagggccgcgccatgttcaccatggagatggactcctacgacgaggtgccgaagagcgtctccgaggagatcatcaaggcccagcgcggcgagtgacacgcgccacatcatgaagtggccggtgtctccagtcagcggtagtatcgtataccgctgactgggttctggctcttcaaagtggcacataacccagaaacccagtagaataagcgagtccctgtgcgaaagggcgcaggaaactcacgagacgtccaggaggacaaaagtaatggcaaaggaaaagtacgagcgtactaagccgcacgttaacatcggtaccatcggccacgtcgaccacggtaagactaccctgactgccgccatctccaaggtgctgcacgaggagttcccggatgtcaacccggagtacgacttcaaccagatcgactccgctccggaagaggccgcccgcggtatcaccatcaacatcgcccacatcgagtaccagaccgagaagcgtcactacgctcacgtcgactgcccgggccacgccgacttcgtgaagaacatgatcaccggtgccgcccagatggatggcgccatcctcgttgtggccgccaccgacggcccgatggcccagacccgcgagcacgtgctgctcgcccgtcaggtcggcgtcccgaagatcctcgtcgccctcaacaagtgcgacatggtcgacgatgaagagctcatcgagctcgtcgaagaagaggtccgtgacctcctcgacgagaacggcttcgatcgcgactgcccggtcatccacacctccgcctacggcgccctgcacgacgacgctccggaccacgagaagtgggtccagtccgtcaaggacctcatggccgccgtcgatgactacatcccgaccccggttcacgacctggacaagccgttcctgatgccgatcgaggacgtcttcaccatctccggccgtggtaccgtcgtcaccggtcgtgtcgagcgtggccagctggccgtcaacaccccggtcgagatcgttggtatccgtccgacccagcagaccaccgtcacctccatcgagaccttccacaagaccatggacgcctgcgaggctggcgacaacaccggtctgctgctgcgtggcctcggccgtgaggatgtcgagcgtggccaggtcgtggccaagccgggctccgtcaccccgcacaccaagttcgagggcgaagtctacgtgctgaccaaggacgaaggcggccgtcactcgccgttcttctccaactaccgtccgcagttctacttccgcaccaccgacgtcaccggcgtcatcgagctgccggaaggcgtcgagatggttcagccgggcgaccacgccaccttcaccgttgagctgattcagcccatcgccatggaggagggcctgaccttcgccgtgcgtgaaggcggccacaccgttggctccggtcgtgtgaccaagatcctcgcctgattatcatcagacaagaatcttcgcttgaactagcgacttaagaaatccccttcgaggaaactcggaggggatttcctataaccgcagcaggatatggatatgtaccacgacttccggcctggatgcgctagtgttgctttccaatagataaacggactgctgcactgcgagggtatgacactgatggcaggccgggaaagaaggtcgatgatgactggttcgcaagccgcacactgtggttccgtatccgcgctttcactgggactgcccgtctccacggcgattcccgaagccaaaggcacactgccgaaagccttgttcgtgggcaaggcaccgatttcaggcaaactcaagcagcgattggtgaacgaaatcgaatccattaccatgctggcgttggtccggtcgattaacactgggcttgcggacggcaaactggttccggaagtgctggtcatcggactgaagcttacggccaaagccactggcataccgaacgaggtcatcgatttgattgccgggcagcgtaaatcgggcatcgtgttcgtgtgcgtacgcgacgtgccgttcgagggcagcacacgtgaggaatgtgcgttcgccgtgcgtcgggcgataccggggcgtgccggccacacgccgatctatcgggtatatgccggcgattggcagccggcgggggaggcccagctggagctggccggctctactattgatgagctgtgggcctcgctgtgctcacagaccattctgggcacgccggagatcgaaaatctggatgcgcgcatcattcgccatactgaaattgctcggctcgaatccgaagtggacaagctcacccgcgaccatcagcgcgtcaagaatcctgttcagcgcaatgaaatctatgccaagctccacaaggccaaaacacagctcgcaaaactgcgcgaagcatagtgatatgaaaaccattggggtcccgctggcgggagctggctcgcaaagcgagactgagggtggtccaggtccgtggcctagggctacgcccaagctaattgaaatattcgtgcatcatacagcgtacagttaaaccgtgttccctctgctcgaaaccctggtcgccgtatacgaggtgggccagttcacgctggctgccgacgaactgaaggtgtcgcagtcgacggtgtcgtcgcgtatcgcccaattggagcagatggtcggcgcgccgctgttcgtgcgcaatgcgaaaagcgacgtgacgcccacacaggccgggcggatgctgtaccagaccgccatcggcatcgacggattatggcgggatacgcgtgagcagatcgcccgcgtgcaggaggcgcgtgagccgctggccgtttcgttctcgcacacgaccgcggcgattctgctgccgaaggcgttgccggtgatggctcggaacatggacagtttcgacttcgccgtacacgtgatgaactcggatgcgattctcgaacaggccagcatgaaggctgtgcagctcggcgtggtggaaaagccgatcgtgaacgattcggtggaccgcgtcaccctgtgcgaggaccggctggtgctggcgggggagcccgacggcgtgtggatggtgcgcgagcacggttccggcgtgcggtattacacggatttgtatttcaagaccgctcaggttgtgcctgcacgcacgatggaagtgtccagtaatgcggcgattgtggcggcgctgtccgccgggttcgggcagtcgttgatttcggaagccgccgtgccggcgggcgtgccggtgcagcgggagcttggcgatgagtttgtgcggcggttctatgcgctggtgccgagatccggtctgacgcacgatcagcgggagttggcggagatgattattgctgcgctgcgcgggtagtcagatagtcgactgaggggaggttgcgaacgttgtttctctccctccgtccgcctgcggcggccacctctctcatcagagggagatcaattaggtatcgacaaaatcgatgatatgtattggttgcaatgatttgaccgatgtaaacgcttgagcttcaatagacatcatgagagagttctgtacaaaatggtggaagcgcattgccaccgttgacatgctgttcattggtgttctgactctgctggcctcgctgttcgcctcctggctcaagcagttccccggattcagcctgttcggcgcgcttatcatcgcgctgctcatcggtatgatcatccagttcccgatccgcagtgcctacgtcggttccaatgatggccgcaaggcaggcgtcaaggacgccgctggcctgatttccaacaagctgctgcgcctcggcatcatcctgctcggtttcaagctcaacctcgccgtgctgttcacgcagggcatcaagtgtctgccgatcgcagctgtggtcgtcacgctgaccatcatcgtgtgctatgccatcgcccgcaagctcggtgtcgacccgatgctcgccatcctgaccgccggtggcaccggcatctgcggtgcggccgccgtcatgggcctggccggttccatcaaggtgcctgaggacaagcaggacgagaaggacaacgacgtgaccatggccgtggccatcgtagccattatgggtactgtgttcgcgttgctggagatcgcgctcggcccgctgaccggcatgaccaaggaccagctgggcatcaccgccggtgcttccctgcacgaaatcgcccacgcggtcgcgggcggcgacgcgttcggcgcggtggacatcgccaccatcatgaagctttcccgcgtgctcatgcttgtgttcgcggccatcatcatcgccatctggtgggagaagaagcattccgaggttcagagcaccggcaagaagaccgtggccttcccgtggttcatgctcggcttcatcggcgcttcgatcatcggcaccttcgtgccgctcatcgcctccatcaccccgcagctcgtggactttgcgtacatcgtgctcggcatggccatggccgcgctcggcatcaacgtgaacttcaaggccatcgcttccaagggcaagaagccgatgctcgccagcttcctgacatcgattctgctcatgtgcttcgccgcaggtgttgcgatgctgttcttctgataagcgctccaaatacaaataggcgaaggcgaacgacagtgagcaattggaatgcgtcacctaaaaatcacgtacttgcacaacggataaccccagccgaactggcaggccatcgcaatgaacttcaccacatatggactcagcccggtcgcacccggcatccagccgatcagcagcgtgctgaacgtgaagttccagatccacagcagcacgaacagcgccacggaacgggtgaagttgctggacgatttgaatgtcacgttgcggttcatcacgaagttgtaggtcgccgaacacaccacggcgatgccgttggcgatctgtgagggtacgccgatcaagtgcagaatggcgaacgtcgcatactccacaatggtctgcgtggcggaaacacccatatacttgcccaacacggcgagtccattttgcttcggggttgccgtgcccacggtattttccgcagtgttcgttgtggccgaggcattcgtgacgtccgcgccctgattgtgcttcacatccgctccattgttcgccatgcccatatacctcccggatgtacctgtgacgttcgacctcgcaatgataccgctgaccgcgtcgggaatcggcgtggcggtcagacgagaaaaccgcaggccgcagcaacgaccggcacacccagcgacagcaccagataggccgctgcggtggggtagcggtgtttgcggaagagcgtcaccatttcgttgattgcggtcgagaacgtggagaagccgccgaggaaaccggtggccagcactagccgccatggttcatcaagtgtcccgccgagtgccagcgccgcgaccaaaccggctaggaatccggcgatgagattgatggtgaacgtgga

SEQ ID NO: 1615 - DNA, 5836 bp, Unknown
  R221_24m  MAG No. k141_62698
aaccaactcctcgatgacttggcatggaggccacaacgatgaaaaaccaacacgcggcaacacttgccggctatgagattccccgcctcggcatgggcacaatggcgctcgccatcgaggggcgcccctccaaccgtgatcaggcgatcgagaccatccatgccgcgctcgatgccggagtccgttatttggacacggcttggtcctattatctgcccagcgcacccggcaccggcgaaccggaggatatgggctatggcgaatatctggtccgcgatgctctgcactcgtggcatggccccaaagatcaggtgctcgtggccaccaaaaccggctggctgcgtacgcttgacggcaacggcaactacggctggcaggccgacgcccgacctgaaaccatgatcgccaatgccaaggaatcagcccgccgcctcggtgtcgatacgctcgatctgctctactcgcactgcaacgatccgcaggtgccgtacgaagaccagatgggcgcactcaagcagctcgtggacgaaggtgtggccaaagcggtcggtatctccagaatcgacaacacagacatcgaaaccgcccacaacattttgggcgatcgtctcgtggccgtccagaaccaattctccccggtccaccgcgaccccgaacacacgttggaaacctgcaaaaaactcggtttggctttcgtctgctggtcgccgctcggtggattccttgacccgttcaacgggcatctgttcgaccggttccgcgaagtcgcgaagtcccacgactgctcctaccagcgcgtcacgctcgcgtgggaacttgcgcaataccaatatctgttcacgattccctcggccagaaacccgcaggagattcaggactcgttcaaagccggcgaactgaaattgtccgacagtgaaatcgactacctcaatggcaaggacatcgactgagcgatttcgtccgtactgtcttgcaatcaggcggcacactggcattgtgagcgctaacactaaattttgggcgtgttgttcacaacgtccacaaatcgcactactcttaagaatgtcattcaagatacacaaccgttttaaggagtagttgtggcagtaattgaaagcgtgtacgcgcgtcagattctggattcccgtggcaacccgaccgttgaggtctacctggagaccgaagacggcgctcagggcaagggtctggttccgtccggcgcctccaccggtgaagctgaggcttgggagcgtcgcgatggcgacaagtccgtctacggcggcaagggcgttcttaacgcggtcaaggccgtgaacgaggtcatcgctccgaaggtcatcggcatggacgctgctgaccagcgcgctctggacgacctgatgatcgagctcgacggcaccccgaacaagggcaagctgggcgccaacgccatcctgggcgtctccctggctgctctgtacgcttccgccgagtccgccggcctgccgctgtaccgctacatcggcggcaccaacggacacatcctgccggtcccgaacatgaacatcatgaacggtggcgctcacgctgacttcgccaccgacattcaggagtacatgatctccccgtacggcttcgacacctactccgaggctctgcgcgctggcgttgaggtttaccacaccctgaagaacgttctgaagaaggaaggcctgaacaccggcctcggcgacgagggcggcttcgctccgaagatgaagtccaacgaggactccctcaagtacatcatggacgccatctccgccgccggctacgagcccggcaagcagatcggcatctgcctggatgtcgcctcctccgagttctacaacaaggagaccggcaagtaccgcttcgacggtgaggagcgcgactccgcctacatgctcgactactacgagaacctcatcaacgagtacccgatcgtctccatcgaggacccgttcaacgaggaaggctgggaagactgggctgccatcaccgctcgcctcggcgatcgtctgcagttcgtcggcgacgacctgctggtcaccaacccggctcgtctgcagaaggccatcgacctcggcgccgccaactccctgctggtcaagctgaaccagatcggttccgtcaccgagaccctcgacgccatcgagctggccaccgccaacggctacacttccatggtttcccaccgctccggcgagaccccggacaccaccatttccgacctggctgttgctaagaacacccgccagatcaagaccggtgccccggcccgtggcgagcgcgttgccaagtacaaccgcctgctcgagatcgaggaggagctcggctccaccgctcagtacgccggctacagcgctttcaaggcctgcaagaagtacctggccaagtgagctgaaacgcccgtaaaggcgtgagtttccactgaagctcgatacccgtcgtgttcgtcaagtcgaatgcggcgggtattttcatgtgacatgagcaagtcgtcccgtaccggcaaacctggcaaaaccggcaaagcacaagtcaggaaaaaagggtcggcggggcccatagcgttcttcgtctccctgttcatcatcgcactcggcaccatccagctggtctccaccttccacacttataccctgaacctggccgagctcaatggcctcaagcgtgaggaagcctcgctgatcgcccaaaagcaggagttggagaacgatatcaagcgttgggatgacaaggcctacatcaccgcccaggcccgtgaacgcctcggcttcgtattccccggcgaacaggccgtgcgtgtgctgcatcccgaagccgtgaccggctccgatagcgaatcccagaaaacggaagattccagtagcagcaacaaaaaagtcctgccatggtacagcgaactgtcttactcgctcaaaaaggccgatgagcctgtgaacgatagcgagtccggcaaatccgatacttccggttcctctgactcgtcacccaacgactcatccaagcagtccgataagtcagaccagaacacccaatccgatcagaacacccagcaaaacacaggggagggaacccaacagtgaccatcgatatcgccgccaaggccaaggcccttgtcgacaccatgcttgccgagcccgccaacgaccatgacatcgaccaggtgcagcgtcagctcggccgatacccgcgcggcatggtcgccgtgggggcgcgatgcgtctgcggtaggccacttgccgtaatcacccgtccggtgttgcccggcggaatccctttccccaccacgtgctatctgaccggtccggaagccgtcaaggccgcctcccatgtcgaggccgccggcgtgatgcagcaatacaacgatatgctggccgctgatgaggagctcaaggccgcatatgagcaggcccataatctgtatctggcattccgtcacgaactggcaggccgtcttggcgacagtgaggagcatattgaaggcacttcggccggtggcatgccggtgcgcgtcaagtgcctgcatgccctgctggcccagtccttggttatggggccgggcgtcaaccccattggcgatttggtgctggaacgcgtcaaagacgaattcgatccgaccgtctgccgctgcacgctggatgattgatcaacagatgagccaccgcgaacagcccattcatacgcactaagggatacgaggagaaggcaatgagcaaggaatccgtaaccgtcgccggcattgattgcggcacgaactccattcgactgaagatcgcacgtgtcgatgccgatggcatgcatgaggtggtgccgcgcatcctgcgtgtgatccgccttggtcaggatgtggacaagacccatcgttttgccgacgaagcgttggaacgcgcctatgcggctgctcgggaattcgccggtgtgattgccgagcatcccatcgacggcctgcgtttcgttgccacctccgccactcgtgacgcggaaaaccgtgaggagttcgaggatgagatcgaacgtatcctcggcgtgcgccccgaagtcattcccggcactgaagaagccgacctgagcttcctcggtgccacttccgtggtcaatcgcgacgatctgcccgccccctatctggtggttgacctcggcggcgggtccaccgagctggtcatcggtggcgacggcgtcagtgcgcccaccacccaggttcagggcgcattctccatgaacatcggttccgtgcgcatgaccgaacgtcatctgaccaacgatccgccgacccaggcgcagatcgatgaggccgttgcggacatcgacgagcatatcgatgaggccttccgcaccgtggacgcaggcaaggcccgtaccatcatcggtgtgtccggcacggtgaccacgatgaccgccttggctatgggattgaaagaatacgatcacaccgtggtcgacgggcatcggttgagccttgaagacgcctatgccgtggacgacaagttccttaggatgacgcgcgccgagcgccgcgaatacaagaccatccaccccggccgtatcgatgtggtcggcggcggcgctgtggtctggagccgtgtgctggcgcgtgtcagcgaagccgccaaggccgatcatggtgaagccatcgattcgttcgtcgccagcgaacacgggctgctggacggcattgtgctcgattatggtcgccggttgctggctcaatagcgtaagtggtaagtgcctccagcgggctgagccgttaagcaaacagcccggtgggctgtttgcgttatatgcgacgccggcgacgctatcgctaccggctgctacaaacagcccactgggctgtttgtaggcgaagggagcggctatgccgcgacggctgcacgaagcgcagcaacccgcaagcaatgctcagggcaggagatagcttataatagaaaagttggcctccgtggcgaaatggtatacgcagtcgacttaaaatcgatcgcttcggcttgtgggttcgagtcccaccggaggcactttcggaaacccggcttggatgccgggtttccttgtttttccaatggtttccgcatggtttgcaattcactccaaatcactccaaatcactgcaattaccggaagagtgtgggcaaaatgtgggcacggaatcgctgtcggattgatgtgagacgaatgtgccgatggcttaggatgcgatatgtccacgcttgtccgcgtatatcatgaggatatagctaatgagagggtgaatgactgtgtgggaggtgcaatcgtgaaagatcccttccaagaggccgtcagagcacgtttggagacggtgagttcatctgatgggcatctgaccgtgccggttgatccggagaagatcgcggagcaattaggtctggaagtcgtgctcactccattggaggacaatgtcggcggattcattcttaagaaacacgggggagccgtccgaatctacgttaattcgaatgattcgcgggaaaggcggaagttcactcttgcgcatgagataggccattattggctgcatcgtgacgatggcggagagtttggctacgttgaatatcgtggcgaattgtccactcgtggtaccgacccggttgagaggtgggccaattcgttcgcggctgagttgattatgcctgcgcgctatatcaggatggcgtgggcgcggggggacagtctcgatggcatccaggaaaggcttggggtgtcggatgctgcttttgggcatcgattggtgaacttggggttgattggccgatgagtgatgccgacgtgaagggccagccgactccggaggatgtggcggctgcccagcgtgagg

SEQ ID NO: 1616 - DNA, 17529 bp, Unknown
  R221_24m  MAG No. k141_63399
aacaggtcgcgcacacgggaggcaccgagacccacgaacatttcgacgaagtcggagccggccatcgagtagaacggcacgccggcctcgcctgcgatggctcgggccagcaacgtcttaccggtgccgggagggccgtacagcagcacaccgcgcgggatgcgcgcacccagcgccttgtacttggacggatccttcaggaagtccttgatctcctcgacttcggccacggcctcgtcttcaccggccacatcggcgaacttggtggtgggggtctggccatcgagtagcttgccgctgttcttcttgccacccatgccgagcatgccgccggcaccacccatgcggctcatcaggaaccagaacagggcgaagaagatgatgaacggcaggatcgaggtgacgaggtagctcagcatgctggtctgctcgatattcgaggtccagcccttttcgagatcaccgttctccacggccttggccacctgtgcgccctgcgcgaaggtgtagtagaactgcacgttcttgccgtagttggtcaccttgccggtgtcggcgtttttcttggtgtagtcgttcttcagcttaaggcggacgacctgcttgttgtccgtgatctcggcgtaggtggccttgccctgattgatcagcgcgaaaccatctttggtgtcgatggtcttcgtgccaccgccggcgaacatctggaacatcagcacgaccatgaccacgagcacggcaccccatagccaaggggactgccatatcgggcggttctcgttgttgttgcctttgccattggtcccgttattgccacggttgaacgggttggtgaacgggttgccgttgttacggttgttgttcgggttcggattattgccgttacccggcccttgcgggaagctcatgcttgcactccttggtagacggacggcttgaggaccgcgatcgaatcgaggttgcggtagcgttcgtcaaagtcgaggccgaagccgacgacgaactcgtccggaatctcatagccggcgtacttcacatcaacgtccacttctcggcgggaaggcttgctcagcaaagcgaagacctccacggaagcggcaccacgacgtttcagttctgcgaccagccacgcgagcgtgcgtcctgaatcaacaatatcctccacaatcaaaatgtgccgtccgcgaacatcggcggacaaatcctgcctgactgtgacctcaccgctcgacactgtgcccgagccatagctcgacaggctcatgaagtcgatctgtacaggaatgctcatggcctgggtgaacgcgaccagcgtattcacggcccctttcagcaccgcaacgagcagtggattcttatcgcggtaatcctcgctcgcgagagcggccatctcgtggatcttggcatcgatctgttctttgctgaccagctcgtggtcaatatcttcctcaacgtcagcgattcgcatgcgcaccatcttggcacacgcgaatgacgtgtttcttgcgattggctgaataacctctgggaagtgagacgccgccttggccatgccaatcgacgaccagccggtcgatggcggcaatctgggcggcactggcgttcacaccggcttggctcagcgcgtgagcgatgacccgcaaccgaatcgcctctggctcacgtgcaatacgtctgacgctgatcatcaggccgacaccatggctcgaatcgttggtatcgcctgccgcacaggctcgtggcgtatcggtcgataccgctgccgacgatgccggccaatcaactgtcgtaaccgcctcccccatcacctcgtcggatcgctgatccagatactccttatccattctggccaaccgtgcgctttcggcgaaatggcgggtgacattgaatccagcgaatcgttcgatggccggcagcaggtcgtggcgtacccgcgagcgcaacggatagtcgtccggcaactcgccgtctaccgcatcgccattggtggggtcatcccaatattccacacccaagtcttcacagaggccggtggtttcgtctcgagtaagggtcagcagcggccgcgcaaaagtcacgccactgcgtgtgaagacctgcggcatgccggccaacgcatccacgccacggctgcgcagcagtccgatcaatacggtttccgcctgatcgtccatagtgtgggccaacagcacggcaatggcacctgattcacgcgccgcggcgcacagctcgttgtaccgggcctgccgtgcggccgcttcgaggccctcaccgcgtgcctgcacggttgcgttgcgcacgatgaccgggcccagtcccaacgcacggcaacgatccgcggcctcgccggcgacctgttcggaaccctcctgcaagccgtgatccacaatcacgacaccgcaacgcacgcccatggacgtgcatacgatatggcttaccgcggccagcgccatcgaatcgcgcccgcctgaacaggccacgagcacgagtggtgcatcggaggcaacggcatggtccccatgctgcgcgaattcgggagcctgcacatcgcatagttccacggcgctcagcgttgttcggaccgcgcctacggccttgcgcaatcgtgcggaatatgccatgtactcaccacccttttctggttataggcactcgtgcgtttatggacgtttacggcctttgtagcccttgatggcccttgatgcctcttttacagccccgcgagcttggtgatgaacgagtcgatggcgctacgcgcggcggcataatcctcaggattgttgaccaccacggcaaacgacaacgctcccccattggtacgggacacattgccggccatcgacgtgaccgtgccgaggctgccggttttgacgcgcagcagaccggccacggcatcatccgtataccgatcctgcgccgtgcccaccaaccccgcgatggatagaccttccgcaccagcagcaccgctctcggtggtcagattacgttgttggacggccgccagcgtgcgtacggtgagccgggagccgggagacaggccggagcaatcggccatggtcagaccggatgtgtcgagaccgagatcgttcagagtggatttgaccgcctccgtgccgccttcaggactgtttgtcgctgatttcgccaaagcggtgagtctgccgaactcctcggccagcgtattgtccgaatgccgcaacgtgtatgccatgatttcggacagtgttgccgaactcaccgaggccaaaggcgtttcgccggatggagcggtgtttgccgtcacgtctccggtaacggccacaccgttcgattggagcagttcggcgaatttcgtggccacgtcgctggcggtgtgctgggacagttccgggtatccggccggatcatcagggtcggccggcgcaggcgtatcggcggtgtattggcggcctccatcaatcgccattgatgagaccggcgtgaagtagacggtgtagtcgcttaagaccgcgccgccttccgacagacctgcgggaatgcgtgagtcgccgaatagggtgtcgtcgtactcgagattgacggaagtgatgcctcgctgggcgagcgcggccacggtggccttggccaaggtgttcagaccggcacgtccgttggtatggtttgcgtcggaatcgcctgcagacagcagcatgtcgccattgcctttgagggtcaacgtattggtgccgtcatcggattgggtcaggaacacttgggtatccaaggtggatgccatgttcagggtggatgaggcggcgagcgcggtcagcgttttcagtgtggatgcaggctcgcgtggagtgttcgactcatgttcggcagcgacggtgccttgggcgtcttcaatgatcaccgacgtatcgtttcccacgccttgcgtggacagcaattcgttgaccagtgcagaagcggccgtggaatcaatggccttgttcgcgttcagggcaccggcgatggtgccgcctgatttggcggtggccggattggcgaaaacaggtgcggtgacaggttttaacgtcaacaatccgggggccacgtcggtgatgtcggcggcgcagtaccccgcgaacagggcgatggtggtcagtgcggaaatgatgacggtcagtgttcggcgatgcgatcgttgggtccgccgttgcgcttcacgtcgctgacggcgtgataccgctgtagataccatcgtgctccttatgccaaggcaatcatttctgcaatgaggcgaacgagtcgagtgttgccacaatcgagagcattcgcgcatccatcagcttaccgcccagccatgtcccgagtgccagaatgccgatgccattggccagcgcgaccggaataatcgccagccacatgccgccttcggctcctgtcagcagcatgaccagcgccacgatgccagtgggcagcatgagcagcaggctgccaagcatgtagacgaacgggaagaagccttgggccatggcgcggccttgaggcgcggagaacggcttgtccattgaggcgaccgggtacatcagtacacaggaggtgacttcggccacgcccagtccgctcaaggcgatgcccatgcccgtggcgaggaagatcaggccggtagcgaggtcatcgggctgcgcccagcgtccggtcagtgcgccgaccagcacgatgccggcgagatagagcagcaccatgtagacgaccatgatgccgacgtagacgcgtacgcggccgattctgtcggtccggccacgcacgccggcgatgacttccatggtgaagccgcggccgtcatatgcgagcccgttgctttccacgacggacatgaaccagccgcaccagatcagcgactgccagacgaccgcgctgatgccgtgtgcctggaaggcgaagatgatcaggaacaggaccggcatggcgaaggtcatggcttgacgggggtctcgtttgagataggtgatcaggcgtgcggaaaccgcgccggatgccgaatcgggcatccatgcgaatgcgccgatgcctttggcggtctcggacggactgtttgcgccgatggtgagccgttcatgtctcagacaccaggtgcagacggcgaagcagacaatccatgtgacggcaaggatggcgatgcgggcgagcagcaccgcccaggctccggtaagcgcgtcgaacggtagttggaaggccgcgccgaacggcgtccatgcgacgatggtggtcgccgcgccccaggtttcggtgttgaggctgaaggccacgccggagttgaccagaatgttcggcaactgacagatgataacgaacgtcagcacgatgaagatatagaacgcgcctttgccgcgtttgccggtcaccagcgtggtggatagggcgatgagcagtttggagatgctcatcatggtgatgacggccagcactgcggcgaggagggaactgatgattacggctggtcccatatgccgataggccagtgtccagagcatcagtgaggccacgccggtaagggcggggatgccggacaggccggaaagcagcaagccgaattgcaggttgcggtcggcgatgccgtagagcgcgaatttgcgtgggttcatggtggagccttcgccaagcatcatgagctggatgaagccgatgaagatggtcatggtcgcgccgaccagcacgacgactatgttgacgatgcctccggaaccaaggatgttcagcggaaagccatccgcgttcacggtgaagggcggcagtatgccgatgaaccatgcgagcacgccggtgccgatgatggtgccggccgcgagtacggcggaaaagacataggcgacggtctgccacgccgattttcgcagggtggcgagcgtgagcgtccagcgcaggcggaccagggtgatggcgctgctgatcatcggcgggcctcatcggtgggtgtggcgggcgtggcggttgtaagcggaatgggctggaccggctggaccgaagttggtgcttgggcttgggcttgcccgccgtcgagccatgcgagatgggcggcttcgtggcggccgccgaccagttgcaggaagcggtcttcgagttcttcgccggcggcgacctcgtccaccgtgccggccgcgcacaccagaccgttgttgattacggccacatgcgtgcacatcttttcgaccaatgccatcacgtgcgaagagataatcaccgtgccgccggtcttcgcgtattcgatgaggatgtctttgaggttggcgctggacaccgggtccacggattcaaacggctcgtccaggaccagaatgcgcgggctatgaatcatcgcggaggccaggcagatcttcttggtcatgccggccgaataatcggtgaccatcgtgttggcggccccggccaagtcgaaagcattgagcaggtcctgggcgcgacgcgtggtctcatcgcggctcatgccgcgcagcatgccggagtagacgagcaattgcaaaccggtcagtcggtctaagatctggtcgggctggggcatgacgccgatcatgcgcttggccgtgttcacgtcgctccacacgtcatggcccaaaatcatggcggtgccggcgtccggtaccaatagaccggtcaccatattgagcgtggtggttttgccggcgccgttggggcctacaagtccatagaacgagccgaccggaatatcgagcgcgagtccgttgacggcgatcttccggtcgaagtgcttgaacaggccacgaatggacaccgccgcattcggattcggcggccatgcttgtggctgcggttgcgacggctgtgcaggcacgggggcggcagctggcatcatcggcggctgaaatccgacattcctttgagtattgtctaagctcatacatccactctaccccaccagccaaccctcagcgaagcaaacccccgggttgctgttggattgccccgctgagcagctccaactagcggactcggtcaacccttatgcgcgatgggcttccactgggctttggagaagagggcctggaaggagatcggcacgtagctgagaatgtaaatcgggaagctgagcacataggcgagcagctccttgttcgtggcaccgatctggtcgcgctcgacaatgatggtcaatgcagccaatgccatcaggcccaacaccgatatgatgatgccactggaccaactggccagcgattgcagctggctcggccaactcacgaagccacacgcggcgaacagcaagcccattaccgcgcgaatcacgcccaacacggtaaacggacacagcatcaaggtgaagtcgatgcaggagaaatcacgttcgcgaaccgcgcgtttcagcaatgccgagccataataacggaatacctgcaggaatcccttgctccaacgcaaacgctgacgccaactttgcgagaaggtaaccggctgctcgtcgtagagaatcgcagtaccgcaatagccgatgcggtcgccatgcagaatcgaatccatagtgaattcaagatcttcagtgagcagatggaacttccatcccttgttccgcttcatcacctcgcgggagaacatgaatcccgtaccgcccacatggcaagaggaaccgagaatcatacgcgagttagacaggaatcgcgattcacggatgaaccacagcgcagaaccagaagacacccagttatccgccagattcaccgaattacggtagctggtcagaatcttgaatccggagcagaacgccttgttcatttcctcgaagtagtgcttgtccagcttgttatcggcatcgaacacgaagtaggcctcataatcatcggccacaccgatgtcgagcatatgccccaacagatacgtcagcgcatatcccttgccaaccagctcaagattgtggcgttccaccacatggcagcccaaagaccgcaccacgtcggcggtgttgtcggtgcagttgtcggccaccagccagatgtcgatgaggttggacgggtaggtctgatcgcgaatcgacccaataaggttgccgatcactttttcttcgttgcgcgcggagatcagcacggcataccggttggtcatcggggcgtcggggaagcgcacgggcttggcgaacagggacatcacgatgcacagtccctgatatatcatgccggcaccgccgacgatcatcagaagaatatcgagtacggaaagcagagtcatcagcgccaccctgccctaggattgctggaggcagattgatcagactgcttggtttgcttgcgttgctcgggctgctcaggctgttcggcggaccgctcaggctgctcgggctgctcagactgctgcgtatccgcggcaccacgctgcggaatcgccgccgtatccggctcatcaaagcttgcatccgcaccgactgtattatcggcgttatcggtatcatcggcatccgactccggctcagtgccgcgtaatcccttgcgagcgctggaggatagcacgttcttcggaatcgccacggtggcggaatcgtccaaatcggattctttcgtctcgtgcgacggaatcgcataaatctgttcctgcagcaaacgcagttcctcattcatcggcacgcggttggtggatcccctggccgcacgcggcatgtgctcgccgattggctgcaatacgtgctcgccgaacgcctcggacgcctcgacgatcttggacttcttctccggagtcggatcgttcatcagcggtgagtcaatcagctcatagcgcttggtgtacgcacggaagatggcctgcagcgatgcggtgaccggcagcgccaggaacgcgccgaatgcgccgaacagcgagccgaacgccagcaccgagaggaaggcgacggccgcgttgatatccatcgtgcgctgcgaaatcctcggcgagagaatcaggttctcgatctgctggtagacgatgatgaacaccagcaccgccacggcgtacgtccacccgcggttgccccaagcgaacagcaccggcagcgcaccgccgatataggtgccgaccgtggggatgaactgggataccacgccgcagaacagggccaacggcagccagtagggcacatgcaggatctccaagaagatggcggtgcaggtggcgttgatcagcgccagaatcgaacgggagaacaggaaggacgaaatctggccttgggccacggtccacaccagcaggaatcgacgctgcgtgttgggggccagccactggcagaaggagcggcgcagctttgggccggcggcggagatgtaatacgtggtcattaccacggtcatgaggttcagcaggaaggagaacaggccacccaccgtactcatggcggtgccggcgaaatcggtgacccacgaggtctggatattgttgaagatttccatgccaagattgctgatttccggcatcttgaacgtggcgtgctggtccacgaactcacgaatctgcccatacattgccggcaaaccgcggaccatggcaatcatctgctgtacaaacatattgccgaacagcgtgagcagcacacccacgaccacggccacgcccaccagactgacggcggaagccacgccacgcttccagccatgagccaccagcgccaccaccagcggttcgacggccagcgccaggaacagcgagatgatgatgtcgaacaccagataggagatgtcgccccacgagcgccagcagaacatgaatacgatgacggcgagggccacatacagcagcgcgcggccgaaccattccggtggcctgcgggaatctcccttggcggggaacaaagtaccaaagtcgatacgattctcgtcgtccgggtctgccccggcttctgcggcaccgcttctcgacgtgtcggtgctgtttatgtttcgcgcgcgttcgctcatggctccccattgtagcgaggggtttgaagctcggatacgccggcggcgtacacccgcttttctattgttgatgttatgctcaacgtttcgatcatcatcccagcgtggaacgaagccgaacgcatccgcgactgtctgctgaacgccactcgccagaccatcatgccgcatgaggtgctggtggtggacaatcgttctacggacaacacctgcgcgattgtcgaacagttcatcgccgaacatcccgaggccccggtcaaactgttgcaccagaacgatgaacaggggctgattcccacccgcaactttggcctgaacgccgcgaccggcgatgtgctgggccgttttgacgccgactgtatgatccggcctgactgggtggaggtggtctccggcatcttcaccgaagacccggccgcgatgggtgccactggtccggtgatgtattacgacatgccctcacgtcatttcgggttgaaaggcgacaattccttacgcaagcgaatctaccgtgccgatggcggccagccgctgctgttcggctcgaatatggccttgcgcgcttcggcctggcatcagaccgcgaatgaggtctgccgagataaggccgatgtgatgcacgaggatatcgatatttccctgcatctgatgggcaagaatctgaaaaccgtgtactcgccgcgcatgatcgccgcgatgagcgcgcgacggatggacacgtcgctgagttcattcctgaactacatgcgacgttttaagaatacgtttgatgcgcatccgcaacatacgcgcacgcataagccggaggtgttgttcaccgccatgtatccggcgatgcatatgttctacccggtgtggcagaaagtgctgaattccgcggatatcaatcctgctgaagccgcgtggatcaacgagcagatgaaactggcggaggcgcaaggcaagcagctgtacgacgagacccccaccgacgaagtctacgacgaaaagcacgaaaagtagctggatatacgagccccctctgcttatgcaagctccctctgatgagggagctgtcgaacgaagtgagactgagggagagattgcgacgcagccgctaaaacattgaatcggccgcaggccgatacctattattcagcggctacgccgcaacttctctcccagtcagccacgctgacagctccctcatcagagggagctaatgtttaccgtcatcgactgatcacatcagcgacttgtaaatcgcgagaatgtcctcttcggtggcctgacgcgggttgccgggggtgcacacgtcgttgaaggcgtcgtgggccagcggttccagatcagcctcggtggcgccgacctcgctgatcgtggtcgggttcttcagatccacggtcagcttgtggacggcctgcacggcctcttcgcgcaccttctccaggtcgccggtgtaggcgtcctcgacgccgaacgcgtcggcgatgtcgcggtacttctcgcccgtgtagtccttgttgtattccatgaccggggccagcagaataccgttggccacaccgtgggccacgcccagacggccgcccagcgggtgagccatgccgtgcaccagaccgaggcccacgttggagtaggccataccggtgatgtaggaggcgtacgccatctgctcgccagccggaatgtcgccgtcggcggacttggctaggttcttggcaatcatgcgaatggtctgcatggacaggcagtcggacaggctccaggcacccggggtaatgtaaccctcgatggcgtgggtcagggcgtcaagtccggtggcaaccttcaggccgcgcggcatggagtcggtcagatccgggtccacgaaggcgacgatcgggatatcgtgcgggtcgacagccacgaacttacgcttgttggcggtatcggtgaccacgtagttgatggtcgtctcggaagcggtaccggcggtggtcggcacgccgaagatcgggacggacgggttcttggtatccgcgacgccttccagggacagcacgtcggcgaactccgggttggcggtgatgatgccgatgcccttgcaggtgtcttgcggggagccgccgcccaggccgatcaggaagtccgcaccggactcggcgaacttggcgacgccgtccttgatgcactctaccggcgggttcggcttgacgttggagaacacttcgtagggcaggccggcctcatccagaaccttggtgaccttctcggcggtgccggtctccagcagtaccggatcagtgacgataaatgccttggtgaagccgtgctgcttggcgacggccggaatttccttgatcgcgccacgtccgaagtatgcagtctggttgaaaatcatgcggtataccatagggactctccttttgagctagtgtcttaactggtggtccactcactctttgagtggtccaacggttccccagtctactccgcgcatgagcattcacctgaaaacacgctgaaagaacaacactgaaaataatggcaagaaatggcggaattccgcacttgtcgaattattgtccattgaccaaaccagttcaatcgcccgagatctcaacgataagaccattttccggagtcgcttggtgctctccgagaaactcgtctctcatccgcttacttcgcgcgtacacaatcaatatgcgagatgcctaattccattcgtgtttcatcagccgaacgcgaactggttcaccagatggtgtattcaacggtttcagtctcttgaagaggactaagatacctcgacaattggggtgatcatcataagagaatgaggcagataatggcaaatggcaaggctatgacagtcggcgagatggcgtccctgtttctcgaccccgacactcccgttcgtatcgacgcttttgacggctcgcatttcggcccggcagacgcggatttgaaggtcaaaatcgccacgccgaactgcatgtaccagctgctcgcgcacccgaatgaaatcggcatcgtgcgcgcatacattctgggcgatttcgacgtggacggcattgactacgccgacccgtatccggcgatgcgcaagctggtgtcgctggccaaatacgttcgcccgctcgctcccgcatccattgcccgcgtatccgccggcattctgagtcacggcttcaagaagccgccggtgcccgccaccgagggcccaagcaagttcgcccgcatcaagcgtggcctgatgccgcacaccgaaaaggccgattcggaaaccgtcagctttcactacgacatgtccaacgagttctacgccgacttcctcggcccctccatgacgtacacctgcgcggtattcgacaacgagcacatgagtcttgaagacgcacaggccaacaaactgcgcctgattctcgacaaactggacttgcagcccggccagcgcttactggacatcggctgtggctggggttcgatggtcatcaccgccgcccgtcgcggcatcaaggcgctcggcgtcaccctctccaaggaacaggccgcgtacgccaacgaatggatcgcccgtgaggggctgcaggatctggccgaagtgcgcgtacaggactaccgcgaggtgcccgagcatgacttcgacggtatctgctcgatcggcatgatggagcacgtaggcgtcaagaactaccagagctacttcgaagagatgttccgtctcctgaagccgatgggccgactgctgaaccaccagatcaccatcagccatgacaagcctcacggcaagcccggcaccgacgaattcctcgaccgttacatcttcccggacggcgacctcggcgcgcccggcttcatcgaatcgtgcatccatgacgccggcttcaacgtggtgcatcaggagaacctgcgccagcactatgcgctcaccctgcatcactggaaccagaacctctccgagcattgggacgacgcggtcaagcaggtcggctttgaacgcgccaaggtatggggtatgtacatggccgcctgcgctctgaacttcgagctcgacggcatccagattcaccagttcctggctgtcaagccggatcgcgtgggccacccggacggcaagtggtaccctctgcgccaatggtggcaggcctgactccgtttctgtgggacggcacgcggtttttaccattgttcatctgccgtcccacagaagtgtgggatagcagatacatcaatcgtttgacgtatctgccatcccgcatgacataagccgagaaccgcagaatagagccgttctttgccctcagctctgagggcgttcttcgaacgctgtgggacggcacgtcgaaaatcggcaaaatcacgtgccgtcccacacgattcccttcgcacgcgcatttcgcaggtgctttttctgcaatactgactctatgagcgccacagccccagaaacggctggggcggacgatcgcaccgaccatgacacgcgcggataagacccacgtttctttacttaaccctaacccgatgttcgcattggtgctgttggcgtgcgtagttgcggcgaggaagacagttgttggcgaacgcgagcctttgcattgaccggccagcccgccggagtaagtacgtgacggatatgcaaaagccccgcacaaggcggggcttcattgtggtggctccgaacggcgtcgatccgttgacctagcgattttcagtcgctcgctctaccaactgagctacagagccatgaacagtcaaaaacccggataatccgggtttcataaccattccagcgaccccggccggacttgaaccggtgacctccgccgtgacagggcggcgctctaaccaactgagctacggggccattgttctcacttgcgtgaggcaacagatgtatatattactgaaattcgccggtcgtgcaaatttcggcgtgttccgcgtaatttcaaggtttttgctatcaccagcacacggacacgtctgccataaacatccacaaacgacgaagggcgcgaccggaactccggtcacgcccttatgaacagaagcacttcacggcatccaccgcaaagcaatcgtcaatctcagtcagcctgcttccaggtgtcgacgtcgatgtggtgttcggggttggcctgccaggcatcccacgcggacttgacgatgtcttccacgtcgtacttggcgtgccagcccatctcctcgttgatgcgcttcggggagccgatcaggtgcggcgggtcgccggcgcggcgggccatgacagcctcggtgaacggcagaccggtgaccttcttgacttcgtcgacgatctggcgcacggaggtgccttcaccggtgccgacattgaaggcgtcgtacttgcgctcgtcacggtcgaggtacttgagggcggcgatgtgggcgtcggccaagtcggagacgtggatgtagtcgcgcacgcaggtgccgtccggggtcgggtagtcgtcgccgaagatggcgggggccttgccctgcttgaggcggttgaacagcatcgggatgaggttcagaatagccgggtcttcgagttcgaccgggccgcagccggccacgttgaagtagcgcagcgcgcagaagcggatgccgaacggctgctcgcaggcgcgagccatccactcgccgaacagcttggtctggccgtaggggttgatcggcagcatcgggacgacgtcctcgggcaccacatcgaccggcggcacaccgtaggtggcggcggaagaggagaagacgagcttcttggcgttcttggactgggtcatgccggtgagcacgttgagcatgccgttgatgttctgctggtagtaccacagcggcttctccacggattcgccgacctgcttgcgggcggcgaagtggatcacggagtcgacgccttcggcatcgaggatttcagccagacgctcgccggcacccggggcggcgatatccatgccgtacagacgggagccttcgatgcgggtgggcttgccgtagctcagatcgtcgacgacgacgaccttttcgccggcctgatgaagtgcgtgaacgacatgcgcgccgatgtagccgcagcctccggtgacgagaactgtcatagttgacctttccttatgcgggttgcaagtgtcggccgtgtggagttcagcggctgttcacttttggtccgctttgttaccttttgaaacaatttgagtatatcacacgaacataatcgcacaaaacggtggtgtcgtccggcaatatctgcattcattaggtcgatttggcgttcattaggtaggtcggcccggagccggcccgcacggacaccgggtaaatggcttgatatggtggttggtatcgcacaccacccacctaatgaacgccaaatcgacctaacgaatgaacagcggtgcggcgcacaaggaaaatccgaggaatatatgaccgatcccgaatccacagcaatcgattccgtcaccgcgatggccgcggaccacaccgaggcaccggcgcaccccctgcacaaggtgctttccttcgtgcgccgctccggacgtttggacgatcgcctgcagcgcgcctgggacaactatgccggcacatatctgttggatattgcggccggcaacctgctggacgtgcgcgaaggcgtcacgctcgaccgcgcgttcgtggagtcctcatggggcaacgacaatccgctcattgtggaaatcggcaccgggcagggagaaaacgtggcggccgcagccgcggcccatccgaagacgaacttccttgccctagaggtctatgaccccggtgtggcccacacgctgctgctcgccggcaagcaggggctgaccaacattcgtgtggcccaggtcaatgcgcccgagctgttcaaggtgaccgcgcccggcaccgtggccgaggtatggaccttcttccccgatccatggcccaagaagaagcaccacaagcgccgcatcgtgcaggaggccatggccggcgacattcatcgcgcactggccgcagacggcgtctggcgcatcgccaccgacatcgaggactacgccctgcacgtgcacgaggtgatggacggcctcgatggctggaagaacctgggcagcataaccgtcagcctcccgctggagcacgtgggcaagggcaatgccgacatggccgccgacatgccgcacgccgacttcaccgaatccgagcggttcgagggccgcgtgctcaccaacttcgagaagaagggcctggccgccggccgcgtgattcacgacttcacatatcaggccgtcaccctgaactgattgcgacacgccgaaatgccgtcgatttgcataaccgaacaacctcccgtaaagtaactcgagttgttcgcccccatcgtctaacggttaggacaccagactttcaatctgacaacgagagttcgactctctctgggggtacgcttccgctcctgtcgccatcattgtgattcggcaggagccttttgttttcaacgggttgcacctgccggcgatgtggcgtgccaggagcgtcgaggtcagggctgccaccaacgatgcacctttgtcggcacctgtgttcgtgtcgtcgttgttgacgatgtcgtacagcgtgtcgtcgagcagttcggccggtggcatgccgagggtgacggctgcggctgcgatggcattgaggtcccatgcggcgtcgaggttcattc

SEQ ID NO: 1617 - DNA, 37052 bp, Unknown
  R221_24m  MAG No. k141_65820
cagcaggaacgccgatcccaaaggagtgcccacagatagggcgataagcgcgtaggaaatcagcatggtctcgtccatcgagacggacggaagcaatgcgcggatgatcggttcggggaacacaatcatggcggcggcgaaaaatatgatgagcaggcccacattattcagtgcgttgactaggtcgtgccgtgcctcatccagattcgcagctgcgatggaacgggagatcttggggaacatagccgtggataccgatacggcgatgagcgaatagggcaggatgaacagggtgtacgcattctgataggtcgcgttgcctgccacgctgaacaggctggcacccgtcagttcgtgggcgcgctgcggtgcggatgtggcgatacgggtaaggataatgccgcagatctcactggtgaccaccacgcccaaagagcctaacgccacgggacccatagacctgagtccaaagccgccaagcccgaagctgggtttgtacttgaacccgatacgggccagtggcaggaacagtatcagcgcttggaaggccacgcccaaagtccaggtgcctgcggtaagcgcgattttgtcggcggtccagaattcgaggggctgttcattggccttgctgaacagcagaataaaaccagtaaaaccggcgcaactaataatgttggcaccggttgagctccacgcatacgtgaggaaatggtctttggcggccagaatctgacccaacaccgtatacaggccgtagaagaacacctgaggcatgcaccacagggtgaacgaggtggtcagggctatcatctggtgatcgtcgctacccacgtacaggcgggcaagcagagggctggccgccgccatcaccacggtcatggccaacaggatgccgatggccaacgtaaccagacgattcagtcgttcttgggcgtctttttctttcaacgtgcgcacaatctggggcaccagcacggcgttgaagatgccgccggacaccagcgtgaacacggattggggaatcatggaaccggcctgataggcgttggccgccaatccagtggtgccgatggccgcagcgagaagaatcgtgcggagctgaccggtcacacgggaagcagcggttcccgtggccatgatcagggaattacgacctacggttgaactcattcgtcggggtccttcttccgatggaactgccgccacaggccgataatgcacagtagcacggcgaagccgatgataatgaaaccgctggcatcactgacgcgcatcacactggtgatcgcggtatcctgcgtgttgccgaagctgttgccttcccggtcgctcagcgacacatgggccgtcgatgagccggaagtggaaacgcggatggtgaaggtcacctgagcgtcgctatgcgcgggaatatcgatgtcagtggttcgcgaggtgacgatctgcatggagtcagtcagcgagttgacctgcacgctgacggcataaggaaggtcattgctgacggtgattggcattttcgcggattcgctgaacacggatattgattccgatgggttgatgcgtacgccgttcagaagatcgctggccagtgttttcgcggctctgaccatggcttttcgcgtggctgtcggctggggggagccagacatggatcgcagcgccatatcgtcatgcagcaccagcaaagagccaatccattgcgtcggatcgttgctgtgcgagacggtgtcattggcatcctgccgggccagggcctgcggggccaacgacgagacctcgtcggaatcaatctcgttcttcaatatggaggtggccatgcgcatgatgtcatgccggctgtcggccaactgtctcaatgccgaccgggtattggcggtgttggcatcatcggccttgtcgggattgaccgaatcgctgacatcgtacggatcggcctcggccatggtcttcaggtccgtcagattcaaccaggacgcctgctcgaaggcgctcatcacctgatcgatccagccggcctccgtggtgcgggagaacgtcataagcaggtatcgggatgtatagggctgttccatctggtagaacgcgctctgagcgaccagtcgggccaaccgaccggcatcgctggactcggcctgcgcgtccgtgctggtggcttggcccttggccagcatgcccaaggtcgattgctccttcagcacggtgacatcgccggcaggcgtatccaccacgtaggtgcctgtgtgtacggcttcagtctggtcggcatcgaaagaggcatcggcaatcaccgtgtcatagccctgctcgcgtgccgcggtcagcgcatccaacgtccaacagttgttgccctgccatgcgtacgcggagggtgtttcggagtcgtttccggcggcataccatgcggccgcctgcttggcgttccactgttcagtggtgatgccggccttttcgtaggccgcggtatcacccagcgcggtataggcggtgatgtcaaagtcggcgggctgcatgatgccggcaatggacggttgcactgcggactgacgccaatacagaggatccgcgatcacttgcagcgagcggtgcttggcgaatgtctgcccaagggatcgcgcggtatcggcatcctgcccggataaggatatggcttgcgtatcagtggctttggccacgttgccggcgtcggcgttatcggacttgtcggccttgtccgtgctgttggacttggacgatgttgatgtcgaggaagtggtggtttcggcaatgcgattgctgatggccttgttatcgacctgccagccgctggcggtgtagggcatggccacggtcaggttcatggccggtgtcgtcgcggtgttgagcccatccgaagatcgggtcagaaaactcggcaaatcggcgagtatccgattgccgacgatatacgacagcatcagcggcttcggcccccagctccctatggaggcaagggtctgctgattggcgttcacctcgatggtgacggtggcagtgccgccggcgggaatcgatggcacgtcaacggaacccaactcgttgggggtggggatgggggcgttgttctcggcccaattctgaatatcggtgcgcgagacaaaggtgaacagcgtattggtggtcaggtgcagtgtgccgcttgacgtggccgtgctgtccgtattgctgatgaccgcggtgacatggtagcccgatttggaggtgacgatgggggtgctttgcgtgatggcaatgctctgcttgggctgattctcggtctgattgcccgttgcgtccgtcgtatcggatgaatcagtcgtgtccgtcgtatcgttcgcgtagacggtcaatggagcggccagcatcgccacaacggcgacgccagccgccagtgcgtgtgccagacgtgtgcaatgtcgtaagactccgggtaggttcactcgtttgcctgcctgttcttcttcctggcgtagagccacgcgattttgcgttcgttgggatagctcaacacgtcatccaaatcttcaaaacgtacccagatggcgtcttccgcctcatgatccgggtctccttccaccgtcagttcgccgccggtctgtttgagcgcgaagtgatggaccagcttatgcacgcgctgcgtggtgccggtgaaccagtagtcgatggtggcgatggaatcgatcacctcgcccaggatgccggtctcttcatgcacttcgcgcacagcggtctgctgcggggtctcacctttttcgatatgccccttcggcaagcaccattcgagatggccggagcgggaatgacgggcgataatggccacgcgattctggtcatcgaaaatcagaccgcctgccgaatattcgcgtacgaccggcagttcctgggcatccagtgaagcgaatgtggtcggaccgtccgacgtacggcgttgcggcatcatggccggagtcgggctggatggcgtcaccggttctactggcactgccggttccggcgaggcaacatccgcggacggatgccggccgaagaccgtggccggcgtgggatgcgctgacgttgcgggcctcactggtgctgcagacggcgctgagaccggcatggtgaccggcgttgcggccggtgcggtacgtgccgcaggcggcatcagcacgtcgcgcggagtcggtatcgctgcggtatgcgcggcggcggccttggcgaccgcaacggcagtatctacggccgcgtgggcggtcgccgcggaatcgttcgtgacgatggttacggacgtttgtgccgtggcgataatcggctcgaccttggcaatcgtctcggcaccggcctcgccggcgataccatcggcctgcccctcgatagtgccgctggtagtggcgatggtgacggtggcatgcatgccgaagacggtggccggtgtgggcatcatcggcttcggtgtgggcatgtcgctggcggcgtccgatatttcggattcggatggtgcgggtgtggcgggcgttgcgggtgtgccgggtacaccggaatgttgcgtagtcggtactgcgtctacttcgtcttgatgaacggcctgattggtggagtggctcgcggtgccgccggcatcgggagaatcgcccgaatcggcggaatgatgcggagtttcggacgtatacagcaggtggtcttgggtatggctatccgccgaatctggtgtttgccccagtatgcgggcaaggtcggcgggcgtaatcatattctccaccttactcaaccccgtgtgcaggtggggtaacggtatgctggtagggcagaaaaacgtcgcacgcgggaaggtgcccattgaatttcgaagtatggcccgaagccatcgaacttggtcgactgttcgccgaacagggttacgagctggcattggtcggcggcccggtcagggatttgctgctccatagaaagagccacgatttggacttctgctcatccgcacggcctgagcagttcgagccgatactgcgccggtgggggcatgacggcttctgggacatggggcgcaagttcggcacgctgggtgccatgcgccgccgcccggacggcaccgaggtcaaggtggaggtcaccacctatcgctccgacatgtacgatccggactcgcgtaagcccgaggtcaattatggcgacacgcttgagggcgacctgtctcgccgcgacttcaccgtcaacgcgatggccctgcgcgtgcccgacctgcaattcgtggacccgttcggtggtgccagcgatctgtccaagggcgtgttgcgcacgccggtggacccgcgacagtcctttgacgacgatccgttgcgtatgatgcgcgccgtgcgattcgtggcccagctgggcttccgtatcgcgccggacgcggccgaggcgattacctcgatgcgcgaccgcatcgacatcgtatccgccgagcgcgtgcgcgacgaactgaccaagctgctgctctccgaccgtccgcgcgccggccttgaggcgttggtcgaatccggtcttgcggacatcgtcttcccggagattccggccctgcaattgcagatcgacgaacaccaccgccacaaggacgtcttcgagcacacgatgattgtgctcgaacgcgcgatcgccctggaaaccggcccggacggcccggtgcccgcccccgacctgacgctgcgcttggccgccgtgatgcacgatatcggcaagccgaagacccgccggttcgagccgggcggcaaagtgagcttccaccaccatgacgcggtgggtgccaaaatgacccgcaagcgtttgaaggcgctgcgttttgaccaccatctggtcgaggacgtctcggaactggtgaatatgcacctgcgcttccacggctatgtggacgagccgtggaccgactcggccgtacgccggtatgtcaaggatgccgggcacctgtacgagcggctgaacaggctcacgcgcgcggacgccaccacacaaaacaagcgcaaggcgatgatcttctcccaggccatggatgagatggaggagcgcgtccgcgaactcaagaagaaagaggacttcgacgcgatccgcccggatctggacggcaacgaaattatggagttgctgggcctggagcccggcccgatgatcggccgcgcctacaagcacatgctggaataccgcttggataacggtccggtggaccacgatgtggccgtcgacgaactcaagcgctggtacgccgagattcagtagtccgatactagtccgataccaaaaaaccgtacgctgaatacgtgtcagcgtacggtttttcgcgaagatgaagctgtatgcgccttactccgccgtgtatgcgtcgtgtttggtgtcggcgggcagcttggtcatgctatcggcggccttgcaaccctcgatattggtgatggtcttaccggattgtggggaggatttggtgtcctgcagatcgttgaacgtggcgccgatgaccacatcaatgagttgatcctcgcgagccgtcatgatcatggtggcgtcggtgaaattgccgatcagcgtatacgcctgattaatggcgttcttgccgaagtagatggtggtgcgttcaacgccggtgctggaatagttatcgattttctgcacgctgaatccacgattggccaaagcctcacccacggccttggcgaattggccgtgagaggtgccgttcatcacgcggatgccgaccgaagcgttggacacgtattgcgctttgccgctgctgtccttgaccgcgcacggtgccgcgttgccgtaattcggctggcgggccggagtctccacttcgccgaggccgaaaacgtggaaattgaacagtagggctatgaccagcactactgccaataccgcgccgctgatggaaaagacgatggtctggcggtggcgcacgtacgccttgcgggcttcacgttcatcaacctgatacgtcatcggtggacttctttcatgggtcgggtggctggttgctaccttagcgtcactgtctgacgccgatattggggtgtgcgggagatttggctcgaataatgcgatcgaccacagccgtatcgcgccacacatcgataatgcgttgtgccgctgcctcgtcggcggcgaaagcgaccactgaggggccggatccggagacgaatgcatggctggcacccgcctgcgtggcggcgtcgatggcctgcccgctgcggggatgcaggctgattgccgcagcctgcagatgattgcggtcgccttctgcggctcccacgaggtcaaaggtgtggtagacctcaggagtgctgagttgcgactggtacgcgccgaccaatacttcgccgctgaatccctgttctatcagcgccagctcatcgcggctgccgggggcgatatccgtgatgcgttcgccgaaaccggtgccgtatgcaaggccaccggtcaggcagaacggcatatccgcgcccaacgtggcggcaatggtgcgcaggcgctctataggccagttcagatcccagagacgattgaccgccagcatggtcgccgcggcgtcggctgaaccgccgcctagtccggcacccacgggaatgcgcttggtgatggtcaacgccacatccggctcgcgctcggccgcctgggccatggcgaagagggccagtaccgcatggttgcggcgcatgtcgctgtgtgaggaggccaagtcgcccaaataagcgccttcgagctccagagagaatcccgctccgggttgcttggcggttgcggtgacggtgtcgtatacgccgattgcacagtaggtggtgtccagttcgtggcgtccgccccattcgtcgtgagcaggtcccacttccaaggtgagattggttttcgccgggcaatccaccgtaatggtgatgggggagagctcatcgaactgatgtcgggcagcggctgggcgtggatgtgagattaccggactcattgtgcctcatctccatctccacacgattcgatggccttggccagagcggtgaattcggcgatggtgagcgtctctcctcgacgggtcggatcgatgccggcgatggagaatgcctcggagggcgcaatggtcttcaatgccgcgtgcagggtcttgcgacgctgaccgaacgccgcatcaatcagacgaaatacgagttcccgttgtgcgccgccgtcggccgtgctgttcgaggcttccggggcggccgggtcatcggcctgataccgggtgaatctgacgagcgcggaatccacattgggagccggccagaacacattgcggccgatggtgcccacccgttcggcggtgccataccaggcgagcttcacgctcggcgtgccgtagatcttggaaccgggcttggcggcgagtctgtcggccacctctttttgcaccatcaccaagaacgagccgaggttgtcgaaacgctccaacagcgtgagcagaatcggcgtggccacgttgtacggcagattggcgaccagcgtaaacgatgcgtcatcgctgaaatcaggcacgttctccggggtgacggttaaggcatcccgattgacgacggtgagtcgtgacgtggcttcgggcatgaattcggcgactgtgcccggcagtcgttcggccaacggcggatcgatttcgactgcggtcatggtggcgccggtttccagaatcgccaatgtcaacgatcccaggccggggccgacttccatgacatgatcggcagcggtcactcccgcctctcgtacgatacgacggaccgtgccggggtcgatgacgaagttctgcccgaatttcttggtggggctgatgccggcatcggccgcgatacgacggatatcggcggcgcctaacaggtgaccggtggcgggaatggtgtcgttcataagcgtgtgttccttgtgggcttcgtaaccgatcagtaccaaccgatttgttcggaatgttgccatgccttggacgggctgccgtaggcttgtgcgatgtaccacagaccccaatcgatctgtacggcggcatcgtcacggtaattggcgccgaacgcagccattttgtctgctggtcgcgactgaggaatgccgtaggcaccggagctcgcgttttcggcataccacagccatctggactcgcggttccatagtttgaccaggcaatcccagtcgttgcctgtccacccgcgctgcgcggcggcaccggcggcataggcctgagcctgggctacggtggcgtgccagagtcggccggagggcgtggtggttgttcctgaatcggagccggaagagccggaattgttattcgtaccgccgccggtgttaccggaattaccagtgttaccggaattaccagtgttaccggaattaccagtgttaccggaattgccggtgttaccggtgttaccggagttgttgcccccggtgttgccggcattgttgttggtatcggtgttcgtgttgttgccagagctgctgttgttcttgtcgcctgtgttgttggcattgttaccggacgactcgtgctgattgttgaaaccggaatcggccttgccgttatcggcggagtcggattttttgtcggaacctttatcggtatcagacttggcggcgcctacggcgatgatctggtcgatggccatcgtggtgacggtttcggatttcagcgtctccgattcggccacgccatcgacatacgtgacgttatacacctgggttttctcgccattgacgccttgctggcggatctccgactggccttcaggcagattggagtcgatgatggtttgtgtggagtatggcactatggctgtgcgtgtttcctcgccatgcgtcacgcgccgtacgcgcaggatagtggtatcgccgtccttttcgacgctcacacggtcctctttgttcagcacgatgcctttggagtcaagaatggaggccgcaggcagtttgccgttgggggccacggaagtcttgccgtccgcaatgacggtgaccgggccatcctgattgatgaccagtccgccggtgagctggttgtacacattgtcgatgtcgacggtgatttttgtggcgttgttctggttttcctcgaaaaatcccagcaactggtcggcactggtggccacggtccagaagggaacggacgtgccgtcgatgttgatagtggtctggtaggcggactgtacggtgaccacggcatgattggcgagttggtcgccggacgaggtagtgacgatatcgtgggtcttgatatccaccccttgttcctccagaagacgggtggccgtcatcgcatatgtggtgacttgggtggtttgcccgttgatgttcagggctacggatttacgcgaggtgaacgcgaatgatccagccagcgcgatactggtcgccgcgatacagacgattacgcggatgcgacgcagtgtaacaaaccgctgcggggtccaacgccgtgccattgccatactcttcctgctggatgaacgattacgccacccatcgtaacggttgttccggcccgtactgcggtttcaccggccaccgtcaccattcctgctcgtcagattgttctgagctcaaaaaaagaaaagaaaaagggggcgggagagaaggggatgttcccgcccccctgaaggcgcggagctggttgggggacgctccgccctcattccaggaagcccatagttgggggaaggctcctggagtacttacccaaggtaagaattatatgcgtagaaaagtctacgtatcatataatacgccacttttctacgcgtcgagcctcttgtcgggatcgaaccgacgacctgccgcttacaaggcggccgctctggccatctgagctaaagaggcgattgttcttaacgcgtaaatcgttttgaacaaatctctagtataccggtagttctcgagtggtcaattcaggccgagccgcgccggtaattaatcggccagcgaaatcggcttcttgttggcgccgatcgatggcatctggccttccacgcccacctgatcggagtccaagccgatggacttgaggaatccgtccaccatgctggtgtccgccagcgtgagctgcttcagatcccagtattcgccattgatggtgagcgtgggggaggagaacgcgccggagctgttgaacagttcggggcgtaggatcgtgtagttgttggaggcggtgagccacttgacgtattcgttcttaccactgaatgccgcggtggccacatcctcgctcacgccggcattgacggcctgcttctccagcttggcgttgcttaccggctcgtaattggacaattcgcccggctggaaatcctcagcgtagatgttggagaggtagctcatgaggtgatcgggattgtcatcatgctcggcaatgtagatggcaccgttgaacgcgcggttggagtagttgtcggagctcttgttgtcctggaaattgaggaagtgcaaatcgatgttgagctggccggcgttcatcagcttgacgagcgtcgggtcaagctggcggttcaccgaggcgcagccggggcacagcggctccatgtagatggaaacggtgggcgccccttcggccttctgaccgtaccccttgctcgagatcacgaagccggccttgtcatcggcgttggccggctgggtactgactttcttgagcttgctataggcctcgtccacggtcatgttgctttgctggctactgctgctggtgttggacggccgcatagccttgtatacggcgaatccagcgatggccaccagcaccacaataatggccaccacaatgcagccgatgatggtctgctgcttacgttccttagcctcctgctcggcccgtgcctgctgggcggcctcctcggccgctcggcgctcagcgcgtgtggcacgcttggcctgacgcttcggatctgacatagctatccccttgcaatcgcttcaatgtttgggccccatcataatgaccgggcctgaggaggactgcgcccagagctgatctgaggtgaattccctgtaaaagtgtgacggaacgaacgtatcggatacacaacggccatgtgtgcggatggctgatgtgtgagattccgccccgctctaggcgaacggcatccagttgatcggcatgcccagaatcggcatcgcgcacaaggccacggtgatgatggcccatatggtgaacagcacggtgccgcgcccgccgcccttgggcgccggcaccactggagcaggtggagccccacccacttcggtggatggcgcgcccgccgggcgactgtgtttgagcccgcgcagtacgccgccccccagccgaatcatcatcgactgtggggcgaacacagtgaccagccagccgatggccatgaaaccgcccagcgccagcccggaagcggagaacggcacatcattgagcaacggcaccggaataccccaatccgcggtgaaataccaggagatggtgtgaacgggcagtgccagagccgcggtggccacggcggttcccgccatatagatgatgactagcagcagtatgcggggaatggccagcagcagggctttgaccagatgccagggaaaagtcgccacgcgaatccacgaatcggagtttttgcgctcgccgccgcgtttgccctcgcgctcaagctggggttcggtgttataggccagggtgagcagtagccacaacaacgcagtggccgcgatgatggccacgagcggagcatttgccgccagtgccgccagcggcgccgccagcaggatcaatggcagggtgccgcgctgcagatattcccctcgcttcacgtccaccggattgggcatgggaggattttggaccatggtttcggtgggggccgcttgggcggtttggtcgatgatgcgctgcaatgccgggcgaatggcggggtccaccgctgtgggctggttgcttgcgggatcccagctgctctgggcggtgccggacggggggaatgatgacggctgcggcgtggggagtacggtggtgcgctcggccagcggcgtggtcggggccggagtcgaatcggtgttggtcattggtgtggtggcgccggccattggtgtggtttggtccggcatcggtgtggtcgcgccggtgagtacctgtgtgccggcgtcgtcggtgaaatcggcagcagcgtcgggcaacagttgcgtggcctgctccgcaccggccggcggacgtggcggcatatcggctaagggcagcgtggcggtagcggcgccagccggcgagaatacggcggtttcgccatcgccgttatcgcccttattgccggagaacacggccatggtgggagcctcagcggtttcctcggccgcgcgccagatggttcggggattattgcggtcaacgccgccggccgcgccaaaagggggcatcgcctccgcggcttcggcaacgatcgcagccggttgtccagccacggctcccgcggcgaacggtcccgcctgctcgccctgccaagcgttgggattcaacgcatccaaggcgatggcattcagcaattgatccggcgtgcaacgatccctgcgatccgggtccagtgcagaacggaaggcagccaatgtgccggccggtagtccggaaagattcgcgttgcccgaggcctcgcgctcaagtaccgccatcatcggcttggtgccgaacacaggcgcgccggttgcggcaaaagcgagcacggacgccaccgaccaccaatcggtggcgtcgtcggattcggcaccgtcaataatctcgggtgcgatgaatccgggtgtacccatcactaggccggtgcgggtcacatgactttcgccctcgcccatcgcgataccgaaatcgaccaataccggtccggcggccgacaccatcacattggtgggtttgatgtcgcgatggacgatgccggccgcatgtacggctttggtggcttcgatgagcttgcgggccaagcgttccagatcgtcgcccacataccggccattggcggccacatcatccttaagattcttgccctcgatgagttcagtgacgatgaacgccaacgtatcgtcgagttccatatccacgatgccgcacacacccggatgattgaccttcttcaaggccatggcctcgcgccgcaggcgctcgcgcggcgtgacatcgggcttgaggtcggggtcgtgcagggccgtggacgcagagccggagcctgccactgactcgtcggtcagggagtcgcgcagaatcttcatggcataggtggtgccgccgtcgtcgcgcacccgccacaccgaccccatagctcctgagccgagccgggagatcagcgtatacccaccaaccacttcgccgggctcaagattcaacgcgttcaaatcgctcatgccctccatcctaatgccttgccggtgcattattctggctctctcctgggaggccgagcttgatatttcttggctcccctctctgagaggggagccaagaataaatgccgtttacgtattgagaagtgccgtttacgccattaaggtcgattgccctgaccggatgtggtagcaaattatgcgctcgaaatgacaggataggtgcgtgggcaggtgcgccagtcgtgaatttgcgactctataaccatcggcatcaaggatgtgtcggcggtgacccaaaggtgagccagccgggcacattcaacagtggcacagcgatgcaagggcagtatcgtgagccgctgatcgaatcgataacgatatcagattcgaatgccgcgacttcgccggtcgtaccttcgaatacttctccgaagacggctacctgttcggcgtgatggcctcccagcaggtcgctggcgctccggtcaaggcctgaggtgtgtctccgataactgaatagctaaatagaatggacggcctgctgagtgctactcaacaggccgtccattgtgtatctgaatgcgaaaagtcattatatggaacggaatatatcgatactgtgcattgtgccgattactgattccgacgcaagtattcgcgcaggaagggcacggcaaaatcgacttcgcctcgttctgtttcgcggataacgaaggcgtcaaggaggcgtttgcggtaggtggcggcatagttaggcgttttgcccatgcgctgtgcaacattcacggtgggagagggaccatctgacgctgccatggcttcgagatactcacggtcgtttttggataagccttgcaactccgggatgcacacggcgttatcaaggtcaatacgtgcttcctcgatacctgccgtaacatcagcgtcgatgatggtatccgagtcccgcatgtctgcggcatcccagatatggtagccaaccagttgaatcatataggggtatccggctgtcacattggctgcagtgcttaattgagcgtcggtgatggacatgccggaggcgcggaatgttgtggcgaaagcatcgcgcacttcatcaagaggaatatctgtgagcatgttcgttttcgcgcgacgtaggaacgtgatgacttcgtcattgaacaaatcagaaatcatctgtgggagaccggcgaacacgatggcgatattgcgtcgttccctgatttgatgctgtatggcagtggcgatggcaatcatgtcggatcgctcagccgcttgagtctcatcaatggtgataagcaacccagcatggcgcttctcaagcgcatccaaccgtccggcaatggcacttctcaacgtttcgggcatacgcttcggggatagttcggcttctccgaggccgatgcccgctccagcaaaagtcaacgatggtcggatagtgaggtggtcaagggcccctcgcccggttcgtaaggcatcaacaaggcgttcgcatagtccggcagaggccgtttcttcgatgacatcccatctgcgcgctttggcccggtctccgaacacagtgagcatcacggtttttccggttccatgagcgccggtgacgagcataatgcgccctggggcaccgactccgttatcgagacctttctcgaaatcgcggataactttgcctcggccgatgagcaggggcggttcccctcctgccgttggcttgaatgggttttcctttgccttcatgtggaccgcctcctcgctgaatcaacctaaaataaaaattatcaaaagtatcaaaaaaataaaaattatcaaaagttgggttgagccgactgaagaaaacagccgtggcgacaatgattctgccgcaatccgcggtgacaacaactgacgcggaccttcttggcagaatcgttgtttgtcccgcttcgccaatcaacgtcgctcaagttcggtgcgcagaccggctaccgtagcggtcagctcacgcacttcctcgcgcaataggtcgatttcgggattggctgatgttgcaatagcctcttgcgcggcttccttggccacttccttctcccgagcgtcctcgcgccgatccgtctccagattgacctgatccacgatccacgaggccagcgtggccgtcacaataccgatcaacgcgatgccggtgaacatcagcaccaccgcaatgatcttgccttggaaggtgaccggcgagaagtcgccatatcccacggtggtcacggtcacgaacgcccaccacaacgccgtgccgaagtcggtgatcgtggatccggacgccccgcgctccacggaatacacggccagcgcgcccacgtacatgagcattcccaccgcgccgaccgcgtatacggtgatgcgcccgcgcaccgccatgccggaggtgcggttcagcacgtgcagcacggtcagcaaacgcaacagtcgcaagggccggagcatcggcagcgcgatggtcagcagcgtgaacaggttgtgcttgaaccaccgccagcgatcgtcggccaaccacagcgagaccacataatcgacgacgaacaccacccagatcacgttgatgacggtttcacacagcgcgatatgcgtgcgggagagaatttcccacgaatacaccaccagaaacaccacggacagcaccatcagcggccagtccgtccacttcttccacgtcttcagtcccatattccgattgtagtggcgcgtccgctgcgccactgcggagcatgactccggacatcagtgttgtatacgttcgtatacatttcacgttgtgtacgaacgtatacagcggtatttttcatctcgtatttcccttatgactatcaccacagtgatataatcaagaatatgtaaggagagagaaggagccggccaatggagaccgcatcgatcgaactgtggcatggctcttcgcatgtcatcaagcatcctgaatacgggctggtcaagccgaacgacgattatggccgcggattctattgcacgcgcagcgtcgagctggccaaggaatgggcgtgcgcgggactggatgacggtttcgcgaatcggtacacgttgaccacggacgggctcctcttcctggacctgtcccagccgccctacaccatcctgaactggctggccatgctggtcgaaaaccgtcgtttccagccgaccaccgccgtcgccgcgcagggcatcgaatatctgaaacaagtgtttctgccggatgccagtcaggctgacgtcatcgtcggatatcgtgccgacgattcgtatttctcgttcgcccgcgcttttgtcaataacgcgatttccatcgaccaactcgctgaggcgatgcggttgggcgagctcggcaagcagatcgtactcgccagtcctcaggcattcgcggcactgcggttccaaggctgcgaaatcgcccgcgcttcgacctaccacggattgcgtaacgagcgcgaccgcacagctcgcgaagcctaccgccgcaaaagtgcagaagccgatctcgacggcctgttcatgcgcgacatcatccgcgagaaagtgaccaacgatgatccccgcctatgatgggacatacttgccggacgccatggccaacttggccggcgccttcgattatgcgctgaacgattgcgggttgccggtcggcctattcatggacttcttcgccacctccgaggcggccgcgcttttcgggcgaggcacgcccaaatacgtgtgtggcatgtccggcgaggagctggtggccgaagtcatgcggcaaaccggttgggcgcgcattctcgatatgccgccagccgcactgcgcgccggctcaacacccgaatactgggccggatgggtactcgcatactgccaatggaccaggggagtgcggttctcggacattctcgatgtgctgtcgctcgacgatatcgtgcgactgtacccgactctgcacgaagccgacgaaagccgattcgtcgacgtgtacgacgagcgggccgcccataatcgcaccgagggcgactcccggctgcacacgatccgcgtgcgcgccggactcagccaatccgggctggcccgccgctccggcgttaccctgcgctccatccaaatgtacgagcagcgccgcaaagaccttggcaaagctgccgtctccaccgtgctcgctttggcccgcacgcttggctgccgcatcgaagatctgttggagccgtaaagacgcggagtagtatcgcgccgcatcgattctgataactgaacaactacttttaaggcccggccggatgctcgtttggacatccggccgggccttctggctccacacggggtgccgaggtatccgttctccgcttcgaggggctgatttggccttccgtagaggtttactcccgtttcgaggggctggtggcccgctagaacacgggtataaacggcttcgccccaccgtcattccgccattttggggatgcgcttacttgagtaccagcccctcgaaacggagatagatctccggaaagggtcaaaacagcccctcgaaactcaagatggcggttgcagggcggttgaggatcagtcgaagagcggttcaaacgcaaatgtgaacaatgccacatgtgattgggcgggtcgctgcacgccgattttcgggggtgcatgggaatggcggaatatcaacgaaaaaccctatatctaggtttgttatgtgacacgcgccactacatatagtgccttgatttcaaatcacaccgctgtaatatggccttcgcttcactgttcatcagaaccacatcaaggggagtcgccatgaccgtcaccgtgttcaccaagccgcattgcccgcagtgcgatgccaccaagcgccagctcaccaagctgggtgtgccgtttgaaaccgtggacctgacgcagaacccctccacccttgagcagctgcaggccgccggtttccagcaggctccggtggtcatcacgccggacaactcctggaccggctaccgccccgacctgattcgcgaagtcgcccagcaggtggccgccgacaaccgcgccgccgccacggtgtccgcgtgagtctgagccagcccgaattcgcggccgaaggcaagacgatcggcgcattggtctacttctcgtcggcctccgaaaacaccgcacggttcgtggccggatgccgtttgcaggacgaaggcatcaacgtctaccgcatcccgttgcgggccgccgacccggcgctaaacgtccgcgaaccgtacgtcatcatggtgcccacctatggcggcggcgtggtcaagaaagcagtgccgattcaggtcaaacgcttcctcaacgatccagccaaccgcgagtggattcgcggcgtcatcgcctcaggcaacaccaatttcggtgaggcctactgtgccgccggagacatcatcgccgccaaatgcaaggtgccctacctctaccgttacgaactcatgggcaccccggaagacactgccgccgtgcgaaacggcctcgtccgcttcttcaccgaacagtaaatcttgaccccctcgaggtattggctcccctctccgaggggagctgtcaacgaagttgactgaggggagcaactgtctgagtaaacacacttctgccatattccaaggatttccaatgactgacctcaccgccaccggcctgccgctcgacaatactgccgacaccgcagcggaacagtacgacccggcgcacgattaccacgcgctcaacgcgatgctcaacctctatgacgccgacggcaagatccagttcgacaaagacaaggccgccgaacgcgaatacgtgacagggcacgtggccaccaacagcaagcggttcgcctccaccgccgagcgtctcgaatacctgatcagcaaccagtactacaaccctgcggtcttcaaccagtactccgctgaattcctcgaccgcatctacgagcacgtggaatccgccggctttgagttcggcactttccttggtgcgttcaagttctacacgtcctacgcgctcaagacgttcgatggtcgcctctatcttgaggacttcccgcagcgttgcgccgctgtggccctggagctcgccgccggcaatgagcagcaggccatcgaatacgccgacgaaatgcttgccggccgcttccagcccgccaccccgaccttcctgaacctcggcaaggcccagcgtggcgaaccggtcagctgcttcctggtgcgcatcgaagacaacatggagtcgatttcgcgcggcatcaacgcggccctccagctctccaagcgcggcggtggcgtggccctgctgctgagcaacctgcgcgagctcggcgccccgatcaagcacatcgagaaccagtccagcggcgtgattccggtcatgaagctgctggaggactccttctcctatgccaaccagctcggcgcacgtcagggcgcgggcgcggtgtacctcaacgcccaccaccctgatatcctgcgcttcctggataccaagcgagagaacgcggacgagaagatccgcatcaagtcgctggctcttggcgtggtgattccggacatcacgttcgaactggccaaacagaaggcccagatggccctgttcagcccgtacgacgtggagcgcgtgtacggcaagccgttcgccgacatctccgttaccgagcattatgacgagatggtggccgacgaccgcatcaagaagacctacatcgacgcccgtaagttcttcaccaccatcgccgaactgcagttcgaatccggctacccgtacatcgtgttcgaggacacggtcaaccgcgcgaacccgatcgaaggtcgcgtgaccatgtccaacctgtgctcggaaatcctgcaggttcaggagccgagcgcatacaacgaggacctcacgtatgcgcatgtcggccgcgacatctcctgcaatctgggttcgctcaacatcgccaaggcgatggatggcggcttgggccacacggtggagacggcgatccgcgcactcacctcggtggccgagcacaccagcatcaacgcggtgccttcgattcgccgcgccaatgaggagggccacgccatcggtctcggccagatgaacctgcacggcttcctggcccgcgaaggcatccagtacggttctgaagagggcctcgacttcaccgacatgtacttcatgaccgtggcctaccacgcctaccgtgcctcgcacgcgctcgccgtggagcatggccgcacgttcgccagcttcgctacgagcgactacgccaagccggccggccagggcaactacttcgacaagtacaccgatggtcgtcgttcgctcactccgcgcaccgaacgggtccgtgcgctgttcgaacagtacggcatcgcgatcccgactgcggccgactgggaggccctgcgcgacgcgattctgaaggacggcatttacaaccagaacctgcaggccgtgccgcccaccggctcgatctcgtacatcaaccattccacgagctcgattcacccgatcgcctccaagatcgagattcgcaaggaaggcaagatcgggcgcgtgtactacccggccgcctacatgaccaacgacaacctcgggtactacaaggacgcctacgagatcggctggaaggccatcgtcgacacgtacgccgaggccacccagcacgtggatcagggactgtcgctgacgctgttcttcccggacaccgccaccacccgcgacctcaataaggcccagatctacgcctggcgcaagggcatcaaaaccctctactacatccgcatccgccagcaagccctggaaggcactgaagtccaaggctgcgtctcctgcatgctctgatcgttcgagggagcgtataccgcctttcttcggcactcgacgtaccttcgtgcgccttcggcctcagacggcggtctccgcacgcattgaacaaccagagagccgttgttactcccctcactcggctaacgccgacagctcccctcagagaggggagctggccgcgaagcggactgagggggggctccaccatctaaggaaccaacaatgtcacgaaccatctatagagcactgctccggctgaccgcgccggaggagttcgaaaacaagtccaacgacgataacgacaacgacaacgacaacgagtaataaggaacactcatggcacctatctccattccgcgcaaaccgctgaaactcatcgaccgcgtctccgcaatcaactggaaccgcctcgaagacgagaaagaccttgaggtctgggaccgcctgaccggcaacttctggctgcccgaaaaagtccccgtctccaacgacatccccagctggcagaagatgaccgaggacgagcacacgctcaccatgcgcgtcttcaccggcctgaccctgcttgacaccatccagggcacggtcggcgccgtctccctgattccggacgcgctcaccccgcacgaggaggccgtgtacaccaacatcgccttcatggaatccgtgcacgccaaaagctactcgtccatcttctccaccctgtgctccaccgaacagatcgatgccgcattcgactggagcgagaacaacgagtttctgcagaagaaggcggaaatcgtgctcgactactacgagggcgacaacccgtacaagcgcaaggtggcctccaccctgctcgaatccttcctcttctactccggcttctatctgccgatgtacttctccgcgcacgccaagctgacgaacaccgccgacgtgattcgtctgatcatccgcgatgaggccgtccacggctactacatcggctacaagtaccagaagggcatcgcccagctgagcgatgccgagcgcctggatctgcaggactacacgtacgacctgctcaacgagctgtacgacaacgaagtggagtacacccagtcgctgtacgaccgcgtgggcctgaccgatgacgtcgagaagttcctgcggtacaacggtaacaaggcgctgatgaacctcggctacccggctttgttcccggctgagatttgcgatgtgaaccccgcgatcctggccgccctgagcccgaacgccgacgaaaaccacgacttcttctccggctccggctcctcctacgtgatgggcaaagccgaagaaaccgatgacgacgactgggatttctaagggtttcgcggtccgcgaacccgcagcgccgccgcgttcgcacgacggcgctacgctggaggcatggaacaggagccgttggtcagcatcatcatcccggtatataaggtcgagaaattccttgatgaatgcgtgaagtctgtggttgcgcagacctatcgcaacctcgagattctgctggtcgacgacggctcgcccgacaattgcccggccatgtgcgacgcctgggccgcccgcgacccgcgcatacgcgtgattcacaagcccaacggcggcctgtccgacgcccgcaacaccggcatcgccggggccactggtgcgtacatatacttcgccgattccgacgacaccgtggcccccacgttggtggaggactgcctgaacgccatgcgcgagtatgacgccgacctcgtgatgttccagttcgacaccatctccgagaacaacaagccgctgctgtccaactatcgccacaacgacttcaccgaggtgcagatcctgaccccggtcgaggccatcaaaaagcaggtcaaggctgagatcgacggctatttctgggccttcctggcacccgcctccacctatcagggcaccggattctccttcccggtggggcgcaaaatcgaggatctctcccgtatctgcaacgtgatcggcgaggccacgcgcgtggtccgtctgcccaaggcgctgtaccactaccgcatgcgcgagggatcgattaccgccaactgggatccgcagctcacccgcgactggacccgcgccgccgacgaccgcgaggaatacatcgtccaccgattccccgagctcaagggcttcatgacgctgcaacagctgaatttctttgccaacctcgattacgagaccatgcgccagtcgctgatcgccggactcaagatcgatcccgaggacgccgacgcgcttcgtcgtcgcatcgagggcctgaccaagtccgccgatgagggcgatgagccagtaccggaaacgttgcgtgagttgctcggactgctcaagctgggcatcaccaaggtggccgatggcacgttcggtaaggccgatggcagcggtactgatgacgatgccgagaacgatgacgtaacgctggccgaccgtttccgcgacatgcgcgaggactggcgccagctgcgcatccagcgcatcgaaaacgccgaggagcgcaaggccgagcgcaaagccgcccgcaacggcgtcaccttcgagtctgtgttgcattagtcggcgactgatggaatccgtcagttcgggaagagcaggcctgctctacgccgggcgtgccggttcgcacgttcgagaaacaggtgtgtcatgggccgaaccacacaacacccccagaaacgcccataaagttaactacattttcagacacgccacttgccttggtccacggtccgtgtatagtagttctcggctcaacgaagagaaccttcactgaaccggaaaaaagtaaacgctgaagcttgcagtttccgaaagcaaagttgtacgtcggtggcgagggcggaagcgcagtaaagaacaaatccctttacaacggatcgtgaggcacgtacctgcctctgaaaggattagtaattatggcagaagtcgttttcgaccacgtcactcgtatctacccgggcaacgataagccctccgtggatgatctgaatcttgatatcaaggatggcgagttcctcgtcctcgttggcccttctggctgtggtaagtctacgacccttcgtatgctcgccggcctggaggaggtcaacaagggccgcatcctcattggtggcaaggatgtcaccacgatgcagccgaaggaccgcgacatcgcaatggtgttccagaactacgccctgtacccgcacatgaccgtggccgacaatatgggcttcgctctgaagatcgccggcactccgaaggaagagatccgcaagcgcgtcgagaaggccgctgagatcctcgacctgaccgagtacctcgatcgtaagccgaaggctctgtccggtggtcagcgtcagcgtgtggccatgggtcgtgcaatcgtccgtgagccgaaggtcttcctcatggatgagccgctgtccaacctcgacgccaagctccgtgtccagacccgtacccagatcgctgccctgcagcgccagctgggtgtcaccaccctgtacgtgacccacgatcagaccgaggccctgacgatgggcgatcgcatcgccgtcatcaagctcggtatcctgcagcaggtcggcgccccgaccgagctgtacgatcgcccggccaacgtcttcgtcgccggcttcatcggctccccgtcgatgaacctgaacacccacccggtggtcaacggcaaggcgaagatcggtgaggacaccgtggacctgccggctgaggccgtcaacaagctcaccgccgaagacaacggccagatcgtggtcggcttccgtcctgaggacgctggcctggccccggctgacgacccgaacgccttctccctgaaggttgtgaacgtcgaggatctgggctccgatggctacatctacggcaacatcgtcaccgatggctccgccgctgaggcctcccaggtcatgtccgaccagaacaagctcaccacgattcgtgtgaatccgcgtgcgctgccgaaggttggcgcgaccgtcaagatcaagatcgacccggccaagatgcacctgttcgctccgtcgactgagctgcgtctgaactaatagatacttggcgaggtctaatcgcttcgtcaaccattaaacgaggttattctcttcctctcttatggcctcgttggaaaggccctgcatagctgcggggcttttctttttgccttctagacggtctgagggagagaccaaacggtgttttcccgtaaacataacgcgccgaagtcgtggccaaggagcacacatcgcgaacgacacgtaaaatcgaacacatggagttgaacgaattgccccagatggatccgcgtgcgctgaaggccacgtctgtcaaagccgaagacgaacacgccgattcagcggaaccgcaagcactgaaaatcaccgccgccagctcgaacccaaagatgttcacgctgccctggcacaagcccttggccacctggcctgaggacctgctggccaacctgccgcgaggcatctcccgccacgtcgtgcgattcgtgcacgtgggcgacgaggtgtacgccatgaaggagatcacgcgccaggtggccgagcgagagtacgagatcctgcgtcgactgcagaagctcgaactgccaactgtgaccccgatcgccgtggtcaccggccgtcacacccgtgaaggggagccgctggaggcgattctggtcacccggcacttgaagttctcactgccgtaccgtgcgctgttcgcccgcaacctgcgcccggacaccgccgaacgactgatcgacgccctcgccgtgctgctggtgcgcctgcacctggccggcttctactggggcgatgtgtccctgtcgaacgtcctgttcctgcgcgacgccgacgctttctccgccttcctggtggacgccgagaccggtgacctgcaagtccagctcaccgacggccagcgcgaatacgatatcgacttggcccgcaccaacatcatcggcgaacttatggatttggcgtccggcaagctactgcccggcgacgtggatgagatcgaggtgggcaaccgcctagtcgaccgctaccactcgctgtggagcgctctgaccgacaccgacaagttcaacccggacgaaatgtggaagatcgagcagcgcgtcaacaagctcaacgagctgggcttcgacgtggacgagctggaaatgaagaccgccgaggacggcaagcgtgtgctggtccgcccgcgcgtggtggacgccggctacgccaaccgcaagctgctgcgcctcaccggccttgacgtgcaggagaaccaggcccgtcgtctgctcaacgaccttgacgcctaccgtgcctccacgtggcgtgagggcgaggatctggaaatcgtggccaccgattggatgcgcgaggtgttcgagccgaccgtgcgtatgattccgcgcgaatatcgctcccagatcgagcctgctcagttcttccatgaggtgcttgaccatcgctggttcctggcggagaaggccggccacgacgtgccgatgggcgaggccgtgaccagctacatcgacaacgttctgccgagctacaaccttgattccaaggcactcgccgaacttaacgaagaggccgattccggcgtcattgacgacgaatccacctacagcgacccggacgacgacggctacaaccccgatgacgatccggatgcggcagtgtggagtcattaagcggacaatccggtggactgtctgtaggtgagcccatcacacaaagaagcccctcaaattgaggggcttctttgtgtgtacaacctattacggcctcaagcgacaatcactccgccgcagccttgcgccgtgcgttggacactgcgtacaggctgatacccgccgccactgaagcgttcagcgactcaacagacgagctgatcgggatgccggcaatcgcgtcgcaggtttcgcgcaccagtcggcccaaaccgctgccttccgaaccgagcactacaacgagcggatcggattcaaagccagtctcgccgacgagcttatcgccgccaccgtcaaggccgacaacgtagtatccacgctccttcaagccctcaagtgccttagtcaggttcaccacgcgcgccaccggcatatgcgcggccgcaccggcagacaccttccaagcggcggcgttcactgaagcggaacggcgttccggcagaatcacaccattggcaccgaatgcggccgccgaacgaatcacggcacccaggttctgcggatcggtcacgccgtccaatgcaatgaacagcggtcgcgcagcaatacgggcggccgccgaattcgcggcctccattgccttggccttcttctcagcacgatcggccagctcgttcagcgaggagtactggaacggatcgaccttcagaatcacgccctgatggttgccggagcgggcgatacgatccatctccagacgatcggcctccagcatgtgcaggccgttcataccagcgattttcacgatttcgcgagtacgatcgtcatgttcaatacgagacatgatgtacagcgtggaagaaggtacgcctacgcgcagtgcttccagcacggaattacggccgtacaccagatccgaagtatccgccgaagcgaacttgtccactcgacggcgggctgccagacgcgggtcggccatctgccgacgttcggccgctttcttggccttatacgccttgtgatagacgcggtcctcggctttgggagtggggccgtaacccttcagtttgttgcgatgcttgccacccgaccccttggtcggtccttttttgatagccataggtgctattgtcccagcaccccgcgccaaaacgcggctattccgccgtcggtagccggtaaggtattgagagtgaagaagcagcgcatgatattcggactgtccctgctgtattggggattatggttggcgattctgattctgtggatgggtcgcttcgtgacctcattcttgtcgatatatttggtttccgcgctgcgcctcgatgagggtgtggtgggcacagtcgtggccatgtacggcttcggcgcaatcatcggctgcctgttcggcggtaccttgtccgacagattcggccgccaatccatgattatcatcggcgaaatcggcgcagcggctgccctgctggtcgtttccgtgctcactgaccccgtggctttaggcgcggccctgtttgtctatggtgcgttcgcctcactgcccagcccggtcatcgccgcgtatatcgcggatgtggtgcccgccgaacgtcagcaacgtgcgtacgtactgcaatcgtgggcgattaattttgggtacgcgattgggccgattgtggccaaccagctggtcaagatctcgtattcgctgatgttctacgttgaagcggcggtgatgatagccgtcacgatattgctgattgcgttcttccgcgaggtgcggcatttggggattactgtatcggtgccaagtgcggtgcgccatgaagacgaacgcagtgttacgcatgcggaattcgccggcgtcgaggggccgaatcactcggatgccgcaccggctgccagtgccaagggctccatgtctcgcaattggcggcgcgtgctcactgatacgccattcctcggcttctccctgctgatgttcggctacttccttgtgtacttccaaagcacctccggcctgcccattgccatgacggaccttggtctagggctgggcgagtattcggtgctgctcaccatcaatggcggtatgttgtgcctgctgcagattcccgcgatgaaactgttctcgcgcatgggcaattcacgcgtgctggtgatgggcctcgccgtaaccgtcatcggctatgcggtgcaggccgcggcccattcctggggcggattcgcgcttgccgtagtgctgtggacgctgggtgagctgggcacattccctatcgccaccactacggttgccgccatggcacccgcgtcggcacgcggcacgtaccagggcgtctacaacgtagtgtggtcggtatcgattgcgctggcgccgctgattggtggctggaccatcagcaacttcggcggtcgaacgctgtggatcgcctgcacgatagtcctgatcgccgtaaccctcggtctcaagctcaccaaaggcttgcgcgaccgcgccatggccgccaacctgcgcaatgcctcacagtaaataattcccgtcaagaaaagtgtgaggcatccgaacttttccgcacaatcaaacatggtccgcaacggcgggatctcactgatatgacgctctgcatgtgcgattgaggcatcgtaatcctcacgcttttcttattgagaatcattctctgcgatacgttctagaatcatcacaagcaatgcgccatatacaacggcagatataggcggtctccttcaacgcgcattggtctaggatgcagcacatattgcatgccgacccggctgtcgaatttattcttgaacttatcgagcgatgaggttttgtatctctttgtcgatttgacctccacggggcagaccctggccttcatggcggcatttgaatactccccgataaggagaaaatcaatttccatgcggtccttcgcctgacgggaatatcgggaatagaagaacaggcgatggcctgaggcccggagctgctgcgcaacgacattctccaccagcatgccttcattcacttccagcttgccgaacaggatatcgcggtacaactcattcgacgtgtatgagcggtcggcaaacacttgcgttactaacaagccggtgtctcccatatagcatttcatcgtggagtcctcttggtgtaggcgcaggcccacatgcggatccgtggcattcatgcagcggttgatcaggaacgattcatccaaccagaagaaagcatcgccatattcacgttcgcgtgcgttttcgcctaaagacgacagtgtgaacttcttttcatgcttggaaagttgccttggaatttcatcgaagatacgtttgacccgttctttcgaatctccgccgtatttctttatgtcctgagcgtacaggtgcaaaatttggcgtttcactcgatcgacattgcccatatcggatgttcccagataacgctctacggcctgcggcatacctcccaccagcatgtattcacggaacaggcgttccgccttgttgtccagcagcggagacattgctcgcctgtccgcaaaagattgccgtatcgcatcggcgagtagttcttctcctctggcccatagaaattcctcaaaatccatgggaaacatgctcaccgattcttcctcggagggaatcaagatgttttcgacattcttcttaatggagatcagggcgccagtctccatgaagtcatatcgaccatccgcaacgagttgtttaaccgcgctgcgggcaaaggggaagagctgtacttcgtcgaaaataaagagggtgtcacgctcatgcaggcgtacgccgtaatagacggaaaggtccatgaacagcgtgtccaaatgatccagattgttgcggaacgagtctcgtaccgcctgcggagccttctgccagtcgataaggatgtatgagcggtattcgttcttcgcgaattcctcggcgacggtgcttttgccgacgcggcgggctccttcaatcattaacgcagtagtacccttgctcgctgctttccatcgccgtagatggtcgtatacttttctcttatacatgttaagctcatattcctagtattttcaaggatttatgagctattatatcacgattcctaagttatataatgccgtaaaactcactattcctaggttatgaattgctttgattctcacgattcttaagttatataacgaggcgcgattctttggctatgtggccgacaacagcgaggagatggaaccggaccgcatacgcccggccatcctgattttgcctggtggcggctacgccgtgacctccgaccgcgaagccgagcccgtggagaatacgctaatgctcatccaggcctgccgggccgccggcgtgagcatcgaagcacacctgttccccgaaggcagccacggcctgtccctggccaatgcggaaaccgctggcaacggcttctatgcgcacatcgtcgaatgcgtgcagtgttggcctgatttggctgaagcctgattgcgtcgcctgttctaggcaaaacgctattacgctgtgcgccaagtgcgccacgcagttatggaataatagcaatcgtatgcatcggcagcagttgcgccggtgtccataaccgcgcagtcctgtgcgtccagccgggagagaaaacccggcagcggccgcaaggctgactactccgcggcaataccaaggagaacattatggatgatctcaaagatcaatccgcagtgtccgcgaccgcaacgaacgaggtcgtggaatcggaagaagtgcgcgcgcaggaagcgctattgggggaagctgatccaagtctgaccagtgccgacgacgtggccaaagccctgaatgtcgacccatcccagggcctgagcgaggaagaagccaagcgtcgactggccaaattcggcccgaatgagctcgccaccgccccgcccgtaccgaaatggaagaaattcctggcccagttccaggacccgctggtctacctgctgatcgcggccaccatcatctcggtgatcgcatggttcatcgaaaaggccaatgcgcagcccggcgcggaaggcggtgaagtgctgccgttcgacgccatcgtgatcattttgattctgatcgtcaatgccgtgctcggctacatgcaggaggccaaggcggaggccgcggtcgaggcgctcgcccaaatgacggccccgcagacctcggtgctgcgcggcggcaaagtcatgcgcatcaacaccgccgacgtggtccccggcgacatcatcgtccttgcggaaggcgactcagtctccgccgatggccgactggtcaacgcggccagcctgcgcatcgccgaggcttccctgaccggcgaatccgtgccggtcggtaagaagccggacacactcaccgaagccaaggcgctgggcgaccgtgccaacatgatcttcaacggcacttccgtgacgcaaggcaccggccgcgcaatcgtgaccggcaccggtatgaacacgcaggtcggcaagatcgccgacatgctctccgccaccgaagatgagaaaaccccgctgcaaaaggagatggattacgtctccaagatcctcggcattgcggtgtgcgtcatcgctgtcgtggtgctggtggcgctcgccgtgctggaaggcttcgacgacgtccatgacgtgattgattccttgctgttggccgtctcgctggctgtggccgccgtgccggaaggcttggccgccatcctgaccgtggtgctggcgcttggtgtgcagcgtatggccgcgcacaacgccatcgtcaagaaactgcattcggtggagaccttgggctccgcttccgtgatctgctcggataagaccggtacgctgacccgcaacgagatgaccgtggagcgcgtggtcaccccgtccggcgcagtgcagatcaccggcaccggttacgcgccggaaggccgcatggttatgaccggtggcgtcagtcctgaatccgagcaggcccagattgtggccgatgaagtcgtcgccacgcttgtggccggcacgctcgcgaacgacggcgaactacgcgaggagaacggccgctgggagatcgtgggcgaccccaccgaagtctcgctgatcgtggccgcacgcaaggtcaaggccgatcgcaagatcacgcgatacacgcgcgtgggcgagattccgttcacctccgaacgcaagcgcatgtccatcatcgccaaggacagcaccgattcagacaagctcaccgtgttcgccaagggcgcgcccgacgtgctgttgagctactgcacgcgcatccgcgtgggtggtcaggtccgtaagctcaccgaaggcgatcgccagtcgattctcgccaccgtcgaacgtctctcctccgaggcctaccgtacgcttggcgaggcctgccgtccgctggaaaccagttctttggctgatgtgcccggtgtaagcgtcaacgccgcaggccaggtgtccgacatcgccgatcaggccgaagccatcgaaaccgatctcatctggaatggcatggtcggcattatcgatccgccgcgtactgaggtgcgcgactccgtgaccgaggcccatcgtgccggcatccgcacggtgatgatcaccggcgaccacccgctgaccgccgcccgcatcgcctccgaccttggcatcatcgccaaggacggcaaggccctgaccggcgaccagctcgaccagctgcccgatgaggccgcactcgacaaggccacgtccgaagtgtccgtgtacgcgcgcgtggcccccgagcacaagctcaagatcgtcgaatccttgcagcgtcaaggcaacatcgtggccatgaccggcgacggtgtgaacgacgccccggcagtcaagtccgcggacatcggcgtggccatgggcatcaccggcaccgaagtgaccaagcagagcgccaagatgattctggcggacgacaacttctccaccattgtggccgccgtacgcgagggtcgcgtgatcttcgacaacatccgcaagttcctgcgctacctgctgagttccaatgtgggtgaggtgttcaccgtgttcctcggtgtggtgtttgctggcttcctcggcatccgccagccggaaaccgtgggcgtcaccgtgccgctgctcgccacacagttgctgtggatcaacctgctgaccgatgccgcgccggcgttggctatgggcgtggacccgcagaccgacgatgtgatgggtcgtaaaccgcgtaaggtgacggaccgcgtgattgacgcctccatgtggggcgacatcatcttcgtcggcgtcattatggccatcgtcacgctgattggtatggacatgcacctatccggcggcttgttcaccgaccgctcggtggatgccatcggccatgaagcgcagatgaccgaggcccgtacgatgggcttcacgattctggtgtttgcccagctgttcaacgcgctggcctcccgttcgcatctgcagtccgcattcgtgggtctgttctccaacaagtggctatggggtgcgattggtttgtccgtggcgctgcagctcgtggtgatttacgtgccgttccttaacggtccgttcggcaccgtggcattgagcccgatggcttgggtggaatgcatctgcctggccgcaatcgtgctgattgcctccgagctacgcaagattgtgctacgcgcgatagccaagcgttaagccatcgcaatagccctgattgtgggcatatagcagtgggccgggctctggtgttcagggcccggcccactgctatatccaaacggctcctcatggggcggtgattatcccatggggcggtgattatcccatggggcggtgatttcctcatggggcggtcgctgaaaacggcattattccgcgaaaaaggaaaatgcgctaaccgccccatggggaagttaccgccccatgggaaacgggagaacgctgcagacctcagttgttgctgccgtcggggccgtcagtagaggtggacccgtcttgagacttctgctgtgcctgctgcttggccttctgctgtgcctcttggtcggccttctgccgagcctcttcctgagcttgcttggcggcatctgcctgctgcttggcctgtatcgaggcggtgacgtcggactcggccttctgcagtctagaaatcgcattgttgacgtcggattcggacggactggtcccgttcatcaccgtattggcctcggtgatggcgttttgcagcgcggtgcgggtgttctcatcggccacactgcccgcggaactatccagtgtgccctgcgcctgcgaaatagccgagctcaggttcgatttcagtgtgtcggtatcggccgtcgcctttgaagtattaacggccttgatcgcattgttgatggcatccgtcttgtcagccatgtcgctggcgtcattctgcagctctttagtgtgagacttcagctcagtggcgttgaggctggaatcgcacttggcggtgtcagccggattgccggcgtcttgcaacgcctgattcagcgtggtgagcgtattggcatcggccacatcgctggtggatgtttgcgcgctggtttggccattggatatggcggtggtgagcttcttctgcgcattcgtgtactgcttggccgctaccttgcactcggccagtgccacggcttggctcgccttactgctgttggaatgccaccagagcaggccggcgacaaccagcgctatcacggcgactaccgctacggcaatgccgacgattttgagggtgttctttttgccgctaccgccgtgacgaggctcggcgccatcggaatcgtcctcatcggagacctgagccaacggaatggagggaggcatcacagcaggctgagcctgtgccgaagcggccagggcggccggttggaacacctgtgtggctgcagcatcatcggcagacgctacttgcgttgccggcatggcaacggtctcaccggatacggtggatgatgcgccgtatgcctgtgtggccgcagctgaattaggccggaatgcttgtgttgcctcggcatctaccgcaggctgctcggcctgattgggttggaacgcctgtgtcgcggcgtttgaagctaccgaaacaggcgatgtcgccggtgccgctggtgcggctggcgtcaccggcgctgtcggttccaccgggcggaagctttgcgtcgtctgatcccaaacgtattgctgctggccgggcgcagcggcgattggtgtttcggatactactggctgcgtggctgccgccggctgtggtgcttgtgcggcaaccg

SEQ ID NO: 1618 - DNA, 23483 bp, Unknown
  R221_24m  MAG No. k141_66110
caggatcaaggtcaccatccgcatggcctacggcttccaccacgcgaacaatcccatcgccctcgtcatgctccgccgcggcggactcgacatacgcccaccacaaccaagaacccaacccacgaaaacagcagaagcctcatatgtattggacatttctgcgcagagagggaggtgtaaccgcagcattacggtgtgagaacgcaaggttacatagctgggcattggctgtggcgttgctggacattgaccgtcgagccggcaatcatggcgcaagcgacaatcacgacacgccgttattgacataccgccgttcaatggtattgtaattacttgtgcgcttttgaagcgtatggatcgggcccgtagctcagctggttagagcgcatccctgataaggatgaggtcggaggttcaagtcctcccgggcccacagaaaaaatgaagcggctgcgagccgctctttttttctcacggggctatagcgcagctggtagcgcatctgctttgcaagcagagggtcgccggttcgaacccggctagctccacagacaacccttggaataataccgattctgagggtttttgcgttcttgttcgagggattctcccagtccgccatggccctctccatcgaaaaaggggtggtcctgttaaggaccacccctcgaggattcagaccaaccgcgtggtcattgtcgctccgtcttcacggaacggtacacgaaaatccttcgccttgcggcgatatcgcccggacccggaggactacaccttcctctcgggtggaaggtaccggcagataattggctcttccggttttggtgtgtaggggggatgcttataggtgggcttgtatggtgtgtctgaagccgccggtgtggaggaggctgcgggtcacgccaaaaccggaagagccgttttcttttccttctccggtggtttcgtcgttgaccgtgttgccggtggcttccttgcaggcttgtttgtaggcttcggctgggctggtgtggtggagggcgcggatgcgtgcagcggcgtgttcgatgtgttcgagcgtggcggatggcgcgtcggtcaggccgtggcgggcgaggacttcgttgcgccacgagtcgtagcgttgctcgcgcaccacgcgtggcttcctccgccccctgacccatgcgtcggcgtacgcccaatcgccttcctcgtagatgtcgcgtgcccaggacgccgtcggacggtcgaacgggtaggggcccgccggcagcggcaacttgtcgaccgtcgggtcgaacacagtgaatcgtcgccgttccctcgcttcgcgttcccgttccggcgctgccagcgcctccgcgacgtccgagtggaacgcggccatgcgctccttggcgccggaggacgtgaacccgtcgtcgggttcgcgcagtccgtgctcctcgagcagcgggtggatgtcgtggtccatgagccagcggagccgggacatgttgaacgcgaggatgaatgcgagcgagattgcgaccatgaggcccatcccggcccccatcagcagtgtgctcatttcagccggctccagcgttcggcgcccgcgcgcgggctgaaacgtccccgccagtcccacggtccgacgaaacgcaaggccaacagaatcggggagcatgtggcgaggaacgcccagaagaaagccaaccatccaatccagtcaggtgtggatctgccggtgtcgacccattgcgcgctcgaccagaacatccatgtcatcgctatggggaagcccgatatcgcgatgaggaacagcgtgccgacgatggggccgccgaacatgtagcgcagcttcgtggcgggcacggaggaggcgaatgccaagtcctccagcgaggcggggacgtaggtgttcggccggccgaacacgagccggcagaaaccccagtacaggaggagtccggccagccacatcacggcgaccgccacgtacgtgttccatgcgtcgcgggatatagtgaccggtctgagaaaagccagcagcgtcacgtcatcggtatgcgtgtggtgcgtcttcgtgtccggggtgagcagccgggcgatgccgtggatcatgaccatcaggccgggcgcagccgcggcggcagcgccgccggccgccgcgccagcccgcgcccagccggaatcgccgccgaaatccagcttgcgcttgaccggcgtcttctccagcgtgtcccagaacacctgcgccccgtcctcaagacgccccaccaacacataccgagtgaacaacgccaacagatacccccacttccaaaacccgagattatccttgaaatgactgcccgggtcatctccaccgcctctgtgcacctgattgtcgtaaagtgcgtctaagccgctacttatcagccatccggctccagtgccaatcgccgttccgacaaatgcgccgaccacggtgccggcaccggggacgatcgatccgacgaccgcgcccacggcaccgccaacggtcccaccgaggccatcaacggcaggcccgagaccctacgcggcatcgccctcggcttccgcaacctcgacaactacgtcacccgcagcctcctccacaccggcggcttcagacacaccatacaagcccacctataagcatcccctctacacaccaaaaccggaagagccggatgattccctgcaagccgatcacgccaatccgacccgacgactaatcagattgaggacggctgaattaagcttgtgccctcatgatacaacatgtcctgcgaccgacgccagacacaacggcagcattctgcccaccatagggcgtgtctttaaccagaaagtaccctcaaatacgttcagcaagatatatgcacgcagaacagcccttccgcattatcttatttgacatagagcatgccccttccattccacagaatcaagcaaataaacgagcggagagactggacacaccgcaaaacaatggcccaacccctccgctcgtttgttatggaaggaagagggatgaataagtatgtttacttcactgacttgatgaagacgatcagcaccgcgccaatcagcgagcagaccgctgcaagcgggaagagtgcgtgatagcccaccgaggaaattagcgccgccgcaacatcccacgcaccatattcaggacaaatccagtccgttgttgtccttggctttgctcaccatatcagtcaaatcggggtcgttcacagacaccgcgttctgctgactgagcgtcaacgatagcgagccattataggagtcgccgtcttcgtccttgccggacacgcttatggcaatcgaattcatcagacgctttctgccgtagttcagatccacggtgatagtcggcatctccggctcttcatccgtgccgaaatcccagttgcgcacattatcgagcgcctgacggtactcatcttcagcatcgtccacgccggcatcctcgatttgctgaatcacccaggatttcagatgcggatactgcgcttcatgactgatccagtaattcacgaaatgctgagacaacgctttgatatcgatttggtacgacagctgcgtattgccggcagacttggcagacgatgtcttcgggaacagctggctgcgcacattcttatcttccagctccacgccgaaatattgttggatgaatttgctggcctcggccttcacctcggcagaccttttcgtgcccttggcccggtcgatgtcgttcgagtacccatcgtcgttcatcttgtccagctgatcgtagaacgtttgctccgcgccggtgatgtcccaagcaccgttcttgaccaacgcatccttgacgttcaatatcaagtccgccacatcactaccaacgccgttccttaagtcatcttcatattggtcggccgggcagtagatgtagtaggggtcgtcgtcatgccaaacgaatttctcggcgaatgcgcctttgtaccaagcgaaggtcgttgcatattcgtctgttttgctagtgaaggacgcggaggattcgttggtggttttgcccagcgaatacatgccagacatccgcacgtcaagagaatcgtcagtgatgctgtgggttctgagttcgtatttggtgctgcgcagagtggacagcgagttgatcgcgtcgaaggtgacgaccagcggattggtgggccggaagcccagcatcgctttgacggcggtgaagttggggatgatgaacgccaaggccgccaccagaatcgtcgcaagcaatgcgcagaaagcggcgatcagcttcttgctggatttgcgctgcggtgccaggacggcggttgcatcagtcgcctgatatgcggcaggagcgggaatcggcaaagccggcaggggaacggttggtgccggctgtggggcagcggacgcggcgtaaaccgatggggcaaccggcgcggctggtatcgatggtggtaccgcagacgccggcacagcaggtgccggtatcgacgcaggcggtacggctggcgatgcggccggtactggtgccgtcgcaactggtgcgctgtctacagacgctccacatgccgggcaaaatcgtgccggcccatcaactctatttccgcagtggccgcagtacgccatcgtgtgcctctctccctcaaatcggcttgattgccatcgcttcaatgttactcttcagcattacgcctcagccagcccctacgcgtaacgatacgagacgcggcagccttaatgcggttgttttgacgcgatgccaacatcgagctctggccaacgttctggtactcggctacatcttgctgcgagccaagaagcaggccatcgctcgcgccgacgaggccgaatggcggtctagcctcgctttaagcctcaggccagcacctccatggggtgataggtggcggtgtggtggccggtgatggggttccatacccgttcggcgaatgcgcgcagacgggcgacgccctcgcacagctcgtcggcatctccggcgtaggagaggcgcacgaagccgcgcccctcctcgccgaaggcctcgccggggaccacagccacgcgctcttcgtccagcagacggtctgcgaattcaccggagtcaaggccagtcaggcgtacgtccacaaaggcgtagaacgcgccttgcggttcgatcagacgcaataccgggcatccggccagaccgtccagcacgatctggcgcttggcgcggtattcctcgcgcatggcggccacgttatcttgcgggccagccagtgctgccacgcctgcgtattgcgccaaggagttcaccgaggagtgcatgagttcggcgattttgccggtctgttcgatgaccgcttcgggtgccagcaggtagccgatgcgccagccggtcatcgcataggttttcgacaggctttccaccacaatggtgcgctctttcatgcccggcaccgcggcgatcgatggtgccacggctgcctctcccccaagcgtttccccgaacgtttccccaaacacgaacggatggtaaacctcgtcggagatggcccaaatattgtgctgcttgcatacttcggcaatacgcgccagttcggcggcagaggttaccgcgccggtcggattgcccggtgagttgatgattacggcgcgggtgcgcggggtgatcgccgcttcgatgtccgccgcgttcacgcgcatgccgtgctccggacgcagcgccacggtgaccgggcggccgccgcacagcatcacttcggcgtcataggaagtgaagaacggcgagggaataatcacttcatcgccggtgcccaccacggctttcagcgccagaaacaggccaatcgtggcaccgtcaacggcttgaatctcggtttcgggatcataagtaagtcccttcacacaggcggagtaatcggccacggccttgcggtattcggggatgccaagcacgttggtgtaccgagtgcggccagcctgtgcggcctcgcaagcggctgccacgatatgcggcgcggccgtggcgctgggctcccccacggtcagtgaaatcgcgtcaggcacgcgctctacacggtcgaatacgtctcggatgccggagcgcgggatattcagggcttcggcggacaggctcgcgggctcggcggtcggcacagcaacccgaccggcagcaggcatagtagcaggcgcagcagcagatgcaacttcggacagagacatgttggaaaacttctgcatatcatccctcctcaatggaattatttcatcgttctcttatttcaaaaggaattattacatccaattaggactttaaacgtaaacattccaccacacaacagaaaacacaggaagaactactgaaattaccaggcaaaatcggaaagccatcgcattccggcaacaggtacagtgaacacagagcacaacgaacggagaagacatcatgaccgcgattgacgagaccgaccagcgcatcctcaccatgctggaggccgacggccgcgccacgctcgcgcaactggcccaggcgaccggactgtcagtctccgccgcccagtcgcgcgtgcagaagctggagaagcgcggcatcatcaagggatacaaggccatcatcgaccaagagcagcgcggcttgcccatcagcgcgttcgtcaacgtgaccccgctcgactactcagccgaatcctcgattccggacaagctgaacaatatcgacggcatcgtctcctgctattcggtggccggcgcccccagtttcgtgctggtggtgcgcgtggcttcccctaccgcacttgaagaactgctcaatctcatccaccgcacggtgccggtaagcaccgagaccacgatgattctgcagacctacttcgcacactgaccgcgaacccggtaacctgcgcgccgaagacctgcggccacacaccccacaaaccccacaggtcacaaaaaccatacgaccccacggtccagccacaccccacaaaccccacagaccgcacgatccccaacagacacatctgacatcacccaagtccgcctttatgtccactatatgaacgtgcctccggtgtgatgcggcttccatttcgacccgattcacgcatagacagacatccaacaatcgcccgaaaaatctaacaaacggaaacttgagccactccataaccacgccgaaagctttcccgttatccgagcgagactctatgcagcaagggcctgcgcgcatagaataaaaccgtcttaattccctaccaaatcgaggagaatcatgctcactgacgagtacatcaagcgtgtctacgaccaggtcgttgcccgtgacggcgatcagccggagttcctgcaggccgttcgcgaggtcttcgagaccctgcagccggttgtcgagaagcacccggagtacgagaaggccggtgtgctggagcgcatcgtcgagccggagcgcgccatcaagttccgcgtggcctgggttgacgacgagggcaaggttcaggtgaaccgcggctaccgcatccaattcaactccgccattggcccgtacaagggcggcctgcgcttccacccgaccgtgaccgagtccgtcgtcaagttccttggcttcgagcagattctcaagaactccctgaccacgctgccgatgggcggcggcaagggtggctccgacttcaacccgaagggcaagtccgacgccgaggtcatgcgcttctgccaggcctttatgaccgagctgagccgccacatcggccagttcaccgacgttcccgccggcgacatcaacgtcggtggccgtgagatcggctacctgttcggtcagtacaagcgcatccgcgacgagtactccggcgtcctgaccggtaagggtctggaattcggcggctccctggcccgcaccgaggccaccggttacggcgtgtgctactacacccaggaagccctgcgcgtgctgcgcaacgactccttcgagggcaagaccgtcgtgatctccggctccggcaacgtggccacctacgccgctcagaaggctgagcagctgggcgccaaggtcgtcaccgtctccgactccaacggctacatctacgacccgaacggcatcaacgtcgaggtcgtcaagcagatcaaggaagtcgagcgcggccgcatcaaggaatatgccgagcgcgttccgggctccgagtaccacgagggcagcaagggcgtgtggaccgtcaagggcgacatcgctctgccgtgcgccacccagaacgaggttgatggcgaatccgcacagaagctcgtggacaacggcgtgaccgtggtcgtcgagggtgcgaacatgccgtccaccccggaggccatcgaggtctaccagaagaacggcgtgctgtacggcccggccaaggctgccaacgccggtggcgtggccgtctccggcctggagatgagccagaacagctaccgtctgtcttggaccttcgaagaggtcgacgccaagctcaagtccatcatggaagagatcgtcgccaactccctggccgccgccaaggaatacggtcacgagggtgacctgatgctcggcgccaacgccgccggcttcgtcaaggtcgccaacgccatggttgcccagggcgtgctgtgacgcttgcctctgagcagtactaagcagtagcgtaatgcccttgcttcccgtgaggaggcaagggcattgctatatgtacaacgagcaacaagtgctatccccaaatacgtaagcccgataacaacttagcttccacctccataaccccggaactcaccaccgtcgatcagcacatggatcagtgcggctggaccatggccgacgtggtcatcaaagccatcaacggagtctcttcaccgcgcgtgatgcacctgaacaccgatttggtggtgcgtgagtcggcgtaattgccacgtggctgtcggcaggactctagataccgcgtcacaatcacccagtaatgcatcacgcagtgtataactcttccgcggaaacgaacaccattcgttcatcatccatgtagcgggttcgcgtggactcactcaccggattcttggtgaacagcataagccacgcattacctgcctgatagccgcggactaagccagcacgctgatggagcttttcaatagcctccgtttcgttgaatgaattacgccatttgcattcaccgaacagaatcgttttatcgagcgaatccgcagcaatcacatcgatatcggtttgctcgtgagcaatcggatcattgccccaccatttgccgaactgagtggcaacaaaggggaggttgcccatagcgttgtttcgaataagccattgcaggcaaatcgtctcaaattgttgaccaacataggtatcaaacgctggtccaaaagcgagtctgctcgtaacctcctcgctgatattaccatccaaaatgctcatgttgcgccccacaaagcggaaccaatatgcaaagaagggatcgctcaccacatacattcccttgcgcgatttactcggatcttcaccaaacggcacttttcgctcaattaagcgcaaatcgaccagcgttttcagatatgctccaatcgaatcagatccgacacccgcatgttcagcgataagctttggcgaggaattaccacccgcaatagattgcaatatcgaataatacgatgccggttcacgaagctcctgacgcaacagcatcataggttcctcacgcagtacgcccaagttgtcgaacatcaagcgcagcacattggattcaaagccatcggcttcctgtatacgggccagataatatggcgtaccgccgaaagtcgcatagtattggaccagttcttgcggagatgtgttcgttagaaattttgccgcatccgcatagtcgaatggcaggagtcgaatctgtgctgtacgacgcccgtatagcgggcttttacgccccaatacgtcgttttccatgaatccctcgttactaccggatagaatcatcgtcacttttgtggcgaggaatccatggtcaattgctatctgcaacatggagggtaatgctggctcggcggcagccgcataagggaactcatcgaatacgaacaccatacgttcgtcagtctgtgcagcacgttcagcaacaaacgataacgcatcagaccacccgccaaacgacggggtggaatccggcataccaaagaacgacaatgccgctcttgagaaatcttcaagattcatcttggcgctttgctgtatggccgtgaagtacagcacgcgtttatctttgacaaattcgtcgatcaacgccgttttccctacacgccgcctaccgtacagcaccaccatttcgaatgaatcactggtaaacagcttttccagcacttgtaactcgtgctctcgtgcgacaaacattgcagccctccgatccgcctaccgcccaataataagagtatcatggttaatgtaatcacgattaccttaattatgatactgataattgttgccctaccgcgaggaggatcttccttccgctgtcaaaacgaaagcccaacagtccagactgacgagcagcaacatcggcagatcaaccgctgacgccagccagcctgacagcacaaatcagcctgattgcaggcatataggcactagttagcgaaaccggctcttcgcattttggtgcgtaggggccgtgcggtttgattcggtgtgtgattgaaaaagtgaatgaaaccgcacggcccctacacgccaaaaccggaagagcccataaagtcccctcagtagcgccaacctgccagtcctttggcggaaccacaccacatagaccttcctcaacggcgccaagctgccacacgctggcagaccaacaccgctgtgtgcattctctgcgtcggcggcagtccaaaacttggcccagcaacgacgcttgctgtgcccagcgtcggcagagggccaagaattggacgcaaacgacacagaacacaccctcagcgtcggcagaactccaagatctgtaccgctgacgacggtaagccctccacagcgtcgtcagagatacaaaacctgtcccaacaccgacgcctgccacccccagcgtcgccggagtcccaagtctcggcccagcaacgacgcctacgaaccccacacataagaaaccgcacctccgatcatcgaatctgaattacttcagtccaacaaccggggtgcggttcactgaggggagttctgccagtatagctatatcagtcgtcgccgagcgtgacgtgcacgccgccgaccagcgagctgaccacgttgtagatcagtgccgcaatggtggccagcagggtgaagatcaccacttcaacaatcgagaagatggtgacgccggagaccacggtggtaagggacaacacgttcttgagatcgaaaccgcctgcatcaagaccggtggaagacacaatctgcgtaatctggctgaatacaccgaccacatcaagcagcacccatacgatcgcggaggcaacgacctgaataatcgccacggcgatggacagcatgaacgtcaccttggccacggaccaagcatccacgcgggtcagcgacaagctcatgcggcgagccctgggggcgctacggcgaggtgccggacgcacgggagtggcggcacctgaagaaggcaacgtggattcttccggatcgctggacacggagcgtgccacgcggggagcgtgctcagtaccgatcagcggctcgacatgatcgttctgcgtattgccgactgccggcggtatgatccggggctcgttgtcttcgagattctcgctcatcgtttctccttaacaggcttggcggtagcctctgctgtatgcgaggctaccagcttttcaggacgctgctcacgcctcgtccgcgttgttcacattctcgccggattgtgcggtctcggcggtgccgttcgccgcggcatcgccactgtcctcgggctcgtccttctcctcgttacgggcgatggagagaatcgtgtcgcccttgtcaggcttggcgaaggtaacaccctgggtgttgcgcccggtgcgcttgacctcgtccacgttggaacgaatcaccttgccggacttcatgatggccatgacctgatcgtcttcggacaccacgagcgcgccgaccagggcaccacggccctcgaccagttgcacggccttgatgcccaagccgttacggccctgcagacggtattcgctgatggcggtgcgcttggcgaagccctcgttggtcaccacgaacaggtccttgtcggagtcgccagggaccacatccatggccagcaggctgtcgtcgttacggaacttcatgccctgcacgccggcggtctggcggcccatcggacgcagctgctcgtcgtcggcctggaacttgaggctcatgccgagcttggagaccaggatgatgtcatcctcggcgttgcacagcgcggcaccgatgagctcgtcggcgttctcgccattctcgtcggccatgaggcgcacggcgatcaggccgccctggcgcggggaatcgtactcggccagcggggtcttcttgaccttgccggaacgggtggcgagcaccaggtacttggccacctcgtagttcgggatggacagcacggtctggatggtctcgtcgggcgcgaactgcagcaggttggccacgtgctggcccttggagtcgcgcgaaccctcgggcagctcgtaggccttgatgcggtagacgcggcccttgttcgtgaagaacagcagccaattgtgcgtggaggtcaggaagaagtgatccaccacgtcgtcctcgcgcagcttggtgcccttgatacccttgccgccgcggtgctgggcgcggtattcgtcggccttggtgcgcttgatgaagccggagtgggtcacggtgaccaccacgttctcttcggcgatcaggtcctcgacgttcatctcgccggagaacggcaggatcttggtgcggcggtcgtcgccgtacttggccacgatctcgtcgagctcatcgccgatgatcttgcgctggcgttccggcttggcgaggatgtcgatgtagtcggcgatcttgcgctgcaattcctcatgctcggccacgatcttgtcgcggttcatgcgggtcagcgtgcgcagctgcatggccagaatggcgtccgcctgcacctggtcgatgtccagcagccccataaggcccgtacgggcggtgtcggtgtcttcggaggcgcggatgagggcgatgacctcgtccagcatgtcgagggccttgagatagccctgcaggatgtggtcgcgctcttcggcctcgcgcttcaggtacgcggtgcggcgggcgattacgtcgagctggtggttcacccagtggcggatgaaggcgtccaggctcagcgtgcgcggcacgccgtcgaccagcgccagcatgttggcgccgaaggtctgctgcagctgggagtgcttgtacaggttgttcaggaccaccttcggcacggcgtcgcgcttcaagaccagcacgaggcgctggccggtgcggccggaggtctcgtcgcgcatgtcggcaatgccctggatcttgccgtcgcgcacggcctcacgaatggagacgacgaggcggtccgggttgacctggtagggcagttcggtgaccaccaggcacatacggccgttgatctcctcagtgttgaccacggcacgcatggtgatcaggccacggccggtgcggtaggcctgttcgatgcccttgtggccgaggatggtggcgccggtggggaagtccggtcccttgatgatgcggatcaggttttccagcagttcctcgcggctggcgtccgggtggtcgagcgcccagtggacgccgtccgccacctcgcgcatgttatgcggtgggatgttggtggccatgccgacggcgatgccggcggaaccgttgacgagcaggttcgggaagcgggccggcagcacggtcggctcctgggtcttgccgtcgtagttgggcacgaagtcgacggtgtccttgtcgatgtcgcgcaccatttccatggccagcggggccatgcggcattcggtgtaacgcatggcggcggccgggtcatcgccgggggagccgaagttgccctggccgtcgacgagcatgttgcgcatcgaccaggactgggccatacgcaccaaggtgtcgtagatggcgaaatcgccgtgcgggtggtacttacccatcacgtcgccgaccacgcgggagcacttgttgtagccgcgatcggggcggtagccgccgtcgtacatcgcgtagatcacacggcgatgcacgggcttcatgccgtcgcgcacgtccggcagggcacgctcgacaatcacggagagggcatacgccagataggactcgcgcatctcctgctgcaggtccttgcgctggatgcgttcgccggtgtccatcaggccgtagtcggtggtgtccgcctcctgcgggctcaacggctccatcgagccgtccggcgtgaactgctcgtcgccggtgttgttttcatctgccactgttgttcctttagttgtctaagtccgttgtgtacctccctctgacgagggaggttggaggattccgttacgcatcgatccaacgcacgttcttggcgttgcgctggatgaagaggcggcggggttcgacctcatcgcccatcagcatcgagaaggtctcgtcagccgcggcggcgtcctcgatgtgcacctgcttcagaatgcggtgctcggggtccatggtggtctcccacagctcctggtagctcatctcgcccaaacccttgtagcgctggatgccttcgcccttgggcagctggcgtccgttggccttgccttcggcgagcacgcggtcgcgctcggcgtcggtgtacacgaagtcgtgcgggcccttggtccacttcaggcggtacagcggcggcatggccacgtacacgtagccggcggtgatcatcgggcgcatgtagcggaagaacagcgtcaggttcagggtggcgatatgcgcaccgtccacatcggcatcggccatgatgatgaccttgtggtagcggaccttggagatgtcgaagtcctcgccatagccgccgccgaccgcggtgatcagcgattcgatggtgtcggacttcatcatgcggtccaagctggcacgttcggtgttgaggatcttgcctcgcagcggcaggatggcctgcgtgatcgggttgcggccctggatggcggaaccgcctgcggaatcgccctccacgatgaacagctcgcactcttccgggttggaggactggcagtccttgagcttgtcgggcatgccggcggactcgaagatggacttgcggcgggtgttctcgcgggctttcttggcggccagacgggcgcgggaggcctcgatggccttctggatgatgttcttggcctcgttcgggtgggcgtcgaaccagtcgccgagcttgtcggtcatcacgcgctgcacgaaggtcttggcctcggagttgccgagcttggtcttggtctggccttcgaactgcgggttggtgagcttgacggagatcacggcggtcaggccttcacgcacgtcgtcgccggagaggttctcgtccttgtccttgaggatgcccttgtcacgcgcgtaacggttgaccagcgaggtcagcgcggcgcggaagccctcctcgtgagtgccgccctcggtggtggaaatcgtgttcgcgaaggtgtgcacggcctcggagtaggcggtggtccactgcatggcgagttcggcggagatgccgagcttcaggtcttcggcctcgaagctgatgacgtcctcttccaccggcgtggccttgcgcaccttgaccaggtagtcgacatagtccttgatgccgttgaggtactggtaggtgacggtctggtgctttgcgccgggctcgtccgcggcgtcgccggccacctcgtcgccggcctggtcattctcacgctcgtcggtcaggctgatcttgaggcccttgttcaggaaggccatctgctggaaacgggaacgcagcgtctcgaagtcgtagatggtggtctcgaagatcttcgggtcggcccagaaagtcacggacgtaccggtggactcgccttcggtcatcggctcgccctgcttcaagggcgcggtggggtgctggtcgatgtacgtctgggtccagtggaagccctgacggcgcacttcgatgtccacgcgggtggagagtgcgttgaccacggagatacccacgccgtgcagaccgccggacactgcataaccgccgccgccgaacttgccgccggcgtgcagcttggtcatcacggtctccacaccggagacgccctcgccgggcacctcatcgaccgggatgcctcgaccatcgtccaccacgcggatgccgttgtccggcagaatggtgacctcgatatggctggcgtatccggccagcgcctcgtcgaccgagttatcgacgatctcatagaccaggtggtgcaaaccgcgcgggccggtggaaccgatgtacataccggggcggatacgcacggcctcgagtccttcgagcaccctcagatcggaggcctcataatgctcgggggccatggattcgtcaagttcgccttcggtcaattccgcattgttgatgcgttccgcagccgccttcagctgctcctctttgctggtttcgtctgccaacaggcttccttccgtgactacagggtcaacctccgtcatgaaggtcattcacggaggcgatatggcttacgaggcccgtaaagggctcttctggccatttgaccatactgcatgtgattttactcgtctaacccgacgagcgccatagcgaggcttctgcgaatttgtttggtatcttggctaccgccgccgagcccatttgcgcgtgtatccggcggccggtccggtcacgcgaatctcggcgatggtcaatcctttgagattgcgacggatggtatcggtaagttgggggataaggtaggtcagctgcgtggcccagaccgtggattcggcacggatggtcagtacgccgtccgtgaaatcggcgactgccgaatggctggcgatggcctgccccaccacttggtcccaatggttgcgcaattgcgcaagtttcatattcgccgcccagacgccattgccggcgatggtggtcatcacgctgcccagttcagccggatcgcgccccggtttgccgaagttttcgatggcctcttcacggcggcgtctgtagtccttcaaggtcgccccgcgacgggagagccgctcgaatatttcggccggcagtttggtctcgtccaggttgagttggcgggcgatcggcgggttcatgacgctttccgttctacggacgcgctgtccaccgcgggttttccgtcatacttacccaaactctcgttttcccgcgaatcggacaaattgcccagagttggcagtattacggaagcgggttcggccagtgtggccacgtcgatacgatgggccgattcatagtcgggcacatcgccttcagcggccatggtaatcagcacctgatcctgttttctggcgaaatcaagaatctgcgtgcgccggctgtcgtcaagctgggcgaacacatcatcgagaatcacaatcggctgcaatcccaaccggtcacgcacgatttcaaacaatgccattttcaaggccaacgccatcgtccacatctcgccgttcgaagcgaactcgcgggcgggaataccggccaactcaaggttcatgtcatcgcgctgcggaccgataaggttcacgccgcgagccatttcaccggggtagatgcgttgaaaatgctcgctgatccgcggatgtggatcgtcgaacatcagcacttcgtcgaatgaaggcgcatatgtgagcgtcacctgctcgccggcaccggccaagtcggcgtaaatcgcggcaaatggctcggcaagcagaccgatcacatgagcgcgcatacgggtcaacgccacaccggcttcgatgaactggccggtccagatttccaaaccgctcagaaccgcatccatcggctgtccattgttggcattggcattcaattgcttcaacaatgtggcacgctgtttggcgatgcgcgtgaactgttgcaacgtctgcatgtatccgggctcgagcagagccgcagcctgattcatcatgacgcggcgtgctcccggatcgccggacaccaatcgctgatcttcgggagtgaaggaaacgctgggaatcttgccgatgatatcgcgcagatacagcgacgaccccgagttgatgcgggctcggttggcaccacgcgcatgaatcgacgcttcatacgtagtggtttgaccggcatcatcagcgacgttcgcgcggatggtggccgtggtctgcccgcgttcgatcagcggcaacgtgctggacgtgcgatggctcgatccggtggacagcacttcgacggcttccaccagattggttttgcccaagccattcttgccgaacaggatattcacgcctggtacgaaatcgaccactacttgactccatgagcggtagtggtcgagtgcgagacgggagatgcgcattatcgaatcgttggaaattcagggacttcagttgttaaagcgcatcggcacgagcaggtatcggtagtccatggactcgtcggaatcagcttcctgctggccgttgaactcgaccggcttgaccggggtcgtcatcttgatgcgcacgaatggttcggtcacggcggacagaccctccttcaggtaggacgggttgaatgccacggtgatgtcgtcgccatccatgtcgatgtccagtgtctcgttggcctgggcctcgtcgaccgatccggcggacagcgccacttcctgaccggtgaaggtcatgcgaatcggagcattgcgttcggcgaccaaagccacacggctgatggcgtcgagcagatcctgcttgttgactacggcctgaatcgggtattcgtcggcgaacaggcggtcgaccgccgggaattcaccgtcgatgagctgggaggtggagacgcggccggcgttttcgaagccgagcagcgtcgggctgtcggcgtcgaaatcaaggcggatgttctggtgctcatcaagagcgcgggccacatccttgagcagggagccgcgaaccagcgtggtggtgtcgacgtccgggttctgcggagtccaagtgaaggtggcgcgggccaaacggaagcgatcggtggaggtcatgacgaccttgtcgccttggaattgcatgcgaacgccggtcagtaccgggcggttttcttcgcgggagacggcaacgcatgcctggttcactgcctgaacgaaagtcggggcatcgacttggccgagcatggccggtaccacaggcagatccgggtactcggtgtcgggcatgagctgcaaggtgaacttcgacttgccggacgtgatggtcagcgtggagccgtcggtgaccaggtacgttttctccgaacgcagcgatttggtgatatcggccagcagcttgccctgaaccagtacggaaccggcttcgtcaacgccggcttcgatgtggtggcgagcggaaatctcgtagttgaaggcggagaattgcagcgttccgtcaatggcttccagcttgacgccagcgagaatcgggttggagggacgtgcgtcgatgactcgggaggtccaggctacggcgtcggccagggctgcagtatcgatttcgactttcatgtgtgattgttcccttcgtcggattggctgagaaatattctagccgttaggtggcgaacttacgtacgatgggtgactggctgttactgtggcgatgatgcttttcacgtaactgagtaagtaatcgtcgtaataaggccggtggatagtgtggataagtaggggtgagccctacaaatgcaacggttcataagtccctgaaaattgtggacaaattctgcatggcttgtggataagtgggcgagttttccacagccagttcgtcgaatttgagttttccacatcgaggtcgcggttatgcacgagttttccacaacaaaacagtgggtaatccacgagttatccgccgagtttacccacatctgtgcacaactgtgtggataacttttttggttttcgtactttcgcacggcgtgttgaaggctgtttttcgtcgaggagaatcgattctggagaccgttttcggcacttttttcgtctcgctcgcccaaacccgcaaaatcggtcctcagaatcgattctctcgtttcatgggttttttgcgtgttccccttcgatactcccctcagtcgtctgcgacgacagctctcctcacaaaggggagccatgaggaatctgatgtctcgaatccgttgcctcgacgtatccaccagaatccgcctgagcaaccaaaaacggcacttttcggaaagtcagtccgaaaagtgccgtttttcgtctctcagaagcgttgtgtcagttggtgttgctttgcttgaggcgaaccgtgagctccataacgtagttatagatctcctgtttttgctgcattcggtcactgattcgagtgcaggcatgcattactgtggtgtgatcgcgcccgccaaagacctggccaatatccatcaggctcatactggtcatttcgcgagccagatacatggcgatctgacgaggaacagccacgtttttggttcgtgatttaccgacaagatcctcaaacgtcaggtggaagtacttcgccacctgactgatgatgtccgtgggcttgatttccacatcggtggtgaagaagtcctgcaacgtctgctcggccaaggcgcgggtcaccggctgattactcagcgaggccacggccgtaacacgggtaagcgcgccctcaagttcgcgaatgttctcggtgaagcgttcggcgatgaggtccaacacatcgctggggattttcgaaccgttcatcgaggcgatcatacgaagaattgcgattcgggtctccagatccggcggcttgacgtctacggtcaggccggattcgaagcgcgagatgagtcgagcctcgaaacccttcaaattcttgggtgccacatcggaagcaatgacaatacgcttatttgcctgatgcagtgcattgaacgtatggaagaactgatccaaggtggcttccttgccgccgaggaactggatatcgtcaataagcaacacatcaacctgtcggtatcgacggttgaattcagcaatctgaccctggctttggttcgggttttgcagcgcgtcgatgaattcgttcgtgaattcctcagacgtgacgtatcgaacctttagcccgggatccttgaccagtgcatagttgccgatggcgttcagcaagtgggttttgcccaggcccgatccgccatagatacacaacgggttgaaatcctgaccggaaccttcggccacggccagtgcgaccgtacgggcaaaacggttggaatcgccgggcacgaaggaatcaaacgtgaagttcttattgagatgagtctcgggatcgcgattcatcttctgctgaccgaccgggaactgcgactcggtggcgggcatcggttcccgcggtgcggctaccggctttgcaccataggattctttaccgaactcggcgacggtcggagaaatttccgaaggatatggctgcgccggctttgccgccgaaagcggttcgggctcggttttcggcacgaccttgaacgcgggaaacatattttcgccggttaccgtacgcaatgcctgaagcagggaatcgttcaaatcaccctgaatggcttgaagcgtatcgttgttgtccacacacagcacgatggtcgaaccgaagacgccttcaggaacaacgccttccaaccagcctttttctcgtgggctgagcgaagcgctgtgtttgagcaccgtcagcgtgtctgaccagatgtgggcggcctcaattacggggtcgccggaagcgttaaccatggtggccccttctatcggtgtggcgaaatctgtacaacagataatatttactctggtttagacaagttatccaccgtgtcgcgtgttgaaataactggattgtgaataacagacatgtaatttgtggataacttttggccgtgaatggttggtattccgccgattataagagatttgaggcgtgtctcgcaacgtgtcgaaatgtgaaaatactccgtccgttttgacttgagggtaggggtgagagtactttggtatagcttgactcacgtgagggcagcgcgaagcgttgccgaatagacctaggagcaatggattatgaagaggacgttccagccgaacaaccgtcgtcgccacatgaagcacggcttccgcctgcgcatgcgcacccgttctggccgtgcggtgatcaaccgtcgccgtgccaagggccgcaagtccctctccgcctgatcattccgatcagtgccacaggcatagtcgaggtggagcggcttcaaagccatcgtgatttcgtcaccgtgctgaaacgccggcgcaaagcaggtggcaaggatatcgtcgtgcactatttggtgcccgacgaccatcatgatgatgacgaccggacggtgcatcgccgtttgggattagctgtctccaaatcggtaggacatgcggtcacccgtaatacggtgaagcgtaggtttcgtgtattggccagagcccatgaggatctgctgcccgcgcattgcgatatcgttttgcgcgccaagcccagtgccgcgaccgcatcgttcgcttcgctagatcagcagatcgcgaaggcttttgccacagtggcgcataaggtggctgaggcatgacagcttctttcaaggcggtgatgattggtggggtgcgctggtatcaacagcacatctcggcaaacacaccgccttgttgtaagtattatccaacgtgctcgaattatgccattgaggcattggaacggtatggcgcgttcaaagggggagtgctcgccatgctgagattactgcgttgccggccgtggagtcgtgggggaatcgacgatgttccacaacggtattccattttttacagattttcgtggtcgaaggctcatgaagagccccgactgacaccattggccacaacccaaagagaggcccaacgatgaactcaaatgaatttctgcttgatagcgggttttggggatttctatataaaatcctgactcccgttgagtggttgcagacctggatcatgaagatcgtgcatgacttcttcgcgatgctgggcatgagcccgattggtgtctcatgggtgcttgccattatcatcctggtgctggtggtgcaggcgtgtatcttcccgctgttctgcaagcagatgaagtcgatgcgcaagatgcaggcgttggcgccgaagatgaagcgcatccagaacaagtacaaaggcaagacggatcaggcttccaaggaggccatgagccgtgaaaccatgaaactgtatcaagacaatgacgccaatccggctggctcctgcttgcctatgctcattcagggcccggtgttcatgtccatgttctatacgctgtcggccattcc

SEQ ID NO: 1619 - DNA, 3275 bp, Unknown
  R221_24m  MAG No. k141_66986
ggtccacgcctgcaccgtaccgttctcgtcctgcacgctgatcttgtgctcgccggcaggcagaccggccggaatcaccgcgtcgaagtagtacttgccagtggacgcttccttctgcacctgcacgaacggggagccaccggggccggtcagcgcctgcggctcggagtagatgtacgcgtaccagaacaggctgttcgcgtccgccttgcccttcgcctcgtccttcagcttgtcgacgtacacgcgggccgtctgtccgggctccgcgtggccgtttgcgacatccagcttcgtgtcggtctttgagggcagcgcctccgcaggcttcgccaccggctcagccttcgtcgtgaaatcggaaatcggcttcgccgtctgtccaaagttgatggcggagccgtccttcaggacgatcctcatgcccgcatacagggagcggacatccacggactggtcgtacacgttcgagcaagcaaggcttgcccccgtgggatcggcaagcttgcacacactttgactcttatgcaagagtttcaaccaaatggcggtgtaaacgccaacgtcgggcataccgtcaccgtcagtattaccgtacatcgtgtttgactgcaggccaatcaccggcatctgcacggtgcctgaggcggcatggttccacttgtcagtgctgtatgatacgaacttctgtccagtcgcgtaggactcgacttcaccctggtcttcaccctgtttaaccggccacgttttcgtgccgaatatgctctgatacgaaccggaggtcagatcgccatcggaggtgcctcccgagcaacttatcgggccgtaccctaggactcctccgaattgcggaagattaatgggtttgatgctcgtgacccgcatgacctcgaccgcgaagcacacgctctgcaccttcggcagaatgctcggatcaatctggtagtcgaacgacacgttcgccgtatgcgctccgacgtcggatacggccggcgtgccgaccttggtgctcccaagatcgccttcatagtagttctcatctgcgtttgcggtggcgactccgccgaacagtgtgcacgcggccacggccaacgcggccatggccttaccgaaacgtctcatggcattcccttctcctagagattcttcatcgcaagagacgaagcggatcccctgctcctcaaaaacgctaccccccccccgcggacttagcactccgactctcgtcttgctagtagtcgaagcccgtttcggggatggcgtcggccatcatgtggccgtagcgttggagcgtgaaggcggcgtccttgtggccgagttcccgcgcgacgatgggcaacggcacccctgcttggattctgctcgagtccgcgtagtgtctgagcgcgtgatgggtccagccttttcgggtcttgctgttgacgcggttgatgagccattcgccgtggatctgcgccacgtagtcgtagaccagggcggagtgctttgcgcagctgcaagcagtcatcaagacgttgcttctgctcggcgatacccgactgcaaggatgccgtctgctgatccagcaaatcaaccagcacccgttccggccgctcgtccgacagaatcgagcgaatccgctccagcttgaagccgagtcctttgagaaagcggactgtagaaagacatccgaccatcgcaattgtgcactggttcacagtgaataccccgaaccagttagacggcagaacagaattacagccacacctgttcttcaggctttacctcgccgaccgcattggccacacgtatggcatcattccgactcaatctaccggtgaatccctgtagatccgaccggcggaaccgcaccagctgtgcgcagcgagcggtcgtcagatgggtaagcccggcatgctcatactcgggcagttgcacatcgcccgccccatgccaggttggattgctggtcagtttcacagccactccgccgtcatcgtcggcttgtatgacgatgacggccacgtaatggttgcgcgatttcgtcggatcatcctcgaaccgcacccgcatgcgatacacgtcgaagacatgcaattgctccggaaccggcatcaattccggaatatcatgattattcaccatcgcgccacgccttgggcagtacggcaacaccatcggcgccccggcttggattcaacaccatggcgttcggcacttcaaccaccggatacccctgttcgtcgaccccacggtatgtaaccccattggcggcaacatgtcccgcgcgaggcagcacgggttcaggcgccttcacctcgaacggaatacgacgctgcgacaccaactgcacactggccatattcacgaacgtattgaaattcaatcccatggaatcaagaatggcgttcacttcggctttgagatcatcatccatgcgaacagtggtagtgctcataatgaatcctttctaaagccaattgtattactaatgacttcttttctcaatataatccgtaggatgcttaacgcttttgcatcatggccttgacatcgggacaatcccgcgtgaaaccaatctctgcctttgcgctcatccgctggggagctcacggtcacactcatgcgtcgcagaccacgagcctcacgcgcttcctcattccacatctgtgttaacaacatgtgttaatcgaatgcatcgccaccatgattccccaatgatttcaagggttccccggtctcactattgtttcttccctaagaccgcctcaattatcggcactttcctggtggccaccaccacctccctgaccggcaacgcttcggtaggcgtgctttccatcgccgtcctgctcgtcgcggcgctggtcttcctgctgctgcagaaagacccgacgcgaaactaactaatttgcgatacgcaatcagcgctcgcgataattcttgaacagttggatggcggtggcagcgattccgcacagcacgccgccgataggccatgggacccagaacatgcctgtaacggcggtcgaccaatcaccgcgcagagcagctgggctcaggaacagcaagcacaggccaatcagcgtggctatcatcgtgatgatgccgcataccgcgccggtcagtttgtcgtagaaatcctgctcgcccgtatgctccttgcggtcgtcctcggccgctttgttgtatgcgttgatattgagcagactgtatctcatgccgcagtagacaaacccgaaaacaccgggcgcacagagcagcagaaaaattgcgttgggccagccatcggagac

SEQ ID NO: 1620 - DNA, 3794 bp, Unknown
  R221_24m  MAG No. k141_68081
catcatcagcgggattgtgacttggaacagggtctggcgcggattggcgccgtccacggctgcggcctccatcacgtcggtgggtagggcctgcaggccggcgatgtagatgatcatcatgtagccgatttgctgccagcacaccaagatcgtgatgccccagaatccgtaggttcccgagtaggtgatcgacctaccccagtgagccaggatgccgttgaggagtagctgccagatgtagcccaggatgatgccgccgatgaggttcggcatgaagaacaccgagcggaacaggttcgcgcccttcatcttcttggtgaacatgtaggcgatgaagaacgccgcgatgttgatgatgagggtggtcacgatggtgaacgccacggtgaaccacagcgagtggaggaagaccttgtccgtgaagacaccggagtagttcttcaggcccacccattcggcgtcggtcacggtggtgaagtccgtgaagctcagatagatgccgatgatgaacggcacaacgaagccgatggcgaatgccgcgcaggtaggcaacgcaaacagcgcccaccatttgcggatcgatttaccaaccatcgaaatcatgatgaccctttcttaggatggaatattgctggggatgcacggcgacgatgccgtgcatgtgtggccggtaggttcccgctgacggggccggcccctgtgattagtccgtgagtcgcagccagacggtgacgtcctgcggtagcctgccgtcctcggtgagcgaggcggaagccagaacgatgtcgccggccggcagcgcaaccgggtcctcgccgaagttggtgatgctggcccagccattggaacggcggtaggcgatcacgccgccaggctgcccgtcggcaccatccttgcgggtggaggcggtgtcctcgtcgagccaggtcagttcggtgtcgaccggcattagcttgtggcgcagggcgagtgcagtgcggtacaagctgagcatggaagcggggtccgtggcctcgctatcggccgcgaaatccttgtaccatgcgggttgcggcagatgcggtcgttcggatggggtgccggactgtgcgtcttcgactcctgctccagcggttttgacggccggtgagaatccgaatgccgtgctaccggtgtcgtccgcggtccatggcagcggcacgcggcatccgtcgcggcccttctccagtcgggtgcgaacggtgtggaaggcggtcgggtcctcgagctgatcccacgggatgtccgccacctcgaacaggccgagctcctcgccttgatagatgtaggcggagccgggcagcgcgagctccatcatgatggcggcgcgggcacggcgggtgccgagttcgcggttctcgatatagctggcgccatcgcgaagaatccagtccttggccacctgatgatggccggtggccggcatctgcgggagggcgtaacgcgaggcatgacgtgggatgtcgtggttgctcatcacccatgtggaggtggagccggactgttcggcagcctccagaccctcttcgatggccagatggaattcgtcgcgaatccagttcttcttggcgaattcgaagttgaacacctgaccgagctcgtcggggctggcgtacaggtactggcgggccgggttgacccaggcttcggccacggcaaaggcgggcgggtcgtattcgttgaacaccttgcgccattcgcggtagatttcatgcacgtcatcgcggtcgtacaacgggtggctgccatcggcgggcaaggaggggcaggtgatggcccattcgtcgaggtcggtgcggtcgaggtccttggccaggccatgggccacgtccacgcggaaaccatcggcaccatgatcgagccagaagcgcagcgtagtgatgaattcctcgcgcacttcggggttgttccagttccaatcgggctgttccacggtaaacatgtgcaggtaccactggccgtcaggcacgcgggtccatgcggagccgccgaagctggcgatccagtcggtcggcggcagttcgccgttctcgccgcggccgtcacggaagatgtagcgatcgcgctcgggtgagccgggttccgcggccagcgcggccttgaaccaggcgtgcaggttggaggagtggttgggcacgatgtccacgacgattttcaggccggctgcatgtgcggtggcggcgagctcgtcgaagtcgtccatggtgccgagtttcgggtcgacgttgcggtagtcatccacgtcatagccgccgtccgccagctggctggggtagaacgggctgagccagatggcgtccacgccgaggtccttgaggtagccgatcttttcggtgacgcccttgatatcgcccaggccggaaccggtggtgtctttgaacgatcgcgggtatacctgatacaccacggcttgcttccaccacagtgccgggtcggatgccgtgaaggcggagcgagtctcgtcgctgtgcatgcaatctccttttctacttccttgtcgtaccaattaagacagcgctttcatttgtgtccgttggctgcaaatacggcaagacatggcgatatgttgcatttacttgtgggtttattggtgtctcgtcggttttgcgaggaggttcggataacttcttcgttgtcgtttggtaggaaaaatgataacgcttacattttgatggcgcaaatatgctgatttcacggcgtgttcgttgatattccgccctcgtggccatacgttaacacggtgttgaaaagttataaaacagcagttattgtaagagcagtgcaagttgtatggcagtagtgtaagcgttaacattattgctggaatcgtggtctgctcgtcatcggcggtgctgatgatggcggggctgaccaaaaccgtgttatcgttgagcggcggggcggaaatggagggggtgcactatgggtcgatctacgatcagcgacgtggcgcttatggcgggtgtctcggaggcgacggtgtcccgtgcgttgcgtggggtggacaaggtctcggaccgtacgcgccaaaaagtggtaaaggcggcggaaaacctgaacttcaccctgtccaaaagcgcgtcggcattggcgtcgggcaagactaagcgcgtgcagctggtggtgtcgggggagctcaaggcatggttcaacgcctcggtattgcagggcatatacgaggtgctatctcctgcgggctatgacgtgattcccgcgttcatcatggacaagtcggagctcgacagcctgttcgccaagctgcccgccaatcgcaatatggacgcgctgatcgtcgcgtcattccggttcgatgtgcagttgcatgaccacatgcagaagatgggaatccctaccatcggcctgaattcgccctccttggacggcttcgatgcctcagtgggcattgatgacgccgccggcatgaagctgggcgtgcagctgctcaagtcgcttggccatcagcgcatcgccttcgtgtgcgattacgtgccgcatgacctgttctacagcaccaccttgcgttccgatctgttctgccgggcggcgttagacgccggatacgacgaacacagcatgatggtcgtgcgtgcttccgagcatggccgtggcgtctcttatgagcaccttgccgcggaggtggcggccaaaatactggcttcgccgctgcggcccacgggcgtatgcgtggagaccgacgagttcgcggtcccgctgctcaaggaactgcgtcggcagcatatccagattccgggggatctgtcggtcgtcggatttga

SEQ ID NO: 1621 - DNA, 21495 bp, Unknown
  R221_24m  MAG No. k141_68446
gcctcggcggagtctgccactcccctgcccaaaactattcgcttggccggtatgagcacgtcttcgctcagtgaggcggcggctacggccgtgcagccttcactggatgacatgctcgaagaggccgacaatgcccgcggccagacctcacaggcacgcttgcatgatgccgaggccgcgctggatgccgtacgccgcaaattcggctgcaaggccgcccagtttggggcgtgaacggctcaacgccacttacgatctcattacgccgtgagacgttcgcaggcggagcggatggcctcgtcggtggcggtggcggagaaacgcaggtaggcgggagcgccgtagaattcgccggggctggggatgatgccgatcttggcgagctcggccatatcggcccagcagtcgccggacttggccttgacccatacgtacagcgcgccggagggcatttgtgccgaatagccatatgccttcagcgcgtcaaccagcgcggataggcggcgacggtaacgcccccattgctcgtgcacggcggctgtgtccttcagacctgcggccatggcggcctgcaccgggccggggataatctggccgatctgcttgcggtattcggccatttccttgactagccggtaatcgccggcaatcagagccgtacggtagccggccatgttggactgcttggacagcgagtagagcaccaggatgccagctgccgaaccttcacacacatgtgaattcagggcacatggcgtggcggagagactgaatgcggtatcggaggcgggctcgttggattcggccaccggtgcggcaggcacagacgcagcagatgcagacgcggcaggcgcagaggacgaggctgtattgcggcgcaccgaacgccagtccatcaacgcatagcattcgtcggagagcaccacggcaccgatgcgacgggcagcagccacgatgtcggtcagccagtcagcggagatgacctcgccggaaggattacacggcgagttgatccagatggccttgacattcggaatattcacccaggaatcgacgtcggtcacatcatcgactttgaccacggtggcgccggcaagttgggtaccgatttcgtaagtcgggtaggagacggccggttggacgaccacatcgccttcgccaaggtgcagcaggctggccatcagtgccacggcctccttggaacccacggtgggtacggcggcagcgttgatggacttcagatccacaccgcgcagttcgcggaaccatgtatcgatagcggccttaaggtcggcgctgccggcggtgaccgggtatccatgggcgttgggggcgtctgcgccggcaaccagcgcctgctggacactgctcggcaccgggtccacgggcgagcctacggacaggtcgatcatgccacccggcacggttttggcggtggctttgaagccggcgatacgagaccagtcgtatggcgacgaatatgcgtggaagcccatgagaacccctttcttggacggtatgttcctaagatacgacgaaccctcggccgtgatagaccgagggttcaatccgaactatgcgctgtgtgcggcgcttatccgcaaatcagcttactggttctgcggcggcagcgcggcgacctgttccgggtctttgccgattgggccattggcggaagcgccgcccaaatcgccgacttcagcgaagaagttgacagcggcatccttgtaccaagcccactcgtccggcagatcatcctcatagaagatggcctcggtggggcacaccggttcgcatgcaccgcaatcgacgcactcgttggggttgatgtacagcgagcgggaaccctcgtagatgcagtcgacggggcactcgtccacgcaagccttgtccttgacatccacgcaaggctgagcgatcacatatggcatggaatcctccttaacaaatactgatacaagggtacgcgcccgttgggacgctcctcgctctcagccgttaacggccttatcggtttcggcggacagcgtttcggtcaggtcgcccttgccgaggcgcgcatgccagtagccgtagccgaagtagatggcgacgccgaccacgagccacaccacgaaacgaatccaggtgagcacggacaggttgagcatcaaccagaagttggccacggcgatgaggatcggaatccacgggtcgccgggcatcttgaaggcgcgcggcaggtcggggcgcttcttgcgcataatcgggatggagatggccaccagcgtgaaagcggacagggtgccgatgttgaccatgtcggagagcacgccgatgtcgaagaaggcggccacgagcgccaccaccgcgccgacgacgatctgcagagcggccggggtgccatgcttgccggtcttggacaggccgcgcggcagcagaccatcgcggctcatggcgaagacgatacgggtcaggccgagcaacagcaccatgaccacggtggccaggcccagcacgatgccgaagctgatgatcttggcggcccagtcggcacccaccagttcgaaggcggtggccagcgaggggctgtcttgcttggcgagatcggcataggagaccatgccggtggtcaccacggccacgagcatgtacatgacgatgatgagcagcatgcccacgccgatgccgagcggcacgttcttgtgcgggttcttggtctcctcggaggcggtggccaccacgtcgaagccgatgaacgcgaagaacacgagcgccgcgcccgaaaggatgccgggaacgccgtacacggatggggtcatgccggtggcgaactgccacagcggctgggtcatcacgccggtgacggcggaggaaccttccacggtggaggccggctggctcggcggaatgaacggggtgaagttggaggccttgacgtagaagaagccgacgatcaccacaaagaacacgatggcgatcttgagcacggtcatagcaccgtccacgcgggcgccgatcttggtgccgaatacgagcagcgtggtaaagaacgccacgatgatgatcggggcgatatcgatatggaaggagccgaacgccaggttggtgttggcgttccagcccatcaggcgcatgaaatcgttgaggtatacgccccaatatttggaaatcacggagccggccatcagcatttccagaatcagatcccagccgatgatccaggccatgatctcgccgaccgtggtgtaggtgaaggtgtaggcggagccggccaccggaatcatcgaagcgaattcggcgtagcacatcacggctgcgccgcacacgatgccggcgatcaggaagctgatgatcacggccgggccggcgtggaaggcggcggcctgcgcgcccaccgagaagatgccggcgcccacggctacggccacgcccatgattgacagatcccaccaagtcaggttgcgcttgagcttgcggccctcttcacccgtttcggcaatggtctgttcgacggatttcgtacggaacagttgcatagtgctcttctttttctctgttgtttgcgcaccgaatgcgcacaataccgacaatcgagtatagaagagcccgcgtgtcttgtctattaataagacttagagcccgcaatatatgggattaataccccactccatcgatcaatagcgcgattacagcacgccgacgcagaccggttcgggcaccaagtccactccgaacgcgctcttgaccgcctgctgaaccgcacgcgccaaagctgcgatatcggctgcgctcgctcccccacgattggtcaaggccagcgtgtgctgcgtggatagactggccggcgcgtacgcatcgaccttatatcccttatggcagccggcatggtcgatgagccaggcggcggacgtcttggtgccgggagtgccgtcaggcagagtcgcgtcgaacttcggcgcatcttcgggcagggccgccgcttggccggcggtcagaatcggattcataaagaacgagccgcagctgtggcgattgtagtcgggagcaggcaggccgtcatcgccaacgggaatgccggcggcctcattgagggaggccagacgctccagatcggtcaggatattggccccgcgcttggcggtggccatgtcgggcaaggcgtagcgagtgggatcctcaagcatgcccttggcggcacgtactgcgagcacggctttgcggatgtcggcggtggccatacggtcgcccacttcgacgccaagcgctttggcaagctgtccgtaacctaccgtgccttcggccgagtgggtcagggcaaaggtgacggagagcaccacgtaacgtggcgtcgggaagaatcggtcggccggctggccgggaccggcgtacatgctggccttcagtgcggagtatcgatagccgaatcgaagatcggcgggtgtgaggtcgcgcgttgttttggtgtctcgatcccagacttccaccgattcgaccgaagtggcgacttcctgtccgtaggcaccgatgttctgcaccacggaagcgccgactgtgccgggaatgccggacagtccctcgacgccctcgagcccgagctctacggtgaaggccacgaaatcatcccaattggcaccggcctcggcattgacatgcacggtgcgatcctcgccctctaccggtgcagcctcgtccggcacagtgatgaggcgtcgggcgtctcgaaccaccacgccgtcaaaaggcttatcggaaacaagcaggttggagccgccaccgataacgaccaagggcaggcctttggaatcggcatcctccacggcttcgatgagccccacgcgcgtggtcggctcgatgaaatgggcgatggggccgcccacgcccatggtggtgatgtctgcaaagcttgtcatgacttcctatcttagtggcgcaggtgcgatatcggggcaatcatcggctgaaacggcagaacgctcgcgaggggttcgttcagacgcgggatttctgccgtttctcacgcgatgcggatactgattccgcaccctaccactcggctctggagtcaatacgcaaaaacccggccgaatgggccgggttttgtaaagctgtgatgcttgcgatcaacgagtctcgcggtgcacggtctgcttgccgcagcgcgggcagaacttcttgagctcaagacggtcgggcgtattacgacggttcttagtcgtaatgtagttacgctccttgcactcggtgcaggccagcgtgatgcccggacggatgtcggcgctcttagccattgtcattcacctctgtgttcttaggtatagtgcgcgcccaccggttagcgggcgcgatttgtagcgaggaagaggctcgaactcttgaccttacgattatgagtcgtacgctctagccagctgagctaccccgccagagagccccgagtgagaattggactcacgacctcttccttaccaaggaagtgctctaccactgagctatcggggcgtggcggatagtggattcgaaccactgaagcacgaagcggctgatttacagtcagctccctttgaccgcttgggaaatccgccagtctgtttcccgccgcggtgtttgacctcaacaggcaacttggctatataaccacatattttccaagtacgcaaatcgacctctacgcgaaccttgttttaccgcggaattctgcggttttatcggcgtgtctcacagcgtggtttcagggtccgcttcggccctgcaaacagccccgaccaaggctgcaccccgcacttctaccaatcatttttcttatatggtgttccagaaccttgcaatggcgcggttttcgagtggcgccgcctgcttgcggcggcacagcgcatgccggcatgctgggcgcatggcttctgatcttgtacatcacggacaatcattcgacgaccagccgctcggattcggcacgctggccattcacctcggcaacggggtcgacgccgaaaccggcgcgatccgtcgccccatcacgctggcgaacacctacgcactgccctacgacgcctcggccttggcgattgccaagcatctcgaatcgctggatgtggtgcgtttcgtggcgtaccccggtctggaatcgcacctgcaccacgaggtggcggccagccagctggcccgcccggactccgggttcggcggcgtgctgtcgttcggcctcgacaccgaccacgacgggcacaaccgattcgtttccaagctcaatgtgattacgtctgccgtctcgctcggccatgactaatcgctgatcgtgttcctcggtgaggatgacgagcgccagtacctgtacccgcctgagttccaccgcggcttcttccgtctggccgtgggtctggaggatacggacgatttgattcgcgacatcgatcacgcgctggtggaggccggattcgaggtgtgagaccgcaccgcgcgcatgatttcggcctcttccgccctgctgccgccgtcagtgagtcacaagatggctcggtgacgacgatggcagggctttttacgtcggcacagggacaatacctggcggtctgccgacgatgacgccacttatcgtcggcagaccgccagtttttggaccgtcgccgacacaaaacgccgatttgccgtcggcaatggtccaaaaactggccctataacgacgccaacgcggctcagcatcggcacatcgccatttcgtggcccactgccgacgctggcctcatgccacggcactcagcgtcggtagagagacaaccattggcacagcgacgacaccacgaacctgcgacacggaaaaaaacaacataccgtcgacctactgccgtcttgtgcaaaatgtcttaagccgctcggccaagtcgccgactgagcctcttccatagggaccccaatccgttacccagtgtagatgcggtgcaacgccgaactcaactacgttgcgcgcatgcacctttatgcatagcaggcatggctgggcgtttggcgggagcggttttcggctcccctctctgaggggagcccctttccgcctgacaagagaaaaccccgactgttcgtgggaacagtcggggttgttgaagttcgctaggcgactaatcagccgaggatggcgagaatgtcgcgcgcgccgacgatgaggtagtcctcaccctcgtagtggacttcggtgccgccgtacttggagtacagcaccttgtcgccgaccttgacatccatcgggatgcgctcgcccttgtcgtcacgacggcccgggccaacggccaggacttcaccctgctgcggcttctccttggcgttgtccggaatatacagaccggaagcggtctgggtctgggcctcggcctgcttgacgatgatcttgtcttccaacggtgtgagcttaatcgacactgtgggtcacctcgtatctacttgtagttcgataatgccgcgccagaacgcctcaagaggctgacgatcacttgcgttgtccctttgcgctaggacacatcgtagcgcgattattagcactctgccaactcgagtgctaacgctgtgagagaaaatcggcgaatcgcaacgctcagttgccgcggcgggcaagaatggagtccaggcctgcgcccaacgaatcggtggtcgccgctggcgcttcgacgtcggcacgctcctcggattcgtggaatgcggctcgctgggcggcgtttgcagcctcgtcatcggcgtccgtagcggcgttcgtatcggcatcatcgcgctgctccgactcagtgtctacagcgtttccggcactgacagccttgcccgcatcggcggccttggcatcgtccgcggccttgacggctcgggcctcgtcaatcaacttttccgccactgcgggttcgacaggttccgccttggacacctgacgggtcgacttgatctccaagctttccggagcgttgtcggcgttatgttccccgcccaaagtgaaggagatgagatcctgcgaggtggccatatcgaagacatccagtgctcgggcagggcgtacgctgaccagttccgacgtagcgtcggcagcggcatcgtcgcgctcatcacgctcatcacgcaccgtaagcgatggttcaactcgaggggcgacggacttatccgacttagtcgacttatccgtgcgagcggaggcatcgggcgcggcggaagattcactggtttcggcagcggacttacggtcagcggactcatcgaccatagcagacggttcggcggcaggcttatcggcggcggactgtgcagtatcagacttctcagactgtttggcgtgctccgccgcggcctgatatgcggcggcggactgacgcaacgccttggccttggcctgctcaatctcggcatcgcgtaacgcgcggcgaatctgccgctgttccatgacctcggtggcagcatcctcaacatgctcggaaagctccttggcaggcgcagttacggccgcaaccggttcggccttgttcacacgcttgctgtccttggactcggcagacggtttcttggaccagcccgtaccgctatgagtccgctcgtagcggaccaccttgcgctcccattgccgggcctggcgtgaggcattggctcccagcaccagcaccagcagtaacagcacgaacggaataagagcaagcagcgggctgaaatgcagggggaacgatacggcaaacaccaacacggttatggcaagcaggcatacggcgagaatctgccggcggcggatggccgcgcggcgcagttcccgcacatgggcgatgtgctcaggtgtcagcctcgctgacggtgttgatgctggcattgctgcccctttcgccttatgcggcttgatgtctccgaatcgtctgccgttctctgcatcaacgatatgcagggaaggcgaataacgatcctgccggtgctcgtccacacgtttcatgccgttggccgtacgtacgggcagccatacaacgataataatcgccacaatcaccagcacgacgacagtgctcagtgactcataacccatagagtcaaggataggagacgtaccgacgaactggggctttccgtccgggcgtgtcggagcggaattcttccggtcgacgcttatctggaaccggcggcggcgagtctggcggcgaacccttgcctcatatcttcagccaacagcgcaaacgttacgtgatcgcgccactggccatttacatacatataccgctcgcgcagtccctcatgatgggctccgaccttacgcactacagccaaagagcgcgcgttatccggaagaatggcgatttccagccgatgcaacgcgggcccgaatgggtctccgagtgcccaatcggcaagcatggccagtgccatcggcgcgaatccgtggccggcgtaccgttggtcaacccaatatccgaccacaccggtgcgcatggcaccatacgcgatggctcccaacgaaatctggccgacgatacgcatctggtattcgatggcgaaaatcacgccgacgccatgctgctcattacggcgctgtcgctgcacccattgattgaaggtgatggagccgccatgcatcgggtcgccggattcccaaggcgccagccagtcgttgttgcgccagcgcacttcgttccagccgtcctcatcgtccatggtcagggggcgcaggattatcgggaaaccgggatgggtgaggcgcggcggacggatctggtggtccagcttgaacgcctctttaatcgactggaaaactgacacggcctttattgtagccatatgaagggcttgcgccgctaccgtggccactttcgttttacggtggaaacactagattgtgcggtatgagcgaagcggacaatggcatgaatatcggcagcgaccacagcggcacggagaaaacagaaaagatggataaagcgacgctgcgccaccatatactgtctcggcgcaagcgcattccagcggaagaacgtggagcggccggtgaattgctggtgcgacggttcccggcacacatgattcaggatggttccacagtggcggcatatgtgtcgatgggttcggaaatcgaaacccggccactgttgcgatggctgttggctcatggctgccacgtgttggtgccacgattgggatctgggttggaaattggctggagtgtgctggattcattggaatccttgcgctcgatggatgcagtgggtggcgcgaacaatgccggtagctgcagctctcccagcaccgtccatcacagacccgatgagccaactggcgcagttctaccgcccgaagcgttggagaaggccgatctggtcatcgccccggctttggcagtggacccgcaaggcaatcgtctggggcgtggagccggctggtatgaccgggccttggctcgacgcaagcccgcgtgccccctgattgcggtgtgctggccgtgggaggtgttggacaccgatttgccggccgaaccacatgatgtgccggccgacggagtgctgacgccggggggataccggcggcttggcgaatcgggccggctgagttgaccggccggccaagatactcggcgcaagccagactgaccaaccagccacgcacactggccgatggaaccagagtggcaaaagcaggctggctagtaagaccgtaacgccaatgtgtcagggcggcgactaggatatgaacggttgcacggcatggtgttgcacgccatgcgcgagaaatatgactttgttggaggaatccgttgcctacctatcattaccgttgcaagaactgcggctatgacttcaccgaacagcagtcgttcaatgacgacccgattaccgtgtgccccaagtgctcgcaggagcaggtgcgcaaggtgtattccgccgtgccgattgagttcaagggtcacggattctaccgcaccgacaaatccggcaagtaaggtcggctccccgtttttcctctgtaaacgacggtgtcgacggcggtatgccgcggatattggcactacgggcactgtctgttgcacgggtttgaagcgttgtggataacttggcaagctagaaccacataggtcgattcagcttgcgcttacgaaaaacttcaggtcaccatggttgcatggtgaccttttcgtttattaagccgcctgcgcgcggctcattgcggcgacggcgcatggcggatgccttgcgccgactcactgctgcgttgtgcgtgggactcgcagtgttgtttgggcttgaagccgtattggccgtggtggagaccgagccgatggtggtggccgctcgctcgattcgacggggtgacattattctggccgccgacgttcagttggctgatatgccggtatctgcgataggcccatcttgggcgtgcaatattgaggatgtggtgggcaaggtggcgcaaatcgatatcgaagcagccgatcccatttccacgcatatggccagagatgcgcccgtagcaccgaccggcactacggtgattgaagtccgcttggccagtagcgtcgacgatgtattggccggcgatcaggtgagactggtttccgccgtcggttgcgaaggtgccgattgcacgctggccgagaacgccacggtgatgaatgtcgacaaaccggatacgactggcgcattgggaagcaacgaccgactggtgtcgttcgcaatgccgccggaggccgcggccaaggttatggagctgcaacaggccggagcgattatggccgttgtgcggtaggaagcggaatcggccttcagccgatgttgtgttttccgcagccgtacggctgcggaaaacacagagttggggcgcacagagtgcgccccaactcctactcgcgctcgttgaaaacagcccagtgtggcggcagttcgccgaggatgcgtttgtcgtcgtcggattgccgttgttggtcggtctgcatgtctccgggctcgagtttgacgccgtcagcgtcaaactgctcagtgcctttcatcaccacgcgcttgtgcttgcgcggtgtgcgccgtgtagccgagtattccgccatgattattcaacctcgcggtagatctcgccgatacggctgacgatacggtcgacttccttatcggggttcacgaaggcggcgacactccagacggtcatcacattccagcccaaggaaatgagatcctgtgccgacaaacgatgacgcctgcgcgtggattgcacggacataaagttcgcgtcatcggtctgcacggccaaggcaaacggcttgtccttcaatcccaccacgagcggaatcttcacgcccttgtcgaatccataatcaacagcagcgttcagtcctcgcgcgcgcaacctgtcggcgatatcgtcgaacagcacgttgccgcctgccgcaccacgcaacggaagcaccggacggtcgtcaagctgttcggcccacgtcaacatggtcttcaggaaccgaggaccggactggtgcagtcgttcttcatccaaatcttcggaaccaaaggccgacacaatatccaagctgtggtccgccaatgccagggcatccagcaacagtccgcgaccgcctgtgctttcgagcggaccgaactgctgaagcagacgtccgtgcgtggttttcgcatagcacatcgacagaatcacgtcagtggcacgacctccggccacgtcacgcaaggaaaccagccgcacatggcgcaggaatcggcccatcgccttggatttgcctgccaacgacttcaattcggcacccaagcgtgtgcggaatgcgtcggtcaacatcacgaccacaagtcgatagctggaaggaaccacagcaaaaccggcggcacgttgtgtaatcagacgcaccacttcatcaatctccgactgactggattccaccagaccagaagacataaccggcacaccgctcgcttccacacggtggaaccgcacctcaccggcagccggctcggtggccacatcatagcgaacaggaccatatccctcggattcaaggaatgcggacaggcgcggcgcacggcgagacggggcagcatccacctcgatatgaggcaacgtgtcgatcagctgcttgacgctttcgctggttaccgtcgcgcagtgggcgatcaccaccacctgctgcacgcggccgatgatggacagcaactcgatagcgggaatgtgcgcgcacgcatcgagaatcgccacatcagccagcacacccggctcggtgagtgcggcgagcgtacccggtgcggccaccagaatcggcttggccgcggccagaatctccggatgatcacggcgaatcctgctcagcgacacactggcgcgccctgccagcacggtgtgcatctggttggcttcctgagtgcgggagaacagcatgtcgcacaggcggcgcatggattcctgcgacaccatcggtccgatggagcgcacgtgctccacatcgacctgtgcgaagcggtcggatgcggtctgcagcgcagcaccatcctggttggagatgatggcggaagaacgcacaatgtcctcgaacacggtggtccaccatgccagctgcacttcgccacgcacctgctccacgcccacccggcgagcgttgagatcggcgaccagttcgttcagaccggcagaggcgaattcctgctccagcaggcaacgctccggcaaggtgtccagtgccttgcgatcatccagcagtgctttcaggcgtgcttccaccttctcgaaatcggcggtttccagattgccaccagcgggtgtggtggaaagcacggtatccagcgcggtcatattgctgaccagcgcctcttgggtggagatgatctcgtcgagcttgctgggcagcaccggccaaccgccgtgaggcacgaactgatgccactgctccccttgcttggcgactaccttcaacgcttcgtgcaagtcctcgacctgcgcgccgacgcgcagcagatccttggcttccttgacgtggcggcggcgctcccagaatcccatcgacgtgccttcggccttgcgctggctcttcggcttggtggcctcgatcatggagctgatgtctcgctcgaaaatctctggctggaacacgtcaagcactcgtcgcagattcttcaaaaccgtaacctgacgctcccactcgcgagtggtgggaggaaccgggaatccgcaggtctgcacggtgcgtgccacctgctcacgggtggcgggcaggaagcgacgcagcaaatcgtccacgcgctggtaagcggttaccgcttgttcttcagtggtgatggacgccttgtaccatgcggtgtcttccgggccgatggtgtattcgccgagctcgccggcacgttccatcttgctgatccatgtgtcaatatcgttggcgacgctcagggcacttgactcgtcaagtcgaacgtgggtggcggggtgtgtcgggagcacggagatacgggccaggttctgaatggtctcgtatgcggacacattccacttatcgttgcccccgtgcaggtcgcccagatagcgggtcaagcgcgagcgcacgcccacgagttcgtcggccagctggtcgaatcgctgggtggcgactccgggctggaatccgactgcggcaatcagctgcttatcaagcgcggcgttggcgtgttcatcggatacatccagtacctgcgccttcatctcattggcggaggccgtctggatgaacagacgcttctgctcggccacgccgggcacgtacagcacggaacgaccattcatcaggcagcgcgatgcgatggccacagcctgctccgcggtgcccttcgggaaggtgccgtcgaccacgatgctatggccattggcagcaagtgacgcggcatatcgcaccgtattgtccacatcgccgacttcgtactcggcatgcgggtctacgtcgaaaggactgtattgcggaatattggcatctttgagcgcggtgcgggcggatttgtcgccggcaagcgcgtccaacagcacattgccggtggggccattctccagctggtcgatgaactgtcggctttcgctgatcatctgcgacgaggggtccatgaagcatccgagcacaatctggcgctcgatggcgaagccggagatacgctccgatgcttcggacgaaatacgggcgaacatcgcggaagtttcgggagtgccactgtcatagctggcaccgtcaaacagggaatcctcatccaagaacaccccctgctcacgcaatgcattgacgaacgcggcgttcagggtcacgcgaccggtgaatcgaatggtggtcgacaagccatcatcctcgatcgtgacgctcaccgggtacaacagcaccggcagcgcgttgcccctccacgtggccacaccgaccacgagcgacaactccgccacgcccgaaatcctgcgcttggcggcctggtcatccagtacgcgcccgatatggcgttcggcggccttaagcacacccgtgtcacggaacaacgaatccaaccgaacatggccggaagcgaacagctgggcgatgccggagggatgggcatgggtcatctccagcttcgcggccagttgattcacatcctcgagcggcgatggcggctgcatactgcggtattggtcacgccagcgacggatgcgattcagaccttccgtgagattctggttctgagtctggctctgggtcatctctcgactcactttccaaccgcttcgcggtattcctgatagcccttgttgtgagacagggcttcgtcaatatcggcctcgccacgggcggcgagccaagaatacatgtcgtcgtacaggtacggattcatggcgaggaacgccagtaattcgggatgacgggcgacttcgaactgaacgttgaaatcttgcgtggtttttgcctcgtcagaggtcaggccatcgacttcgactgccggctcctgtgctttcagctcgcccttggccacacgctcgaacaccgagccgggctcgaagaccggagtgtgtacgcccgtggagtagatatcagacgcttcatacgcttcggagaccgactgctgggcggtttcggtttcggtcgccagctgctgatcctcgggtgcgtcggttgccggttgagcggtttcaggctgggtggttgtcggctgggcggtctcagactgagtgttttcagactgggcggcttcggactgagtgccttcagaatgctgtgcaacagcgtccaccggctgagaatcgtcggtattcggagcggactgaacgttttcggctgacttgcttgcgccagccaccacatcggattcaacaaccgccgccgacgccactgccggctcgcttgtgctgggagcgtgcttaacaacggcatgggcgatggcatctaccgggacaataccggagatcctgctgtgcttggatgcgggcgttacagtcgtcgactcaggttcggtctgctgcttcggcagtaccacggagtccatggcctgctggtttttgcgttcggtctcctgctcggcatgctgggccaacgcatccgcgaacaggtcacggggtatggccggctcatcgtttttcgtcactggctgcgtgatattcagcgagccaagttcaagctcgtcgaccttgcgtcgaacattatccgcgctgaagatggcggtcggctcgccggcccgcaaatcaagaatatcgtcgacagacatatccgccgcatccggctcctgcggtgcttcgtgaaccgcatagccaaacaaatcaggcaccttaaggtcgagtggctttgccactggatcgtcgatacgaatgaagtccgcaggcacatcaccgaactgcatgcgcatgggagacgtcggcaacaggaactcgacattggccggcaagcgcaacaaatcaccattttcccgcaccacatacgatccattggtcgatccaagatcgcggaccgaagccgtaccattgctttttaccgtgaacatggcgtgccgtttggacatcgatttggtctgatcggcgacgtcaaggcgggtgttgccatcatcggcaagggggcgtaacggcttacggccgatttccacgcactcccccggcttgacgctgatccggtcgacaccgttgatcttcaccgtccactcgctcaccgtgaccgccttcctggacacactatttgaccacactacgtgccattgtgtcatcttttaccggcttttggcggattactgggcacagaattgacaactttcgctcattgccagctttgtgattccacgtcggatcgcgttctccgcctcgccctcgtcaactagtctactcagtatgcggaaaccccgcagcctgaaacacaggtgcggggttcctcgaaaagctgtgattgcggcttatgccgcacaaatcacttgagctcgacggaggcaccagcctcttccagctgagccttggccttctcggcatcttccttcttggccttctcgaggacggccttcggagcgccgtcgacgagagccttggcctcggccaggccgagggaggtgatggcgcggacagccttgatgacctggatcttcttgtcgccgacggcggagaggatgacgtcgaactcatccttctcttcctcagccggagcagcagcgccagcaacagcggcaacagcggcaaccggagcggcagcctcgacgtcgaacttctcctcgaaggccttcacgaactcggagagctcgaccagggtcatctcgccgaaggcttccagcagctcatcgttggtgtacttagccattatggcttcctttcaatcttggcggcggacgaagtggtagatccgctgcctaataaaccttattgtttaaattatcgaagcgactgattcatgccgtgagggcgtaaatcaggcagccttctcctgcttttcgcgcagggcgtcgatcgtacgcacagccttggtaggcagggcgttgaacaggtacgcggccttggccatcgatgccttgatgtcgccggcgaattcggcaagcagctgcgggcgggacttgaggtctgccagcttcttggcgccctcggcatcgtagacagtgccgtcagcggcggcacccttgatgacaagagccttgttgtccttggcgaagtcacggatgaccttcgcagcctcgatgaagtcgcccttcacgaaggtgatggcggtcgggccggagagaatctcgtcgagaccctcgatgcccgcttccttggcggcgatgcgtgccagcgtgttctttgccacggtgtaggaagtatcgcggcctagcttttcacgcagatcggaaatctgcggaacggtaagcccgcggtactcggtcaggtagacggcgtcagcgttacggaattcttccgtaagctgagcgactaccgcttccttttcgggcctcttcatggcgttccttcctaagtcggccgttgacttggagttcggaactttcggccgggcaacaaaaaagccctgcgcacaggcagagcaatataatctcgcgaagcgaccttcgccggcccttgacgggcttatatctctcaacctgcgctggcttggcgaaccaaacttcggaaatgcactcgcgcgcacttcaaccaacggtctgtggtttacggatgattagattacggatggtcagcgacattgcagaattcgggcgtgtcgcaaggcattacaacgtggcggcgtactgggctacggacgcggtgacttccttcagatagtcgagcgagcgacgccagtggccgggcacctcgatcgaatggttggcatccgggtattcgtgcacgtgcggggtgagcgcgttggcgcgggctcgatcgtagaacgggtcggcggtgccggcgcagatcagcggtgccgggccggagtatcgggagctggcggcgtgcgactggtcggccagttctgcgcggatgatcgcccttgcttcggccacgctcggagcctcggattcggcgacgatatcatcgccgacagccggcaccggaatcacccgggcggatggatcgaagtcggcgtgatgcagcaccggggtcagcagcacgaacggcagaccgtagtgtgaggccacatgtgggtaggtcatcgtcgtcagcgacttgccgatcagcaacaggcgagggccggacggggtgtcggaatcacggttcggcgagccagctgcgccatcggccagcacggtagcagaatcatcggcggcaacgccatccccggaatcaccggctttccccgcgccggactcgcgcgcggcggccatccagccgtcaatcgcctgattgaggaccggaatcaccgtggacaggtcgtcggaagcgttgcgtacgttcatgcggtcgattcgccagccggcctcgaccagagcctgggccgaccagtagagcagcggacggtcgcagttgtagccggtgccaggcatcagcagtacgcggccgtactcctgaccgggcttgacgacattcttcttccaagaggtgatgctgacttcgacggccggtttcatcgcgcgccttccttccacgggtgtgccctgcgtgtccctgagttgttccgaattattctggcagtcagtctactcccggacccgttcacgttacctccacaagctataatcggccacggttctgattggatgcgcagcgcctgacgcgcgttgggcaggccgatcagggcgagtcgcaattctcgccggggccagccgcagcattatgcgcgcggtgcgcagccccgcataaaaccaaggaagtagagagtaaatggagaagttcttccatttgaaggaaaacggcacgaccgtctcgactgagattctggccggcctgaccacgttcttcgcgatggcctacatcatcgtcgtcaacccgcagatcctgtcgcagacgggtatgccgtggggcggcgtgttcctggccaccatcatcgcggccatcatcggcaccctggtcatgggcctgttcgccaatgtgccgtacgcccaggccgccggcatgggcctcaacgcgttcttcacctacaccgtgtgcttcggcctcggcttcagctggcagcagaccatgtgcatggtgttcctgtgcggcctgatcaacatcctcatcaccgtcaccaagatccgcaagatgatcatcatggccatcccggagtccctgcaacacgccatcggcggcggcatcggcctgttcgtggcctatgtgggcatgctgaacgtcggactgatcaagttcacccccggcgacccgaaagccgcggccaagggaggcgccgtggcggcgaccccgagtctggccgacttcaacgacaaggtgctgtgggtcttcctgatcggcctcgtactggccattgtgttcaccgtgatgaaggttaagggcggcatgctgctggccatcgccatcaccaccgtgatcggcatcccgttcggcgttaccacctggtccaactcgcagtccatcagcgaaaccttctcccagctgccgcagaccttcggcgcgatcttctccgctgagggcttcccggcgctgttctccgacgtctccaagctgcctctggtcatcgtgaccatcttcgccttctccatgtccgatacgttcgacaccctgggcactttcatcggcaccggccgccgcaccggcatcttctccgccgaggatgagaaggctctggagaacggccacggcttctcctccaagatggacaaggccctgttcgccgactccatcgccacctccattggcgctatctgcggcacctcgaacaccaccacctacgtcgagtcttccgccggcatcgccgcaggcggccgcaccggcctgacctccgtggttgtggcgatctgcttcgccctgtccgcgttcctggccccggtcgtctccgccgtgccgtccgccgcaaccgccggcgtgctggtgatcgtcggctgcatgatggccgcttccctgaaggaagtcaagtgggacgacatcgccgaggccatcccggcgttcttcgcagccgtgttcatggccttctcctactccatctcctacggcatcgccggcggcttcatcatgtactgcatcgtgaagacctgcaagggcaaggccaaggaggtccatccgatactctggatcgtgtccgcgctgttcattctggacttcgtgtgcatggcgattctgtaacgctgattgacaacggattagcctttaaggattaatccgccgccatacggcataaaggccgggctctcacaagggcccggcctttgttgttgccacagtgatcaacgcccatgagtaccttcgatgatcatccgccattcaatcaacggctggccatgactcggacatggcgcggcacggcaagcggattttgctgttgggcataacaacagacgagagaatagatccggtcgtgagcaacaggataggtgccatgcggtgccgtgtacaaactgttgtcagttgtcaacgctttttagcgtggcttcaatcatcttaatggctgttttccgccattcttgatgcatgagaatagttgtcaactgacaactgaatgtacatggcagcagcacgagtgccctattcaacatcgaa

SEQ ID NO: 1622 - DNA, 9407 bp, Unknown
  R221_24m  MAG No. k141_71720
gggttacggaatcccttaccgcatgattgccttctcccacagtttctgcgcgtctttgagcactgtcacgtccggccgtaagtaatagcgggccgtggtctcgatgctcgaatgtcccagagcgcggctcacgacggccacatccactccggcagtcaaagcgctcgtcgcccacgagtgacgcaggttctccctgggcacgaaagggagacgctgctcacggcaccatcgcctgtagcggcggtccacctgcccgggattcaggccgccgacaagcctgccagacccgccgtggcggatcaaccgcagacgaagcactgcgaatcgggggagcacgagctccctagctgacagatcggtcttcggctcgacaacgacctcgtggccggatagccattgcacaccgcgccggattcgtaccattccgctgcgcaggtcgatgtccgaccattcgagaccgagcgcctcctcaggcctgagccccagcgttacactgcagatgagccatgcctcgagctcatgtccccagaagccgcgcagcagcgcagcgatctgccgtgcgtcgagcacgcgtggctggtgatccgtcctcttcggtcccctgacgcgcgtggtcacgtccacactgctcatgccccacctgaatgccttgcggagcatggtgcgaagaacgccccatgccttgcgcgccgcgccgcgcggcatgccggccatccacgtctcgatcatgccggcagtgatcgaatcgatctcaagcccgccgaaagcgtccacgatatggcatcgccacgcgctctcatatccgaccatggtgcattccctcaaattcgcgcatgacggcagccacacctcgtcatggaaaacggacaacagcatcttttaacctccaaatcccacacgtcgtcgcggccaatccgcgacgatcgccgtgtgggattccaagcctagaaaagaagcccgcatgcaactgctcgatcagatcgtcgcatggctcgtgcccgccatgtgcggcggtgcggtcacgctcgccgccgtggcggcgaggtacgggcgtgcggtgatccacgggctgcgcgtcctgctccgcgccgagatcatccggatccatcgcgaatacgtgcagtccggccgaccgatacccgtcgaggtgatggacgaggccgacgacgcgtacgacgcgtacagcgcgctcggcggcaatgggacgggaacgaagatgcacgacgagatcatggccgcgcacaacggcccgagaaaggagaagccatgacattggtgcatttccacctgacggacgcggagggctccggcctttccggcggcgtgagcctggtgcccacgcgccgtgtgacggtgcgtgacgcgatccgtctgccggtcgcgcagacggtgaggctcgatgccggcgaggccgtcgcggaggtgatgccctcgaccacccagtgggtatggagggtgagcgagctgatggcgggcggtgccgtgcgatatgtggaggtgccgttctccgccatgcaggtcgagtacgccgggctggtggacgtggatcccaagaccctggaccgatcctcggagaccgttgccgcgtgggagaccgtgacccgagccgcccagtccgccctggaccagatcgaatcgatcgacgacaaagtgacccgcgccgaacggtccgcgcaggccgcgaaggccagcgaaggcgtggcagggcaggagagcgcgaaggcgtccgacgcggccgcgaaggcactcgcatcgcagacggcggcggcatccagcgccagtctcgcgcacgaagccgagaccacggccaatggtctgatcggcgaggccaagaccatcgccggtcagctcaccgaaaccgccggacaggtcaagcaggatgcggccacgacatcccaagcggcgcagaccgccaccgtcaaggccgctgccgccgctaccgctcaggatagagcgcaaacggcgaggcaggccgcggagacggccatgagggccgcgaccgagcaggctactgcggctggtgagagcgccagtgcggcgaatgcaagtgagaccgctgccgcgaagtcggccgagagcgcggcgcagtcgcagtcggctgcggcggcatccgaatcaaatgccgcccgagccgctcaatccgcgtccggctcggccgagaaggcgaaggccagcgagactgccgccgatgccagcgcggcaagcgcgaagacggatgcccaggcggctagtgggtctgcacgggaagccagcgggaaggcagccggggccgcggccagtgcgaccaacgcgaaggcgtccgaatcggccgcgaagacctcgcagacagctgccgccaaatccgccgcgcaggccgccgatagcgccgccgccgtccccaagtggatccagtgcacggacgctgccgacgccgccgccaaaagcgccgcagacccgagcggattctactggtggccgagggaggcagcatgagcggcgtcagcatcatgggaaggcaggtgggcggagcgtgccgtgcgggccgcatgataggactctcgcattccggcacgcgccttgtactgcccaatcccgctgacaatctcatcgtcaacggcggcttcgagcggggcatcgacgggtggacgccgccgaagtcataccggatcgccgagaccggcgatgacggatacgtgactcgcgcgcatggcggagacaaatggctgtggctgtgttcgagcggcatcagcgatgtcaacggcgcgcgtcagaccatcgccgtcacgcccggcatgaactatcgcctgtcgtttttccgagcggaagccatcgggtacgacaataaccggtatgccgtcgcgaatatgtacgccgtggacggcaccaagatcgccggcctgtacatgccaccgccgccggacagcaagtggcgcgaatacacgctggacttcaccgccccggcggactgcacggaggcgaccgtcatgatctgcggcaattcctggtcgcgcatcgatgacgtgagcctcgtagaaatcatctaaggaggaatcaaggaggaatcatggcggaacaacttcggggggggggtatgcctccacgggcttgaagtcgcgggagcctaccatgccgggaaaaagataggactcggcaaggcggggagcctgctgttgcccgcgctcggcaggaacctcatcgtcaatccgggtttcgagacaggcgacatgaccggctggaagaccaagggcaacaacgtcatacagacccgcgaaaacagcaaaaacatcgtagagccgcacggcggagactattggatcatattcggcgcccgcggcagcatgctccaatcgtcctttttcacggtgcaggccggtatgacgctcgagattagcctatggaaggccgacgcctgggaaacgcgcaaacacgtggtgtccatggcgctcccggacggcaccgtcgatgacatcatcaagcttccggccatcgaccacaaggacctttacaagtggcagcgtttctcgactacgtggacggtgcccgaaggcatcacgagcgccgccctgcgaatcaacaccgtagacggcttcgggcgcttcgacgacatcagcgtgcggcagatcatctaaggagacaataatgaccgattatccgcttcgtggggggggggtatgcgtcaatggcctgccggtcgccggaatctatcatgccggccagcgcatcgggctgacgcacggcggcaccatgctcgtgccgtccggcaagaatctgctgaactacggcgtcgcgcaggtcgggcacatgatcgcgtccgtcatcgacgatggcggcctgcgcgtcgccgtcaccgcgccgatgaacagctggatcggctttcgctggaaggccgacatcgcacctgagcttcatgagggagacaagctcacgctgagcctcgaggacggcgatacccttaacggcatctgcttccaggtcttcttctatgatgcggccggcaaaatgctgcagcgagccaccttcaccaaggacaacataacgtctctgaaaagtctcactgtgccggccggcgccataacatacgacacttgcgtcttcacctacgggaaactgtccgaatccacaacgagcatcctgcacccccagttggagctgggcgacaagcgcacctgctgggagccgcccgaaaacctgcgggggggggggtatagcggctgacctcaacctgtgtggcaattggtcctccaggccgtggggctccggcaccatcacatgggagccgaacggtcatagcgtccgcttcaggcgcgatgccccggtctccggctgggatgccgccaactgcggcagcgtccttctgccggccggcacgtacagcgtgcgcgcggacgggttgtcatccggagtgggctgcgagttccgcgacgcgggcaaggacgtcaaactcggttatctcgtagaccactggacgaaggtgacctttgaccagccgacgagagtgtaccctcgcctcgtgtggaatcccaagtggacgggcgagggcaccgtgaccacggtcatcctcgaaggcgattggtggggggtgagcctctaggcctggagaacctgtggccgcaagccgatcaggcgaagtggacagatctctatacgatcacgcagacggacggcctgctcactatcgagatcgacagggacatgaccaaaaacgatggctggaacagcttaagcatccgttccatccgcttcgacgagcccacatgggtcacatggacagacgaaagcaacgccggcaccgtcaacgccattcccgacttcaccgatcacacgaaatgggcctgcaaccccaccgacagggagccgaagctgctgccggcaggcacatacgatgcctgcgtctcgctccatctcgccaaggccggcgcatacacgtgccgtccgcacttatacaggatccccgtctgacgcattccatttttccaaccaaccgcaaggccatcccacagggggtggcctttcttattgcccgtgaagggcggaagggagaggaattgagtatcctcaacaaaggcaagccgaagcacaggcacgcgcgcatcccgcgcaggatccgcacgccgttggccgcgctggcggtggccgtctgcatggcgttcagcccggccgcgatggccgacatggacgggtacgacatctcgaactggcagtgcggcatcgacaccgcgaccgtgccggccgatttcgtcatcgtcggcaccacatggggttccggcggcgtgtacggcggatgcctgtccaacggcgtcaacaccgacgccaaccgtcagctcgccggcgccatcaacagcggcaaggagacgggcgtctaccattacgcgcgcggcggcaaccccgagaccgaagcccggttcttcgtcgacaacgtgcgcggatacgtgcacaggagcgtcctgatcctcgactgggaggcgcaggacaacgcttcctggggcgacaggcagtggccgcgccgctgggcgcgcgaggtcaagcgcctgacgggcgtgaacccgatcatctacacgatggactccgggtactggcaggtcgccggcatggagaccgagctgaactgcggcatctggatcgcacagtacgccacgaacatggtcaccggataccagaccgcaccgtggaacctcggcgcgcgcggcgaggtcatgcgccagtacacgagcaacggcagcctcagcggctggtccgggcgcctcgacctgaacaggttccgcggcgaccgcgcggcttggcgcaagtacgcgaacccagacgacaagggcgcggcgagcctgccgaacgtcaggccgacgccacagcccacgaccgcgccgaaggtcgatctgaatgccctggccacgcgcaccatccgcggcgacttcggcaacgatcccgcacgacgacaggcgctcggagccaactatgcgtcggtgatggccatagtcaaccggcgactgtccggcagcggcgtcacgacgccatctggcaatgccggctcgcactgcgtcgtggtcagctccggcgacaccatgggcgcgatcgccagccgtaccggccgcacgccggccagcgcgtggagcgtgcctagcggcaacatcaaccgcatctggcctgggcagcaagtctgctacggcggttcggccgcttccagcatcggtgctcatgtcgtaaccacctcgcacgtggtcaccgcgggcgagagtctgtggaagatctatggttccggctggccggccgcggcccaacgcaacgggttgcgtgccccgtacacgatttatcccggtcaggtcttgcactgaccggcctcgaattttaaggaggtgtggaatgggcgaatccaataccaatggctacctgctgccggacaaggcgtatcaggcgctcaagtggctcgcgttgatcgctttgcctgcgatcgcatggctggtcggtgcggtcggcccgcagtggggattgccgcactgcggtgagatcgtcaccacgatcaacgcggtcggcttgttcgtcggcgctctgatcggcgtgagccagctcacggcagccaagccggacggttccgacgaataaaaaatcattgccaccgattcggcggcaacacttgacagagcttcgcgtcgaacttgacggctgttaagtccatgcgaagttgcccctctctcggctgatgctgggggaggggcgttttcgtgtttccggcgggtgtatcatacggagaaagcagaaaaatagagtctactttgagtgacactcaggtggtggaagcacgaaactccaagcgtggcgacgcatgcagaaacctcaccgctataaaccgtgcttataacgacactcaaattttcttaatgacttatatcaaggcgatttgtgatagcttgagcgggttgcattgttcatatcagatggaggattcatgtccgttctcacttccgtctccggtttccctcgcatcggccagaaccgcgagctgaagaagattatcgaagcttattggaagggtgccgcaacgctcgacgacgtgcgcgccaccgccaaggagctgcgcgccaagcattggaagctgcagcaggaagccggaatcgatttgattccgagcaacgacttcagctattacgaccaaatgctcgacactgccatcctgctgaacgtcattccgcagcgctaccagcgcctcgccttcgacaatcccgaagagacgctgttcgccatgggccgcggctaccagggagacaagggcgacgtcaccgcgctgccgatgaagaagtggttcaccaccaactaccactatctggtgccggaagtcgacgaagccaccgacatcaagctcaacagcaccaagccgttcgacgaattcaacgaggcgaaggcgctcggcatcaccaccaagccggtgctcatcggcccgtacaccttcctcaagctcgcccgcaatccgcaggccgaagaactcgaatatgacaagggcctggtcaacgcggtcgccgccgtctacgccgaggtcgtggccaagttcgccgagctgggcgccgaatggatccagatcgacgaaccgtacctcgtgctcgacaaggagccgggcgacgtcgaactgttcaagagcctgtacaccaagatcctgcccgcacgcgacggcaagattaaggtgctgctcaacacctacttcggccacatcgccgacgtgtatgagacagtcaacctgctcgccttcgacggcatcggactcgacctcaacgaaggcaaggacgagaatctcgccgccgttgaaaagttcggcgtcgcagagagcaccaccatcttcgtcggcgtggtcaacggccgcaacatctggcgcaacgattacgccgttagcctcggcctcgtcgacgcgctgaagaaggtcaccgacaacgtagccgtctccactgcaagctccctgctgcacgtgccgttcagcaccgaaggtgaggacggtctcgccgacgacgtgcgcaaacatttcgccttcgccgttgaaaagctcggcgaactgcacgacatcgcggtccttgccgacgccagcgaagaagccaagaaggcatccgaagcgttggccgccaaccaggcactgttcgacggtacccgcgtcgccgccgacaagaacgtggcggaacgtctcgcagccctgaccgacgcggacttcgtacgccagccggcacgcgccgaacgtcagaaggcacagcgcgagtcgttgaacctgccattgctgccgaccaccaccatcggatccttcccgcaaaccaaggaagtgcgcgccgaacgcgctaggctgcgcaagggtgagatcaccaaggcagaatacgacgaatacatgaaggcgcagattgacgcctgcatcaagcatcaggagcagatcggcctcgacgtgcttgtgcatggcgaattcgaacgtaacgacatggtcgaatacttcggccagaacctcaacggtttcctgttcaccaagaacgcttgggtgcagtcctacggcacccgctgtgtgaagcccccgatcgtatggggcgacgtgtcccgcgccaacccgatcaccgtggaatggagcgcctacgctcagtcccgcaccagccatgtgatgaagggcatgctcaccggcccggtcaccattctcaactggtcctggccgcgcgaggacatcacccacgagcagcagacccagcagctggctctcgccatccgcgacgaagtgctcgacctcgaagccgctggcatcaaggtcatccagattgacgaggccgccctgcgcgaaaagctgccgctcaggaagaccgactggcacaagaaatacctcgactgggccattccggcattccgactggtgcactccgcggtcaagccgaccacacagatccacacccatatgtgctactcggagttcaacgacatcatcaccgatatcgacgccatggacgccgacgtgatttccttcgaagcttcccgcggtgatcttgtggtgctcgacgccattcacgacgccaacttcgaaaccgaagctggcccgggcgtctacgacatccactcgccgcgcatcccgtccgaagcggaaatcgaggaacgcatctacgaaatcctcaataagatggacatcgaaaaggtgtggatcaaccctgactgcggtttgaagacacgcggcaacgccgaaacctggccaagcctcgaaaacctcgtggccgcggcccaggctgtgcgtgccaagctggccaagtaaggcgaaacgttaggaacaagacaacagccatgcattcgccaatgttctcgctcgaggtgttccctccaaagcgaacctcccctgtgggtaccatctacgacacattggatggcctgcaggggttggaccccgatttcatttccgtcacctacggcaccggcaaatcatccgaccgtacgctgac

SEQ ID NO: 1623 - DNA, 10824 bp, Unknown
  R221_24m  MAG No. k141_71834
ccatcagggccatgcggtcgttgtccatgatgagcatggtgggccttggcccatcctgcccgctgatatccggcatatgcctacgtgcgcttagctcttcttcggcttcagcgctgagggcatgggcatcggaatcggcttacggggagccggtttcggtacattgaccgccttcttgggtgccgatgcggggaattctccactggtcgccttggctgccgcttcggctgcccacttggcgtactcgtcgaggtcgtcctcctgcgcggcgggagctgcctcggcggcaccggaagcgtggtcgtcagcagcggaatccacattcttgtccgcatactggtcatccatgtcggcgaacgggtcaggagagcccgttcccggctcctgctcgctcagctcttttgccagctcatcgtaatcggtatcggtggtcaggtacttgagctttcgggcaattttctgctgttttgctttttgacgtccgcggcccatctgaccccctgcgattactgtgctgttcgattcatcaacaatagagagtaccactaatagtggcttgttcgttgtcggctcacacttttaccataaaaagcgtttatctgagccctatttaaaggattttcgcatgaccgacgagcagcaactgacagcggcaggcaatgagatgagcgcgagcttcctcgcggccaaaaagcgttcggacgaaacgctcgccaagctggaggccaagccgtcgtccttcaccatgttgaccggcgaccgtccgaccggccggctgcacctcggccactacttcggctcgatccgtgagcgtgtcgccatgcaggagcgcggcgtcaacacgaacatcatcatcgccgactaccaggtgatcaccgaccgcgacaccaccgagcacatccaagacaacgtgctgaacctggtgctcgactacatggccgccggcatcgatccgaacaagaccatgatgttcacccactccgccgtgccggccgagaaccagctgctgctgccgttcctgtccctggtcaccgaggctgagctgcaccgtaacccgaccgtgaagtccgagatggaggcgtccggccacgcgctgaccggtctgctgctcacctacccggtgcaccaggcgtgcgacatcctcttctgcaaggccaatgtcgtgccgatcggcaaggacaacctgccgcacgtggaaatcacgcgcaccatcgcccgccgtttcaacgagcgttacgccaagaagaacccagtgttcccggagccggccgccattctgtctgaggcaccggagattccgggtctcgacggccgcaagatgagcaagtcgtacggcaactccatcatgctgggcgccaccgccgaggaaaccgccaagctcatcaagaagagcccgaccgattccgagcgccgcatcaccttcgacccggttgcccgcccgcaggtctccgccctgctgaccaccgccggcctggtgaccggccgcgacccgaaggacatcgccgaggagatcggtgattccggcgccggcgcactcaaggcatacgtcatcgaatcagtcaacgagttcctggccccgcaccgcgagcgccgcgccgagctggccaaggacatggactccattcgtgacatcctgcacgacggcaacaagcgcgccaacgccatcgccgaggagaccctcgaccaggtgcgcgaggccatgggcatgaagtactgattttcccgccgctcgtagcaagacgccgtgtcagccccaactgggcaactgacacggcgttttttgtattgcggcgtctgctgtgtcctatcttcacttcgaggggcggatttcttgttttccggaggtctatctccgcttcgaggggctgttgctcaagtaggcgaggcacaaaaacggcggaatgacgttggcgtgaatgggattttatctgagattgagcgcatgaccagccccttgaaacggagatagacctccggaaaggctcaaatccgccccttgaaacggagaatcaagcgttagtaactctcaattcaaaaaacacaacatgttttccgtgcaacgcggctatcaagacggacctctggtcacttcatgccgatggcttgcatcaatacgtacgctccccgcacagcaatgtcattacgacgtgttgcggcatagcgcgcatggcttccggagtatcggcggcgtatgggtcggcgtccaacaacaccatatcggccgggtcgccggatgcaaggcggtcacggccagtggcggtcgaggctgccagcgaggtgcgcacatcgaggcactgctcgggctggaacggctcgcggtcagagctttcggagccgaacacggcggcggaaatggccagccacgggtccagcggggccacgggcgcatccgagcccatgcgcagcgtggtaccggcgtcgtggagggccctgaacggataagggataccggccgggttggcccagaaacgggtgatgacgtcgcggtcatccatggcgtgctgcggctggatactggccgcgagccccagctcggcgaaacgcgggatatcgaagggtttgagcatctgcgcgtgctcgatcgatccatgtgcgtgcgtggcggcgactgcgttgagcgcaatggtgttcgcttcgtcgccaatagcgtggcaggcgatgtcgaagccatgctcggtggctaggcgcatatagtcttcgatttgctgcggcgtgtagctcagcgtgccatacgtcggcggctcgatgcccgaatacggcgtggagcagtaggcggagcgggtgttgagcgatccgtccgagatgagcttcatggcgcccacatggccgagcccggcgctgcccggcagtgggttgccggtatgccaacccgcgtcaatggcggcttgcaaccgctcggggtatacaccagcgtccacgcgcaaaccgttaatgccggccgcgaaacgattgatccacgtatcgatgttttcggccatttcataatcgcggatgcccaccacgcccttgcttgcggcgtcctgttcggcctcgcgcagcagacggtcagtctcttcagcagcgcccggcaccttgtcgaaggcggtgtaggcgttgaaccattcgagttcaccgaccagaccggattcgtccacatgtacgccaagcctgcgggccgcggcggagttcacccatccgcagtgcatgtccgcgctggagagggccaccggctgttcgccggtcacggcgtcaattgcagccagtgtgggctgctcgtcgtcggcccacagcgagtgacggaatcgcatgcccaccacgaaggcatctgggtcaagcgtgccggcggcgcggcgctcatccagatgacggcgcaacatgtccatcgcttcggcggcggaacgggcattgatgaggtccagtcggcccagcgtcttagcccattgcgtgaagtgcgtatggcagtcccacaggccgggaataacccacaggccgtcggcgtcgatggtggtttcgtcagcaggtgcggcggccgacgttgggattgagacgctgccagaagcaatggcattcgtcgcgtatgccaacgatgtcgtatgcgccttagtctgcatcgtgccgtccgaagccgagaccgttccagcagggccgacagacgcaacaaccccatcgcgaagcaccacatccacgcggtcctgagaccccggaacaccggcattgacaatacgcaccaagctactcatacccgccatcatgccacctttgcatgaacgccatggagattcgttcaagctgaatcgcgccgtcggcggcgattcccgctggctgcctgcaaacccctacgttccatgtaattgcgggatgcctgcaactgcgatgaacgcccatagtttatccaccgacttatccacatttatccaccgaaaaattgaggcggtagacagggccggtagccggaccctacactgcgaggacaaagcgaacatcacgaaggggtgatcatcatgggtagctcaacggcattgaccgagctgacaatgcagaagtatcaacgaatgcagacgtgcgcagatgttcaacgacgaagcgcatggcacccaccctatgccctgacaacagcattggagcttttgtcaattgaagtaccccgcatatcaagcaaacacagaggccttgcaactacaaccattgttgcggttccacacgccaatgacaaacggcacattgtgggggtcaaagtggttgtatggcctttcccactagacacggtcataatcgagggacaattcacatgcacttcaccagcttgcacatgggccatgttctccgcgtatctcgaacttgaagaactcatcgttctcgctgattccatgatgcgacgagatcgaaggctctgcagaacaaccatcgacgccctttctctgtatctcgatgaggccgaggcccaggtgcgagccgacaaagagaatggcaccaattcgtatttgttccgcgggtataacaaatgccgtcgcgccctgcttttggcgcgcgcgggcacagattcctccatggaaacacgaactcgtttggttctcttgaaatacggtctggattgcccgcaggtgaattatccaatattcgtaggaaacaacaccagacccatatatctcgatcttgcataccctgaattcaaggtatgcatcgaatacgaaggctctcatcatgccgggcaatggctgaatgacgcgagacgccgccagatgatcgaagacgctggctggaagtacattcaagtcaccaaattagatattggcgacgaagcgggagaagaggcccttgcccgaagagttgccgagaggatacaggaggttacgggcaaaacggtccagctcacgatgcggcaaaccacccagcaaattagcgatgtccgaaagctacgccgtattccgctgtacaaacggctgaaattcgagcctctgctgccaattattccgacgacgcaggaataataagcccggtagagtcagtccgcaccgtccgcaccgcgctacggtattcaaaacccatttcaaggggctgatttggcctccgccggaggtctacttccgtttcaaggggctgatcatccgctagatcacgtgtatcaatgcccttacgccaacgccattccgccgttttggagccgcgtctactcaggcatcagccccttgaaacggcagtagacctctccagaacgtcaaatcagcccctcgaagtccgttttggcctcaatggttcctgccgaaccacaaaaaagccactcctctgccatacgaggcgaccgcacagcaggcacgtgtcatttgccgctgcgaacctcggactccatggcttccatgggctcgtcgacgagcacggtgccggacggcagggtgccgggcagcggatcgtccatgtagtggtcgaattcgtagagcatacgctcgttcggcttggcggtcagcaacgaaaccaccacgatgaacagcagcgaaatgatgaacgccggcagcagctcatagatggcgaatacgccacccaagggcttgacgaggttgtgccagatcagcacggccgccgtgccggacagcatgccggccacggcgccggccttgttggcgcgacgccagtatagcgagcacagcatcaacgggccgaatgaggcgccaagcccggcccacgcgtaggacaccacctggaagatcgacgagttctggtcgtatgccaccagaatgccgaacaggaacatgaccaccagcgtgaccctggccacgatcatgacctgcttgtcggtggccttgcggtgcagcagcccgcggaagatgttctcgcccatggccgaagcgccgatgatcagatacgaggagctggagctcatcgaggccgcgaaaatgccggagaccaccacgccgcacatgaagctcggcagcagggtctgcgccagcacgatgaagatggtctccgcatcggtggaggtcagcagttcggtgggcatcatcgcgcgccccaccaagccgatgcacaccgcgcaacccagcgaaatcacgcaccaggaggtggcgatgattcgggacttgcgcacttcttccacgctgcggatggacaggaagcgcaccagcacctgcggcataccgaagtaacccaggccccacgccagcatggaaatgatggtgatgatgccgtagtcggagggcgcgccgaacacggccttgcccgcctcgacgagctgctggccggtggccgggtccagcttgggcgcggccacctgcgtgccggacaggtagccggggatggcacgcaggaattccacggtgttgtcgatgccgcccgcgctggccacggtgccgatgaacaccaccgcgagcgcgaagaacatgagcatgccctgaatgaagtcggtcatcaccacggacaagtagccgcccaccacggtgtagacgaacacgaccaccgcgccgatgatcatcatgacgtggtagtcgaaaccgaacaacgtggcgaacagcttgcccacggtcacgaagcagctgcccacgtacacgctgaagaacaccaggatgatcacggccgcgatggtggagaccacgcccttcttgtcatggaaacgcttggcgaagaagtcaggaatggtgatggcatcgccggccactaccgagtagcggcgcagtcgccgggccacaagcttccagttgagataggtgccgagcgccaggccgatggcggtccacatcgggtcggccgcgccggtgaagtaggccaggcccggcaggcccatcagcagccatccgctcatgtcggaggcttcggcgctcagggccgtgagccacggccccacgccgcgcccgcccgcaaagtattccttggaagaggagttggagcgtttggagtagatgaatccgatggacagcatggccgcaaaatagatgaccatggccagcagaatccagaaatcgttggccaactgcgacacctccccaatcatgacgccaagcggctaccgccatggcagaactatgtgctgatatgcgtgctgatatgcgattgacgccggagcggcgtcatacagaccgtcacagccgtgaatacggccgcaacgcacttcgcctgatggtagtggatacaagggctcaagcaccttccaccgtttccatactgagacgctgttttatccgagctccccacctgaggggagccaagatgacggtcagatgtcgtagcgccaggacttgtcggtcaccacgcgggccatcgccaagccgatcggcagacagataatcaccatgaacgcacggaacgcccagtccagcgcattcatggtctggaagctgccgaggtaccacatggcacggtacatatacagaccgggcaccatgatcacgatcgacggcacggtcaggcagatgcgcgggtagccgaggtgcggcggtagccagccacgtcgcacggatgaacgccacgccgatgccagaatgcccgccagaaacgcgccgatgaaggtagccatctcgggtgccacgttgaagtcctgcaattccaagcgcagcgtgtccgtgatcgcaccgatcagggcggcggccaggcacatgcgctgcggcgaattgaacagcacggagaagccccacacgccgacgaacgccgccacgaaccgcagcaatccgttgacccacgggtcaagccccagcggttcaaagccttccgggtgcaggtgcaccatcacggccacggcccagcctgccagcgtggccatcaggatgatgcacagcacgtacgccacgcgctggatgcccgaggggaagtcgattttcgccatgtcgagtccgccggtgatgagcgggaaaccggggatcacgaacagcatggcgccaatgtaggccgtatcgtgcgagagcgcgactgggtcgaaaatgccgatgagtcgcagggtgccggtgcaggcgagcgccgccgcggccacgcacacaaaggtgacgaagaactggttcagatggtatgcaaacagccggcgacgcatccactggccaaggcccgcgcccacgaacgcaccgatcatgtcgtatgggccgccgccgagcaggaacacgaaggccgcgcaggccagggcggaggccagaccggagaaccacggcttgtacagcggcttgcggcgctcaatcagatcgagtcgctcgtgcgcctgccgcacggtgataccgcccttggccttctcttcgtcggagcgctcgttgaagtgttcggcgtattccttgggcacgcgattcttgcgcttcgtactgcttgcagcagggctttcggcggttgcgccgttcgccgccgcgccctcagcgcccgcctcggcattcgccgcgttcgccgattcaaccgactcattggagtcaccggtaaacacttcggcatcgtcgtaggccttctcttcggccgctttgtcttcgaccgaagtgacttccgcgctgtccgccaaaagtcggtgggcttcttcattgtcatcatccaaggacttggccacggaggtcacgagtaccttggttttcaacgcaagatccagcgcctcgtccacgctgccgttggccgcctcagcctcggccttggcacgttcgcgcaggcgcttggccagatcggccgaatactgcgaagcgtcacgttcgtccaaatgcttgaccacgccatcggacagttgcgaatcgacgtgatacatcgaccccttgccgagattcacggagaaccagtcggcgaaatgttccagcagccagatacgttcggtgttcacgccggtggtcggcaaatccacgacttcggtgatgcggttacgaccatccgtgcaggtggcctcgatatccgtcaggttcacgtcggcgcgtacgtgcacgcccagcgggtaggcgatgcggtgcatcatttcacgcacgcggaaggagccggtgccggctcccaggtccagcatgccgacccgtacaatcacgctggctttggcggcgataccggcgtccaccaccggtttttcccaatcgcgcgcaatatcttccatgtccagcggaatggagtgggtgtggaatttacgtacagccgttgcgcctttcgcttcgggcgcactttttttcttctgttcgctcacatccctcattactactccctgcctcccccgccagcaatcgtaaggtgctcaaatcttccgcgaatcggacagtgtctcatatgctgtccgatattcggtctctataggtggacaacttggcgcactatatggactccgtaacgcaaatagcgatttcgcggggatacactattgcccacacaacaaccacgttgaatatgggctgtgggctcgcaacgactggcctcaacaactgcggaggagccgcagacgaccggtagaccgagcaacctgttattcggcaaaggaggttatatggcaacacctgaagaacagatcactcccgctgacgccgccatcgtcactaccgggaccggccgaaagggcccggaggagcatgatcttcccgaaagcctgaagtacgacatggatctgtgtcttgagatcctgcgtaacgtactgggcgaatacaaccccgaactgctgtctacgttcgacaccgtgcgtcattacgcggtggaggccagcgccgagcatttcgccgagctgaaggatccgaaccccgaccaggatggcctgaaggaggccgtgaacgtcatcgacaacatgacgttgcacgacgcccagctgctggcccgcgcattcgccacgtatttccatctggcaaacctgtccgaggagaactaccgcgtttccgtgctccacgagcgcgagaacaacgtgtccgttgaccaggcggtcgacccgatcaacgagctcaccgtcgcctaccaccagctcatcaatgagactggcccggccaaggccaaggaactgctcaaccagctcgaattccaccccgtcttcacggcgcaccccactgaggcccgtcgtaaggccgtggaaggcaagatccgccgcgtttccgaattgcttgaggagtacaagcgcctcggcggctcggataagaaggaatgcctgcgccgtctctacaacgagatcgacgccctgttccgcacctctccgatcgcgctgaagaagccgaccccggttgaggaagcggacacgattctcgacatcttcgacaacacgctgttcaacaccatccccaaggtctaccgtcgcttcgacgactgggtcctgggcgataaggccggtctcgtcgagcccgcttgccccgcgttcttccacccgggcagctggatcggctccgaccgcgacggtaacccgaacgtcaccgccaaggtgagccgcgccgtggcccgcaagttctccgatcacgtaatcgccgcccttgaggaagccacccgcaccgtgggccgcaacctcacgatggaagccgagaccacgccgccgagcgccgagctcaagagcctctggagccaccagaaggaaatgagcgagcgtctgaccgacaaggccgccctgatctccaccaaggagatgcaccgcgcggtcatgctggtgatggccgaccgtctgcactacaccatcgagcgcgacgccgacctcatgtaccactcctgcgacgacttcctcgccgacctcaaggtggtccagcgttcgctggccgccgccggcgccaagcgttccgcttacggcccgctgcaggatctgatctggcagaccgagaccttcggcttccacatggtggagatggagttccgtcagcactccgtggtgcacgcccgcgcccttgcggatatccgcgagcacggcctgcacggcgagcgcggcgaactgcagccgatgacgcacgaggtgctcgacaccttccgcgc

SEQ ID NO: 1624 - DNA, 32239 bp, Unknown
  R221_24m  MAG No. k141_74855
agcaggctgccatgaagccggcggacaggacgatggagccaatcagtgcaccagcccagcgggtgacgcctccggcgttgatcatcggggcgtagacgaactggacaaaggggttgcgggccgcgccgaacctatagggccatccgcttccacttgcggatcttcgtcctgaacgatccgaacggggcgacggtgttcacatgaatgaacctgtacacttcccataccgccgttttggtggcgtcgtcggcccattgcctcatatgcggcttgaacagctcgtcctcgctcatcgcatcgatcatcatatatatggcgtcgacgttgtcggtcaacatgccctccagctcccgcagcgaaaggtgggcgtaggtgtcgttgaaccaccggtacagctttccgagctggttccacttgaactcatccgacggtgttcgcaccggaaggcccctccgctcgcgatcctcccactgcagcagcagggtggtccaaccgacctgataggcgaggttttccgccggggtcctctcgacctcgtcgatgcgcttgtctttcagggcttccggaatatcgtcgaactccgcaatgtatttgcggaacgccgcactgatctcctctttgagctcctgcgcgttctcgtatgttctcaccatgcacctcccggtcgccgtgcgtcgctgtgacgatgcgggcatcgtatcagtccggcggatgtcgtgacgtcatcggcgtgtcgtacccgttcgacatgcaaaaagacctccgtgctggacggaggccttgagaaatcgtgtgggactcggctacttcaccgaggccttttcgatcagcgtgcagtggatcttcgccggaatcggcgcgtcgatcggcggcaggggagcggtggtcgctggccgtgagacgtcgtccatcgagcgtccttcgatgatcgacaccagcttggccacggcccagtagcccatctcgaaatgcggcagttccacagtggtgagcatcggttccagcgtctcggcgaacacacgatggttgtccacgccgaccacggagatgtccttgccgaccgtgagtcctcggcgtgcggcgcattcgtacacataccaggcgcgggcatcgttgaagcagaagaatccgtccggatgctcggcgtcgaacaaatcgctgactgcggtcagtgccggcccgttgttgagcacattgacgaccagatgatcgtcatagtcgaggccggcatccctgagcgccgcctgatagccttccaaacgaccgtcctgcgcaatcatcggttccgagcaacccacataggcgatacgtgcgcatccggccttaaccaatctggtggtggcgtcgtagccgattcggaactcgttcggttcgacgctcgggattttgccaagcgagtcggtggcatccaccaacaccagtggcgtcttggccagcgaagaaggcgcatgggtgatgcggttcgacatcttggcgtacaggaaaccgtcggtgccgtatcgcttgagtgcggcgatttcctcgctctcgctgttctcaccgtcggtgctcacggtgatgagcatatagccgaactggcttgcggcggtctgcgcgcccagaatcataccgccggcgtacggggtggtggccacctcctcactgatgaaaccgaggatgtgcgtcttgcctgtacgcagcgaactggccagcggattcgaccggtagccgagcttggtggcgatggcgcgcacattgtccgcaatttcggactttacgcgcccctcgtcgcgtccgttgagcaccagcgacaccgtagagacggaaacccccgccttgttcgcgatttccttcatcgtagccatgcgtcaaacgatacaccctaattgacggactgtcgggaaagtatcagtgttctccaccgactccgccgaggttgcgcaccgcaccgatgaataatggtatgccgtccggggtgacgtacgaatacaggaatgggcgatccaccgtgaactcgatgttgtccaccggcgcgctagtgaagtctgcgccggctttggtgaaggacatggccttggcgccggcctcgttcacctcgatgcgcgtgccttgcagaatcgaaccgatatacagattctcgccgtgcgaatcggtgtcgaccatcttggtgaagtcggcgtcgcctgcactgaacgcatcggtcacccccagtttttcgaatgccttgatggtggcttccgagtcgaacatgctgtcgacggtgaatcgtggcagcgagacgttcaccgtggccgagttgacggagacgccccatccgggcaaactgtccgcggtgcaacccattgcgtcctcgccaggggatgccgacgaacacgtgccgaacgcccatccgagtttctcggcattgccggccagctcgtcgaaatgccctttggccggcagcacgatggccagattgccgctgttgtcgaatggaatctccacccgctgccaagtgttgtactcatcatggctgtaagtcatttggctgaaggtccggtgcatcatcggcacctgagcatctccggcttcgccgtggaaggtgccgtcgccggtggactgctcttcgaacggatccttccagcggccatccgcatagacagtgttgatgatggacaggacttcacggtcacgcagcgtgatcttcggcttgagcgaaccattcgtatgcttggcaatccaatcggacatcttggcggcggcctgatcgtcgaacggtagcgtggtgacttcggcctcgaacattttcttgacggtggattggtaatcgctggcaagagagtagttgttatcgatccacagcgagttcgcggcgctcatctcggatttcgcccccgaatattgcccgttgatcgaactcagcagcgattggtagtcgctgtcggccagcgaaccggagcccagcagctcattcagttgcgagcgggtcgtgccattggcgccctgcgcggcgatggccaacgccatccacatcgaagcaggggagtagttcacattaccggtgtctcggtcgccggctcccatcgccaggaattccggtgcggtgcggtaggcgaaggctgcggtgctgtcgactaccggctgcgtggcaggcgtggccttcggcttgaacatattgcgaaccagtgcgctgccatcgccggccgtccaccatacgccgccggcgacggcaaggacaagcactactgtcacgatggcggcgatacaagcgttacggcgtttgcgttgtttgcgcaaccggtactgttccatcagtttctcgctcatggtcagcccctttgcttggatcggctcgtgcatcattgcacgaagcccctgattccagtatattttggtctctcttattttgtgcgacgagccacaatccaccgcacggcccacaccacgccgaatccgaggaagctcgccacggcgaacacgatgacgaaatgcaagacctgatccatcgagccccaggagaggtatcggtcgccaatcagcgtgcaggtacttcctatcgggcacgtgtcttcatacaccgtgatgagcgccatgagcatcggcgcaggtaccagtgtgcacgccaacgggaacagcaggcttttccacggatacgtcagtgaggccgggcgtagcgcgtagatgccgttgatgaccagcaaggcgggcggaatcacaaaattgattagcaacgcggcggccatcgcagccatgccgccccgtaaggtcagcgccaatagcaagccgtacatgattgccgtcgccagccagcagccgaagcgaatcgcatcctgacgaatccatgtgagcagtcgtccgctcgccgtctgcggattcggatccacaaacaattcgcgcagaccgtagcgtccgattgcatagcagatgaacgcaacggccgtataacagatcaacagcatggccgagccgatcaacgaatgaaccaatagctgatggccgctttcagcgtgcattagcttccaccactgagcccaggaacggtatgggaaccccggccgtaagcgaagattggtacagccgaatgccagcggtccgatgattgcgctcgccaatgggaaagacagactgccggatcgtatcgaaccgagtatcaggttggtgattcccaacaccaatggccagtgcagaaccataccggggaaccatacgaacaggtttttggcagccctgtcaaggacctcgtcgggcatgagatacattgatgagctccactgcagcagcaacaacaccgctatcagtacaaccatgccaatccaatgcgcgcggttccacgcgaatattcgttgcgtcccgcgctcggcggcggcattgcgcatatcgctcctgttgagcttgctgagtgcttgtgcacggttcattgcagtcctcctttaccgccttgtcaaggattgatgatgattccatcgtaaatcgcgcaggaaatgtggaatgatagttgtcatagtgaccatgacatgtcaggacggagcagttcggcgtcgggcacactgaaggggtgaatgtaatgggagaggcgcgcaaccgcaacatacgcatcggcattgtggacaatgacccgtatgcgctgaaagtgttcggcgcgctaatcgagcgcatgtccagcgattttgccgtgatatggacctgcgatttgggtgccgtggccatcagccgatgcctgagccccaccaagcggcctgacgtgctggttacggatatgtctatgggcgacgtgcccggtaccgaagtctgtcgtgcgattcgtaccaaaacacccgaggttgggctggtgggtgtcacctcatacgcgctcgcgtcatttcacgacgaggcggctcgctgcggggcgcaggccttggttggtaaaaccgatttgaacggcattgcgctcgctattcgcaatgcagcccaaggattgtcgaccaatgagctggtactgggagatgaggggagcggtaattcgctgtccttcatggatgccgcaaccgcctacgcggtgctcgaagatacgtcatacgtgcaccgtggcgcgctttccggcaaagaacgcgacaccctgcgtatgtatgcggatgggtcgaccaccaaggaaatcgccgagcgattgggcatcagcgtggccactgtggcgacttttgaacgccgcgcactcgccaaactcggcgctcgcagtcgcgctcatgccatatcaatctgcgtgaaacggcatgagatttaagagttggcatgggcggtatgtgcaacggcatggatggtaggaaaggaactgctatgaaagcgttacgacaccgattggccgagctggatagcggtgttcgcaatgcatggctgttgattgccatactggttgttgccttgatatgcacgatggaaaccatggcgggcttggctgctgacagtgtctcggcggcggactgccttgcggagttcatattcgttgccattgtggggtggatggcgtttcgtccggtcaccggatgcgtggcggtagcggtggcttggatagtgttgtgcatgagtccgatctggatgccgtcgggtgcaatgctcgccgtgttattggcggtgggtattgccggatacgccgataagcgattggcgctggcggttgccggcattgccgttgtggtgtggatgttgtcgcgtggtggcgtggccattccttggcttgatggcggctcagacacgatgagcggttctgcggatggcgcggcgagtagtagtgccctagacggtagtgttgctgatggtggcgctgctgatggtggctcttcatccagtgggtctgacagcgcagggcagtcgggaagcgacttcaccggaagcgcctatgaatcgagcggttcttctgccgagcatcgcactgggcaagtgattcttggtgcgattgccctctatggtgtgatgccagtggccgtgttgtttattggcttcatgcttggtggcatggcggcgcgatggaatcacgaacgcagcttggttcgagcggagttggctcaccgccgtcagcaggaacgcacagctcaggacattcacgattacgtatccaatgatttggcatacctgattttgcgattcgacaaggatattgccgatggcaagaccccttctgaagaagaattacgcgaactgcgtagcgtggctatgggcgcattggatcgcacgcatcaggtcattgatgttattgaaggcaggggagaagcggcgcacagtgcagtgactccgcatgattcgaccgttgatgccgcttctggcattgcatgtggcatcacagacgctgattgcccgctagccgagcaaattcgtgatgttgcgagcaatggtgaccgccgattatcagagcttggctttgaaggtcagacgattatttccggtgctcatggcgcagccggtcggagtggcctgatcgccgggctgctggaggaactgtacggcaacatcgccaaacatgccgacccggaagcgggctatgtaatgacgattggcatcggactggacaccgtccgcatcgcctgcatcgacacggcccgcacgtcatcggattcggatgcggatggcagtgcggacctatccaccggtaccggtctcaaccgttaccgacaattactagaacaacaaaacggcgccctgcatatcaccacgcaagacgccgaatggacattatcagcagttattccactgtgaggaaaccgatcacccaaccgacttctgcgcagtctccgcgccaaagaagccgacaatcagcatcgatgcaatagcaattgcgctgatggccacaaagatggacgtggcaccaagcgaggtaagcatccaacccaccaccataggcatcaacacattgagcagcttggccacggcgttcgcgaagccgacgcaacggaagcgaaccttggtggcgaacagttccggagcgtacacagccaccacggaagccataagcacgtacaggcacatcatgagcaggaagccaacgataattgcgctcacggtagaggtctggaaggcatacattaaaccgaacacgccagtgaacaggaaggccggcacaatcgtgcgcttgcggccgatgcggtcgataagcagagagccaatcaggcagccgaccggggcaccgagcatcatcgccgtggaggtgagcagcgagctggacaggttaataccacgcttgaccagaatcgtcggaacccaagaagtgaaggcgtaggagcacacgttcgtggcggccacagcaaccacagctacaagcaggcagatgccgagcgaacggccgccggcgttgcgggtgtcgctggtgtcggccttggcggctgcgtcgatcagttcggagccgttggcctcaagctgcttgacgatggcgtcggcctcatcgtaacggccgtgcacggcgagccaacgcggggattcggggatgtcgcggcgcagccaccagatgatggcggcccccagaccgatggccacgaacagcggacgccaggaccagcgggggatgatccatgcacacagcagcatagcgatcggcacaccgcagttggccacgagcgagacaatcgcgcaccagtggccacggcggttcatcggtgcgaactcgttgaccatggcgaagccggtgacgatttcagcgccgaggcccaggccggcacccagacggcacagggacagcacggccatgttcggggcgaatgcgccgaggaaggtgaagccgccaaacagcagcaggttgatttggtaagccacgcggcggcccttcaggtcaccgacgaagccggccagcagcgaaccgaccagcagacccaggaagcctgcggacataaaggtggaattttgcgcaacggtggaccagtgtgtggccaacgcgctggaggcaacggcgctgccaatatatacgtcgatgctgtccatcagcatgccagcggcgaccagcgccacgatgcgatggaacatcggggtttcatgtgcgcgatccacgcgcgagataatatcctgaaccttggcttgatccgtcacggtggtacgtgcttgtgcgctttccatagccgcgggattgccggaaatctgctgttcagcagcagtcatatttgagccctcttcttgcaaacctgcccgcgtgcaactgctcaatgatgttgcggcgagcgaactcttgattggactgcgtgttccgttcgccctcccattgtgtgggatgaacgacgtttgcagtccaagtcttgaattccacgtagcgagccaatcgttgtgagatagctcactacatggggcttaactataggttcgatcttgtggcacgccgcgttgcggtcacattatgaacgataacagagtttgtaacgctcctatatatgccccacttacgctcttaccccgttgaaagaaggcagaaccgtgattcccatggggcggtaaaacactcatggggcggtatttggcccatggggcggttagcggattttgcctttccgcagaatagagccgttttcgcctaccgccccatgagggttttaccgccccatgagatatttaccgccctatgggtgagttaccgccccatgaaacgtgtaataacaaagcatgcccttgctggtggaagcgatgctttgctatttcgcctgcttgtcggcgaggatctcatccaccagcttgggcttttcggtcagctgtccggtgaagccgggacggatatccatgtgcagcaccagagaagtgcggtagccctgctcggcgagcttcttggcggcctcaccggccaccttgagcacgtcgtccagattgccttccacgttggtgaacagggcgttggtttcctgcggcagggcggattcgcgaatcacttcgacggcctgagccacgtatggtgaaacctcggagcccacgccattggccgacacctggatggctgccacggtgttgaggtacggtttgccggtttccgggtcgatcggcacttcctgagtaacggcattacggtcaagaaccatgattctcctttttcagtagtgttaagctcccctggcaaggggagcttaacaaccacacttatgtcagcgatacttccagaaatgatccatcgggccggagccgtggccgagattcagctgggtcttcagcgcaccggtcaggtacttcttcgcatgcttgatggccttgggcaacgtgtcgccaagcgccagatacgaggcgatggcggagctcagcgtgcatccggtgccgtgcgtgttcggattcttgatacgcgcgccatcaaaccaggtcacggttccatccgtctcggcaagcacatcgttggcatcctcggtgccatgaccacccttgaccagcgtggcacagccataacgctccacgatgcggtgggcggcggcctccatatcctcctgatcgcgaatcagcgtatcggtcagtacttcggcctcgggaatgttcggagtcacgaccgtagccatcgggaacagcttgccggtcaaggccgcaatggcatcgtcactgatgagcttggcaccggaagtggccaccataaccgggtcgagcacgatgttcgtggcgtgatggaaggtgagtcgttcagcaatgacgtcgatgatgtcagtggcagacaccatgccgattttcaccgcgaccggcggaatatcctcaaacaccatgttgatctggtcggcgagaatgtccggtttggtgtcctgaatggaacgcacgccggtggtgttctgtgcggtgagcgcggtgatggcgctcatgccgaacacgccgcaagccagcatggtcttcagatcggcctgcatgccggcaccgccggacgagtcggagccggagatcgcgagaacagcgggcagtgtagatgttgcaatttgtgccatagtgttcattctaagtggggcccatgatgtttttcggagcgatttccttgatgttttgccgctcctgtggtgagatggggagggtttgctgattgcgattgattcatgaaatgttcgggaggggacatggctgataacgatgtactgcgccgtgacggcgtcttggtgcgcatcaccggttttgacgatgaacgcaccgcatattttggcgtaatgcctaatgggcacaccacacagctcacatttccgcgtcaggaggtgttcgatgtgggcgacgtgttgctcgtcggcacggatttctatcgtaaagtgccgcatgatgtgtggccgttgaagccccgtgtgggcatcgtgcgccgtgcgctcaacgaaggcgtggtcctggagacttccgacggcctcgaactgcttgaaggcgattacccgaattcgatcatgcccggcaacaccgtgcagttcaccgacctgttcggcatcgaacgagtgctgtggcccacggccatccgcccaggcgaatccgatcacgatgacgacatcaagcagtaccgcatcacgccgggcagcgatccgtcgcttaccttcgattcgttcggcggttatgagcaggtgatcacgcgagccaaggagcttatcgaaacgcagctgggcaacagtgcgcagatgcgtgcgatcggtgccaagcccatcaagggcgtgatcttcaccggtgctccgggcaccggtaaaacacatctggcccgcatcatcgccaatgtggcggatgcgcagttctatctggtgtccggcccgaccatcgtgagcaagtatgtgggcgatagtgaggaaacgctgcgcatgattttcgccgccgcgcaggcggacaagcgcgccatcatcttctttgatgagatcgattcgattgcgtcctcgcgcgagaacgataccaatggcgtcggcaagcgcttggtggcgcagttgctgacgttgatggatggtttcgagtccaagggcaatgttgtggtggtcgctgcgaccaatcgtattgaggacgtggatcccgctttgttgcgtccgggccgtttcgactggcagattcctttcccgatgccgtctgagcgcgaccgtttgggcattctgcaggtgcaggcccgttcgttgtcaatcgagggcgaactgccgttggcggatatcgcacagcgaaccgaaggctggagcggcgccgaagtgtgcgccatctggaccgaggccgctctggtggccgccaaggaccgccgcggcgcgatccgggctgccgacctcgtcaccgccttcgagcgagtcgagcgtcgtcccgaattaagacaccaccgggcataataattggctcccctcagagaggggagccagagaggtttactcctgggcggtggagtagagcttgccgccttgggcggtgtacttttcgctcatcgcatccatgccggcgaggatttcttcggggctcagcacgttggcggacaccacgccgttatcgacattggccttggccttagccagtgcctcggagtcgatgcctgcagcagcctccttcacgatctgctgctgagcggcctcgccaccgaatgccttgcggatgttctgggagatggccatcgagcagaacttcgggccgcacatcgagcagaagtgcgccatcttggccggctcggcgggcagggtgtcatcgtggaaggcgatggcggtgtccggatcgtaggacagattgaactggtcgagccaacggaactcgaagcgagccttggaaatcgcattgtcacgatccatcgcgtgcgggtggtgcttggcgatgtctgcggcgtggcaggcgatcttgtaggcgatcacgccctgcttcacatcatccttgttcggcaggccgaggtgttccttcggggtcacgtagcacagcatagcggtgccgtaacgaccgatctcggtggcgccgatggcggaggtgatgtggtcgtaacccggagcggtatcggtggtcagcggtccgagggtgtagaacggggcgcccttgcacacggccttctccagctcgatgttcatacgcacggtgtcgaacggcacgtggcccgggccctcgatcatcacctgcacgtccttggcccaggcgcgctcggtcagctcgcccagagtcatgagctcggaaagctgcgcggcgtcgttcgcgtcggccagggagccggggcgcaggccatcgcccagagagaacgccacgtcgtacttggcgaagatgtcgcacagctcgtcgaagtgcgtgtacaggaagctctcctggtggtggcgcaggcaccagtcggccatgatggagccaccgcgggagacgatgccggtcacgcggttggcggtcagcggcacgtaacgcagcagcacaccggcgtggatggtcatgtaatccacaccctgctcgcactgttcgatcacggtgtcgcggaacagctcccagctcagcttggaggcatcatcctcgaccttttcgagggcctggtacatcggcacggtgccgatcggcacgggggagttgcgaagaatccactcacgggtggtgtggatgtcgttaccggtggacaggtccatcacggtatcggcgccccacttggtggcccacgtcagcttctccacttcctcgtcgatggaggaggtgacggccgagttgcccatgttggcgttgagcttggtcaggaaggcggatccgataatcatcggctcggcctcggggtggttgatgttgcagggcatcaccgcgcggccggcggccagctcggagcgcacgagctccacatcgcagttctcgcgggtggccacgtactgcatctccggggtgatgatgccgtggcgggcgtaccacatctgggtgatcgggtggtccttggcgcgcatcggctcatgcttgcgtccacgccattccttggtggcgcggccgcgcttgatggcgcgcttaccatcatcctcaaggttgcggcggcggccctcgtagtcttcgatgtcgccgcggtcgcggatccagtcgagacgcaggggcttcaaaccttccttcgggtcgcacttggggccttcggtgttgtagtcgtggaacggcgggttcgggcccacgccgggcgtgtcgctcagcttgatttcggtgtacggcacttccaggtcgtaggaaccatactgataggtgaacggtacggacttggtcttgcggatgtgcgccttgtcgcgctgcttggaaccacgggcggcgatgtccacgcgctgctgcttggcgagcttctgggcatccttggcgtccttggcgttggtgaacttcttctcagtggcctcggagccaggctttgcggccccttcctgagcagcctgagtatcagcagcgggggtgtgggctacgacgcgcggcgcgtagccgtgcttcttgtcgccgcggacggccttccagccttcgaccatggtgcgcgcggcctcttccgggttctcggcacccgcgatggcggagaccgcgaaccagccggcggccttggtgccggcgagcatggccatatcggctgcggtcacgccgccgcccacgaccaccgggaattcgctggcagcgcagatggtgttgatctgggcggcgtccagtgtcttgccggagccgtcgttgccgcccacggaagcctcgggcttggtggtggagacgtgcagagggccggcgccaatgtagtcgatgcagccgtcgggcagctcgttgatgagctgaacgaggctttcggtctcagccgacagacccacgatggcctcgtcgccgagcagggcgcgggcttctcgcggctccatgtcggtctggccgatatgcacaccgtccaccttgatgcccttgcggcgggcctgccacaccacgtcggcacggtcgtcgatcacaaaggccacggaatcggacttctcattgtcctcgatgatctgcgcgatgtcgcgggccatgtcggtcagctcagaggcatcggcctccttggcgcgcagttggatgaaggttgcgccgccgcgcagagcctgatccaccacgtcggtcagcggacggcctttgcagtcctccggccccaccacgaagtacgcggacaagtcgaagttgtctcgcatggaggcgtatgggtattcattactcattattattcctacctttgttgtttcttgtggaagtcttattgggaaaaactgttatgagctccctcatcagagggaactgaaactactgcaccaaaatctcggattccgccacctgttcggcggtaacattccacagcgcgtcaaggaacgcgacctggaacgagcccggcccgtgcgaagtcgtatcggctatctctgccgcgcggttgtacagcagagatgcggacagagcggcggtcaacggatcggaaaccgccagatatgtggcagccacgccgcccagcgagcagcctgcaccgatgatcttggtcatcatcgcgctgccgcccggcagtcggtacacggtttcgccgtcggtcaccagatcggcgatgccggacacagccactgcacagcgggtggaagcgtcatgggaggaatgcttggcgtgctgttcggtcagatactgtgccagcgccaccgccgcaccggttgcggactccacgtcgtcgacggattccactccggcggggcggtgctcggaagcgtcccccacggtttcggtattgagcccccacatgttcgccagcgcgattacctcggaggcgttcgcgcgaatcatggtcgggggagcggccttgaaggtctgaagaatggcggtgcgggtgtggccgatgccggcggccaccgggtcgagcacccacggcttgtccaagtagttgagtcgctgggcgatttcgggcagcgcatccttatagaacggcagcagcgtgcccacgttgatgtagttcgcgcccgcgattttcgcggtttcgatcacgtcgtccggcaggaaactcatggccgcagtgccgccggccgccagttgcgcgttggcgaccaaattgatggtcacaaaattggtgaatgactgggccaatggagtcgtctcgcgtacgcggcgaacggcatcggcgatattgtcgcggatgggtgaatcggctggaaccggagtcccggcggtacaaccgctggacacatcggcaaacgatgatgcactattgctcatttactgctccctacgatggtcttaaccaacaggttctaagggtcaggctcaggcctttctcaactcgcgaaccacatgcgagtccccctgcactacagtgccgacgctatgcgccaacatggacattatcgtgacggatttgtttgatacgtgtcgtcaggtctggcgcgtcccgtccattcgtgatatatagacgcctccgccgagcaatatctcccggatttgtgacgctgacgcgatgtcagtggtacaaattcgggaaggataaaacaacaggaacaatatggaggtgttgcgatataggaatcgctgcgaacggccgctcgtgagacgcggaacatataccggacaatgccgcctgacctgtcaccatatacggctatcctgaagcggttgttattagaccccaaaccgttcaaaccagaaggtgcattgtggctcagtccaaactcgatgaagtcgtatcccttgcgaagcgtcgcggcttcgtgttccccgccggcgaaatttacggcggcacccgttccgcttgggattacggccccctcggcgtcgctctcaaggacaatatcaagcgtgaatggtggcgctccatggtcgtcacccgtcctgatgtcgtcggtgtcgacacttccatcattctgccgcccgaagtgtgggtggcgtccggccacgtgagcgtgttcaacgatccgctcgtcgagtgcctcaactgccacaagcgcaaccgcgccgacaagctcgaggaatcctacgccgagaagcacggcgacaagatgccggaaaacggcatgaaggacatcgtctgcccgaactgcggcacccgtggccagtggaccgaaccgcgcgacttcaacatgatgctgcgcacccacctcggcccggtcgaggacgagaacagcctgcactacctgcgtccggagactgcacagggcatcttcgtcgacttcaagaacgtgatgacctcctcccgttccaagccgccgttcggcatcgccaacatgggtaagtccttccgtaacgagatcaccccgggcaacttcatcttccgcacccgtgagttcgagcagatggagatggagttcttcgtcaagcccggcaccgatgaggaatggcaccagtactggatcgacgcccgcacccgctggtacatcgacctcggcgtcaagccagagaacctgcgccactacgagcacccgaaggagaagctctcccactactccaagcgcaccgtggacatcgaatacaagttcggcttccaaggttccgactggggcgagctcgaaggcatcgccaaccgtaccgattacgatttgagcgcgcactccaagcactccggcgaagacctgagctacttcaaccaggccaccggcgagaagtacgtgccgtacgtcatcgaaccggccgccggtctgacccgttccctgatgtgcttcctcgtggacgcctacgatgtggacgaggccccgaacaccaagggcggcgtcgacaagcgcaccgtgctgcgtctcgacccgcgtctggccccggtcaaggccgccgtgctgccgctgagcaagaagcctgaactgcagaccgtggcccagaacctggccgacgacctgcgcttcaacgaatggatgatcgactacgacgagtccggtgccatcggtcgtcgttaccgtcgtcaggacgagatcggcaccccgctgtgcatcaccgtggacttcgacaccctcgaggaccacgccgtgaccatccgtgagcgtgacaccatggcccaggagcgcgtcgctcttgacaaggtggccgattacgtggccgcccgcatcggcgagaagcgcacccgcgtgcccctgaagcccgtggaaatgggcggcgaggcttggcctgagtccggcgttcaggaagccggcggtctgtactaaagacgggtctgtatagaggctcccctctatgaggggagctgtctacgaagtggactgagggggctcttgctgaggcgactcccctcagtcgcctacggcggcagctccccctcaaagaggggagccaaaactatttcagaacaggaaccacatggcagaatctgaaaccgaaaccaccatcaccgctactcacgagaccaacaatctcgacccgcgtacggacgcgccggcacggcccgagactccggtatacatcgcccccgtgcagctcggcaacattaccgtgccgaccccggtggtgctttcgccgatggcgggcgtgaccaactggccgttccgcgtgatctgcgaggaatacggtcccgatggtctttacgtggccgagatgatcaccgcgcgggccctcgtggcgcgcaacccgaaagccctgcgtctctgccatttcgccaaaagcgaaaaaattcgttcgctgcagttgtatggcgtgaatccgtccatcaccgaacaggcggcgaaaatcgtggtcgacggcaacatggccgaccatgtggacctgaacttcggttgcccggtacccaaggtcacccgtcgcgggggaggctcggccctgccatggaaaaccgacatcttcaccgagctcatccagcgcgtggtcgccgtatgcgagccggcgggcatccccgtcacctcgaagatccgcgtcggcatcgaccataaccatgagaccttcctcgaagccggacacatcgcgcaggaggagggctgcaaggccgtaaccctgcatgcccgcaccaccgccgaatactatggcggtcattccgactggtcccgcatcggcgagctcaaggaacacctcaacattccggtattcggcaatggcgatatctggggcgccgaggacgcgctcgaaatggtgcgcgagaccggctgcgacggcgtggccatcggccgcggatgtcagggccggccgtggctgttcgccaacatcaaaaacgccttcgagggcaatcccgaacggctcaacccgaatctgggcgaggtctgccgggtgattcaccgtcatgccgagctgcttaccgagttctatgagggcgatgagatgatggccgtccacgatctgcgcaagcacatcgcctggtatctgaaagggttcccggtgggcggctccacccgcaaggcctttatggaatgcgagagcctggccgatgtggaccgcgagatcggcaagctcgacccgaccatcgaatacccgccacgcgtggtcgacaaaccgcgcggccgcgtgcgtttcgccaagaaggtgcacttgccgtatgggtggttggaatcgcgtaccaccacccacgaagagcgtgaggcgctcttcggtgacgacccaatggacgccagttactgagaaaatactgaaaatacacgcaacacgcgccattctgcgcgtgaatttccctccaagagtagcctgtttgcgctactcttgggtgtaaccgtgaagtgacaggagccaaacgtgagcgagatcgcgcagaatgagttcaacgacaagaccaacatcaaggttgttggcgtcggcggtgccggcggtaatgccgtcaatcgcatgattgccgagggactgcagaatgttgaatttgtggcggtaaataccgatgcgaaggatcttctgcgctccgacgccgacgtgaaaatctccctgtccgatcagtccagccgcggactcggcgctggcgcggacccggagaagggtgctaaggccgcacaggatcatcagtctgatatcgaggaatccctgaagggtgccgacatggtgttcgtcacctgtggtgagggtggtggcaccggtaccggcgccagcccgatcgtcgctcgtgcggctcatcagcaaggtgctctcaccatcgcggttgtcactcgtccgttcagcttcgaaggtcctcagcgttccgcttccgccgaatacggcatcgacaacctgcgcaaggaagtcgacgcgctgatcgtcatcccgaacgatcgcctgcttgagctttccgaccgttccatcggcatcatcgaagccttcaagacggccgataccgcactcctcgccggcgtgcagggcatcaccgacctcatttcgatgaattcctacattcacgtcgatttctccgacgtgaactccattcttcgtggcgctggtactgcgctgttcggcattggttccgcgcggggcgaagaccgcgccacccaggccgccgaaatcgccatcagctccccgctgctcgaggagagcatcgagggtgcccacggcgcgttgatcaacattgccggcccgaccgatctgaagctgcaggaagcttccgccgccaccgagcttgtacgcaaggccattcaccccgaggcccagatcatctggggtcttgctctggacgatgcctatggcgacgaagtgcgtgttaccgtcatcgcggccggtttcgatccggttacaccgcaggatccctctgccgctgctccggcaattgccgtaccggccgcccagccggctgccacgcaaacgcagcagcccgccgccgctccggccgcccagcccgtggccactccgcgtccggaattcaccccgacgaccgcagacccggcatccctgccctttgacgatccgactacctcgcatccgaacatcgccgtgaacgatcccgccggcgatctcgacattcctgatttcctgcgctgaaaggactgatccatggctgggttcatgaaaaacgcgatgtcctatctgggcatgagcgacgttgtggacgatgaggacgactacatcgaagaggacgaggagcagaagccggctccgaagtccgcattcgattccgaccatacggtcacgccgctggcatcaaccaccgcgcctgccgcatcgtcgaccaccaagccgttccccggtggtcgcgtgaacagaatcaccaccatccatccgaagtcatatgaggatgctcagctggtcggtcgcgcattgcgtgacggtgttccggtcgtactgaatctcaccggtgtggccgaagccgtggcatatcgcattgtggacttctccgccggcgtggtgttcggcgtgcgtggttccctcgagcgtgtcactccgcgcgtgttcctgttgagcccggcgcaggtgaacatcaaggtcgaagagccgacaaaaccaacctcggcacacgatttgttcgctgactgaccggttcagtagttttcgcattcgacgttatatcggtattcggccgactcccagcaaggagtcggccgattcttattgcgctccgagcaaacttttcatgcgcggttgttagtctgtcagcatgctttccttagtgttctctctgatcggccgcattcttgcatggctcatcaacgcgtatatcacggttctgttcgtgcgcatgattctggactgggtctccgttctcgcacgaaactggtatccacgtggtgtggtggcccagctgatcaacattgtgtattccattaccgaaccccctctgcgctggctacgtcgctatattcgtccattgccgctcggctcgatttatcttgatgtcagcttcatcgtgctgtattttgcgttggtggtactagaaagtgttgttctgatagtgttctgaggccgtttttgacccgccggaggcatatatctggcataaaaacccacgttgaatgttctgaaacgatggggtcgtgatagcattctgacttgagaccaacgtaagtgcgggcaatgccccaaagcgaggtgcaagatttatggctctgttgacgccgaaggatattagggagcataccttccagactgttcgattcaaggaaggttatgatgtcgacgaggtcgatgacttccttgatcaggtcacggaaaccgtcgaggctcttggacgtcaggcggtagccggcggtcaggccactcagtctctgggccctgacgtgaccaaccttaatgcgaagatctccgatcttaccggtcaggtgcagcaactccagtcggagaatgctggtttgaagaacgctgtggctcaggcccagcaggccgctcaggctggcaatgatcaggcggcacagcttgcctctgccaagctcagcgaagccgaggaatccaaccgcgcgctgtcctcccagaatgagcagctcaagggtcaggtcgatcagctgaacgctcaaatcgatcagctcaccgcccaggccgctcaggcctccggtaaccaggaagccgtcggccagcagatcgccgccattcagcaggaacgtgatcagttccgcgcggccaacgaggagctgtcccgtcagctcgccgctgctcagcaggagggttccgccgctcagcagcagtccgctcagatcgctgaactgtctcgtcagctcgaagaagccaagcagcgtgaaaaccagcttcgtgcccaggtttccaaggtcgagccgagcactgagaccggttctctgcagaagatcgctggcgtcgcttccatgccgggcaccgagcccgagcgcgccaccgccatgctgaccctggctatgcagctgcacgatcagtacgtggagaagggcaagaacaaggccaaggaaatcaccgaggccagccagaacaagtacaacgatttggtcaccaaggccaacaactactccgagcgtacccgctccgaggccgacgactactccactcgtactcgttccgacgccgacacctattcggatcgtacccgctccgaggccgacgcttaccgtgaccagattcacgcggatgccgagacctactcccagaacacccgttctgaggccgacgcatactccgtcaagactcgtcaggatgcggacaactactccaagtctcagcacgatgacgctgacaactacgagaaggaagtgcagcagcgtgccgccgagtatgacaagaacactcgttccgcagctgatgcgtacgacaagaacacccgctctgcagccgatacgtatgccgagcaggtgcgcgacaaccttcaggctcagtccaaggtcgtcgagggcaacatccagagcctcaagcagttcgagactgaataccgcgcccgcctcaccgagtacctcggccagctggcatcgcaggtttccgagtcgaacaactacgtcgaccagacctcgtccaagaccaactgagcgtaggcaggtacaggtcgtatgacgaaccaacagggacggctgcgcactcgcgtggccgtctttgcatgtgtggccgcggctgcgctgattgtcgatcagctcaccaaggcttgggcgatggccgcgttatccaacggtcagaccattcgcgtgattcccggactgctgtccttcaccttggtgcgtaatccgggcgcgtccttgggcatggggtcaggcgctacttgggtaatcagtctgttggccgttgtggcttgcgtggcccttgctgtggctggggtgcgcactatctccatgaaatggtcggtggcgctttctttcgcgtttgcaggcgctctgggcaacctgattgaccgtgttatgtacgctgacggcttcctcaacggcaaagtggtggatttccttaactatggctggtccgttggcaatgtggcggatatctatctggtagtcgccggtgtggtcctggtgattctgattcttatgggggagccgttctcccacaaggatcttatcgagcaatccgacgaatccctacagtctgagccggaggcggacgccaagtaatgagtcgaatggtccctgctcccgatgcattggtgggtaagcgtttcgacgtagccgtggccaaaatgctgggtatttcacgatctaaagccgccgatctggttgactccggacaggcgcgcgttttagggcgtgaagttgcgcggtccagcacgttgcaggcgggggagaccgtcgaatttgatttggcggaggaacaggccgggcctgagcctatcgcaactgatatggctgttgtctacgaagatgatgatgtcgtcgtagtcgataagcctgtaggcgtggcggcgcatgcctcggttggctggaccggttccacggtattgggatcgttgcgtgatcgtggcgtgcatatcgcttcctatggcgcggccgggcgtgaaggcattgtttctcgccttgatgtaggcacttccggcttgatgttggtgtgcaagtccgaccttgcgtacaccgagatgcgtcggcagttcgccgagcatgaggtaaagaaaacctatcatgcgctcgtgcagggcggtcttaaagagaacaaagcgaccattgaggcaccgatcgggcgcgccaaagtgtccgatttccgcttctgcgtgactccggccggcaaaccggccgttacgcattgggatgtgttggagcgtttcggccatgaggccacactggtatccgtgaatctggagaccggacgtacccatcagattcgcgtgcatttctcctcgattgggcatcctctgtgcggcgaccctatgtatggtgccaatccggtgctgtctgaagctttgggacttgaccggcagtggctgcacgccatgaagctcgaattccgccatcctcgcacccgcgtctggaccacggtccggtcccagtacccggccgacctggccgccgccctcgatgccatgcgtgcccgtcacatcgaacccgctgaacctgccgagcatgccgaagttctggtggactaattccgcaacgtgtgcatcatgcgttttaatatttagattcagttccagcctcgccggattcatcccagaataatgagagatcggtcatgatggctctccgtcatgaccataccccaagtgactgcggatgctgagtaccgttcaggccaatggtcggtaaccgtacgtgaattaccggtatttccgctcaacgtgtctcggtactccagcgtgaagtgaacagaaatgagccaaagcagtaaggctgagtacgagtattcgtggccgtcatcaatcgatggtggtcattgggattcgcgccatgtactacgcagtatgttgtacgctctgcctggctgttgaacgaagtccacaagaaacagtagatactagggcagccagcggattagcaagacatcggttggtgaggactgctgacattgaactccgacggatgaattgaatactcatatggtatccgattctgaacaattgagtgggggcgttgatggttgccatcgtttgagctggctaaatgcgatttcgcgccacgctgtttcaacaacggtaacaacagctacagttgaactatgcatgggttgaagagtgcgattgacaggggagcggacgcgtgggcgcgttcgctgcctgggcgcgtgctcgaccggtatgtgtcgcggcgcggccccctgctggcgaatggtctggcatatggtctgctgttcgccttttttgccggcgtctggattgcggtgagcgtgttcggtctcatcatggtcggcaacattgattggcagcagatgctgatcgacgcggtgcgtgaagtcattcccggtgtggccgactcgtttctgacgtcttccgcactaaacaccatgtcaagcacattgacatggaccggtctggccacgttggccatattctggtggacggtgaccggctggatgaactcgctgcgccacgccgtacggtccatgttcgacgactgcggcgacgagctcaatatcgtcgtcgcaaggttacgcgatacgcttgccgccatcgccatcgcaatactgttcattctttcgaccgcggccggtacggtgtccggtggcatggtgcggcgcgtgttgcagtggagcggcatcgccagcagctcgctgccggggattctgctgctggagctgaccggtttctgcaccggcgtcgcgctgaacttcgccttgttcatgctgctgttgcgtgtggtcgcgcacatcaaagccggacgattcacgctgatcggcgcgtcgtcgggttccctgacggtttcggtgatgcagctgctcggcgcgcgactgctgaccggcgcctcccgcaatccgctgctcgcaccgttcgcggcgttgatcggcgcgctggtgtggttcaatctcgtcgcccaggtcatcatgctgtgcgccgccctcatcgcggagtgccgacgggaatgctgaacagccgcccagaccacacggtatggtggggcgcatggctgattacgggaacaactttgtgcaactgcataaccacacgcactattcgctgctcgatggtgcgtcgaagatccctgatttggccaagcgtgcggccgaacttggcatgcctgcggtcggcatcaccgaccatggcaacatgcatggcgcctacgagatgtacaccaactgcgtggccaatggcgtcaagcccatcatcggcatcgaagcctatgtgaccccggaaaccgcacgtcaagacaaatcccgcgtgcattggggcaccgaagcccagcgccgtgacgacgtctccggtggcggtcttatcacccacttgaccatgtgggccgaaaacgacgaaggcctggtcaacctcatcaaagcctcgtccgtggccaacctcgaaggtcgcgtcatgcgttatccgcgtatggataaggaggtgctcgccacctattccaaaggcgtgatcgcatcctccggctgcccctcgggcatcatccagacccgtctgcgtctcggtcagttcgatgaggccctgcgcgccgctggcgaattccaggacatcttcggcaaagacaacttcttcatcgaactcatggatcacggtctgcccatcgaaactcaggtgaccggtgacctgctgaccatagccaagaaactcaacgcaccactgctggccaccaacgattcccactacgtacacgccgaagatgcccaggcacaggacgccatgctctgcatcaactccggttcccgtcttgacgatccggaccgattcaaattcgacggcaccggctactacatcaaaaccgccgaagagatgcgcgaactgttcaaggaccatccggacgcctgcgacaacaccctcgccatcgccgaacgctgcaacgtgatgttcgacgaccacgaagacggcgcgttcatgccgaaattcccctgccccgaaggctgggatgagacctccctgttccttaaaaaagtcgaggaaggtctggagaagcgttacgacggcaacccgccgctcgacgtattgaagcaggccgactacgaatgtggtgtgatctgccagatgcagttctgcggatacttcctcgtggtcgccgactacattcagtgggccaaggaccacggcattatggtgggtccgggccgtggctcggccgcaggcgccatggtcgcctattccatgggcattaccgagctcgatccgctcaagcatggcctgattttcgagaggttcctgaaccctgagcgagtgagccttcctgatatcgatgtcgacttcgaccctgaaggtcgtgcgcgagtcatcgaatactgcggcgaaaaatacggcaccgataaggtcgcccagtgcgtgatctatggcaccatcaaaaccaagcaggccttgaaggactccgcccgcatcatgggctacgagttctcggtcggtgaaaaagtcaccaaggcgctgcctcccgcggccaccggcggcaaggatatcagcctgcatgacatcttcgacccgacagccaaacgctacgccgaggccagggaattccgagaactctacgattccgacccggacgccaagcgcatcaccgaagaagccaagggtatcgaaggcctgatccgacagaccggtgtacatgcctgcgccaccatcatgggtagcgcgcccatcaccgacacctcgccgttgctggaacgcaccgatggcaccatcaccaccaccttcgaataccacacgtgcgaaacgttggggttggtcaagatggacttccttggcctgtccaacttgacgatcatccacgacaccctgaagaacatcgaggccaacggcaaacccgccatcgactacaccaagattccgctcgatgacgccgaaacctacaaactcatgtcccgaggagacacgctcggcgtgttccagctcgattccgacggcatgcgttcactgctgaaaaccctgaagcccgataacttcaacgatatttccgcacttatcgctctgtaccgaccgggcccgatgagtatggattcgcacaccaactacgccaagcgcaagaatggcctgcagaagatcacgccaatccaccctgagcttgaggaacctctgaagcaggtgcttgacgagacctatggtctgatcatctaccaggagcaggtgcagtccgccgcccgaatcctcgccggctattcgctgggcaaggcagacgtgctgcgtcgagccatgggtaagaagaagcccgaagtgctggccaaggagaaggtgccgttcttcgccggtatgaaggagcatggatactccgaagaggcctcccaggccgtgtgggatattctggtgccgttctccggctacgctttcaacaaagcgcactccgccgcatacggtctgatctcctactggaccgcatatctgaagacgcactacccggtcgaattcatggccgccctgttgcaaggtgccgccaccaacaaagacaagaccgcactgtacttgggcgaggcccgccgcatgggcatccaggtgctctcgccggacgtcaacgaatcggtgtacgagtactcggcagtcggcgacgtcgtccgattcggtcttggtgccatccgtaacgtgggtgacaaggccgtggccgatatcatcgccgaacgcgaaggcccgcgcggcaagttcgtgaacttcatggacttcatccgccgcgtgcccctgaccgcgctgaaccggcgattggtcgaatcgttgatcaaggccggtgccttcgactcgattgacccgaaccgtcgcgcgctgttcaccgtgcacgaggccgccatcgactcggtggtgagtctgaagcgcaaacaggcggagggccagttcgatttgttctccgatgccgaggatgggggagcggaggccatgggcgacgcttccgtgaccgtacccgatcttgaggaatgggacaagaagaccaagcttaacttcgaacgcgaaatgttgggcctgtatgtgtctgaccatccgctctccggtatgcagtcgattctcgcgtccttgcgtgaaatgtccatcgcgcatctggttgatcgagccaaaacgatgggtgaaggacagcaggtcacgttggctggtttggtcaccaatgtggaccggcgcgtatccaagaagggcaacccctgggccatcgtgaccatcgaagacatggaaagctccatccaatgcatgttcttcggcaaggtctatgaagcggccgccgccgaactcgccgtggacgccatcgtacagattcgtggccaagtggagttgcgcgacgaaaccgtttctctgagagccacggaaatgcagattccgaccttggaagccgaggatgaacgtccgttggtcatcacgctgccgccggtggcgttggagcgccaacgcatgatgcaactcggtcaggtgctcgctaatcatcctggttactgcgaagtacatcttgcggtgctggatgagaagggtaacgctcaggtgctcacgtttggcgatcgtttccgcgtcaagcgggatacttcgttgtttgctgagatcaagattctgtttggccccagctgcttgcctgccgcctgattggcgggtttcgcccctggcctctccctcatctggctttgctggggactccttcatcagagggagctaaggcatgtgccaccgtacgatgtgcgcgactattgtggaacgtatgggcatggagatggcggatactggtaacaacgatgacgagcgacaatggattgccgcgatgctggaacggctgtctcattcgcagttccgcgccaaattcgctttgaccgacaaagaacgagcctatgcccgcaccaaaggcaaggcgaccatcgatcgtcatgcgcgagaaatgttgcgagaccgcataggcgcagccgaaccgaagaacgacggcaggcagacgccatggcgcggccatccggtattcaccgctcagcatgctaccgccacatgctgccgcggatgcatcgaaaaatggcatcatctgcccaaaggccgtgaactcaccgaagcggaggtaaaccgacttgccgatttggtcatggcatggattgagcgggaccttatcaatcatccggttcggtgaagcacccagcatcctcagtatgcctgtatgccttcaatagttatgagccaacagccaacacaggcctcgaaaaccgtagacgcaaggtattggcgaatacggcagaacgccgaacgttgcctatggcgtgttcggcaataatgtgacatgatgtctattcaagaagagttgacgaagcgtcaactctaccccaaggaggcggaatatgtactacaacagcggcaattatgaggctttcgcacgcccgaagaagccggccgacgtggacaacaagcatgcatacatcatcggtaccggactggcggcattgtctgcagcctgttatctggtgcgtgatggtcagatgcctggcgagaacatccacatccttgagaaggacccggtacccggcggcgcctgtgacggtcttgatattcccggcctcggctatgtgatgcgtggcggccgcgagatggacaatcatttcgaggtcatgtgggatctgttccgctcgatcccctccatcgaaaccgagggcgtcagcgtactcgacgagtactactggctcaacaaggaggacccgaactactcgctgtgccgcgccaccaaggacctcggcaaggacgcggggctcaagggcaagttcggcctgtccgacaaggcttcgatggaaatcatgaagctgttcttcaccccggacgaagacctgtatgacaagccgatcaccgatttcttcgatgatgaggtgctgaactccaacttctggctgtactggcgcaccatgttcgccttcgagaactggcactccgcgctggaaatgaagctgtacatcaaacgctacattcatcacatcggcggactgccggacttttccgcgctgcgtttcacccgctacaaccagtacgagtcgatgattctgccgatggtcaagtatctggaatcgcatggcgtcgaattccgctacaacaccaaggttgagaacgtggaattcgcgattggcgggggagccggccccaagcgcgagcacaccggcgtaggccaggacaccatccaaaagattcaggccacctccggtttcttcaagcgcaaccctgccagcacgcccaccaagaagcttgccgtgcgcatcgacgtggatcacgagggtgataaatcctccatcgacctgaccgagaacgatctggtgttcatcaccaacggcggttgcgtggagaactccaccatgggttcccagaactcgcccgccgcatggaacccagacctgaagcccggcggcggctgggatatgtggaagcgtatcgccgaccaggacccgagctttggccatccggagaagttctgctccgatccgaatgccaccaagtggatgagcgccaccatcaccaccctggacggcgagattccgccgtacatccagaagatttgcaagcgcgacccgttctccggcaaggtcgtcaccggcggcatcgtcactgtgcaggactccaactggctcatgagttggaccctgaaccgccagcagcagttccgcgaccagcccaaggaccagctgtgcgtatgggtctacggcctgttcccggacaagcccggcaactatgtgaagaagccgatgaccgaatgcaccggtgaagagatttgcgaggagtggctttaccacatgggcgtgccgaccgacaagatcgaggcgctcgccaagcatcacgccaacaccgtgccggtcatgatgccgtacatcaccgcgttcttcatgccgcgcgcggccggcgaccgcccggacgtggtgcccgatggtgccgtgaacttcgcattccttggccagttcgccgagaccccgcgtgacacgatcttcaccaccgagtactcgatgcgcaccggtatggaagctgtctacacgttgctcggcgtggaccgcggcgtgcctgaagtgtggggcagtgtctatgacgtgcgcaacctgctcaacgccaccgtcaaattgcgtgacggtgcaccggtcaccgatatgaagctcaacttcattgaaaaggccgtggtcaagaaggtgctcaagaaactcgacggcaccgatattgccaccctgctacgcgaataccacgtaatctgacatccatccggctcccctcaaggtgaggggagccagcacgcgaagcgtgactgggggagttgctcacaacggagtgttaagagaaagacaaaaacatgactgattctgatccccagttaatccgccacgccaccatcgacgatctggacgcgctggccgccatggaattcgaatgcttcccggccgccgaggccgccgaccgctcgtccctgcgcgcccgaatcgagacctatccggaatgtttctggctattgattgatggcgagatcgtcatggcgttcatcaacggttttgtgaccgatcggcgcgacttgaccgatgacatgtacgaggatgccgcgcagcacaaccctcaaggtgactggcaaatgattttcggcgtggatactgcgccgaagtatcagcatcgcggttgcgccagtacactcatgaggaaagtcattgaagacactcgtgcagccggccgtaaaggcctggtgctcacctgcaaagatcggttggtcggattctatgcgcgattcggatatgaggacgagggcatttccgattccactcacggtgacgtggtctggcaccaaatgcgcctgaccttctaatccccttttggcttccctctttgatgctgggtcgtttaaaaaacagtccggtggactgtttttttagacgaaggcgagacgatagtcgagccataagggcgcgagctttgctcgtccgtaattgcgggtgagctgtccgcgtgatcggactgaggggagttgaacgtggaatgaattgttgcgacacgccggtgaacatctgatttcgttacgtgagcccataaaaagccggcgtatcctgatggtaacggcgtgattcaagctgatttcgacacgccgagcgaagtctgtcgtttcaacgatttgggcttatcttcgtgcgcccgatttgcgcgagtccgtgaatgcgtgtaagttatttccttgctgccgctcagcgagtggttctcctccggggagctgcgaggtgggtgagtggtggtggtttg

SEQ ID NO: 1625 - DNA, 12229 bp, Unknown
  R221_24m  MAG No. k141_76903
cgaagcgttcgatgatgtacgcctgctgctgcggaacgatgaacaatgcggcgcccagcagcacgatgataatgacgaggatgaccagaaaggtgatcatcgctcccccaaaaaatacgggcatgactttcctttcactatgcgtcgggaccaccttcggttccggctggtgactcccatcgtatcagccgacggacaaatcgcccgggaattgtacgcattggtgtacagccagcgaccggcaacgtactcggcgacaatctattgccgcgcggcgactaccgctgctcgcccagccgcaggagcgcacgttgcgccacggtggccagcaagtccgcacccgcggcgatggcatcgagcttggcgtagaacgtaggtccgtgcatcggccggtcgccgttgccgacgccgagatgggcgaatgcgcccggtgccttgcctagatagtaggagaagtcctcgccgccgagcgagggctgcgacggctcgaccttaaggcccagctcagtggcggttgacgcgaacagcgccgaccaatccgcgtcattgatgaccgagggcgatccgtactcccattcgaagtccgtggtgacatcgtacgcggatgcgatgccttccacgattgcgcgcagccggtcgtgaatcatgatgcggtcttcggggaatgctgtgcgcacagtgccttcgaggaaagccgttgccggaatcacgttccaggtgctgcccgcttccacgtgggtgacggtgacgacgcggggatgcaccgggtccacgtcctgcccggcaatcgactggatgccttcgatgagtgcggcggccacgcgaatcgggttggccccgccgttgggatgagcggcatggctgcctcgcccatgcacggtgatgcggtatttgtcgaccgcgccgctgtccggcccggcggagatgaacgcggtgccgggctcgccctggttggtgtcatgcgtgccgaaaaacgcctcgacatcgtccagggctcccgtgttgattacggtgaccgcgccggtgggcacctccttggtggcggccacctcctcggccggctggaagatcaccttgacctcgccggcgaagtccgccttgcgctcgttcagcagtagtgcagcgcctagcgcgacggtcaggttgtagtcatgcccgcagccgtgcagatagcccttgttcagcgactcgtacggcacgccggtctgttccaggatgggcagcgcatcgatgtccccacgcaccgccaccacatggccgacactcgcggactcgccctcgccccggataatggcgatgagcccggtcttcagcccgctgtccagaatcctgatgccatgttcatccaagatctccttgatgtgcgccgtggtttcggtctcctgatacgccggctcgggatgctgatggaaccacgtgtagtacgtttccagctgacgctgcagttcagtgttcgtcatattgttttcccccatctttgatgttcagcatggatgccctgcacccataccaccacgttccggcacaggccacgcccccacccgcatacgaaaaatctataccacccgccaattcaggcgatcgtgcggtatttggggtggcttgtgggaatcgaatccaacagactcttggtgtactcatcctggggatggtcgaatacgtcatgcaccgaaccggattccacaatccgcccattatgcacgaccagaatcgacgagcagatatgctccaccacacttaggtcatgggagatgaacaggaacgatacatcacgagtatgttgcagctcgctgaacaggttgatgatctctgcctggatggatacgtccaaggcggacaccggttcgtcagccaccacaaactccggctgcaaggccatggcacgggcaatgacgatgcgctgtcgctgaccgcccgaaaactcgtgcgggtaccgattgaggcaggaggagtccatgccgcacagttccagcgtttccaccaccttatcggtgacgtcacgtttcgtggccagcttgtgatgcagcaacgcctctccgatggccgagccgatcttcagccttgggttaagcgcactgtatgggtcttggaacacgtactgcatgcgggtgcgcattcgggccagtttggcattgctgagcgagaagatatcctcgccgccgaacagcacctcaccatcggttttggcattgagacgcagcaccgtctgtccgataggggttttgccgctgcctgactcccccaccaggccgaccgtttcgccgcgatacacgtcgaagctgacatcgtccacggcctttttcacattgttgccacgcgagccgaaaccacgcacccgttcgtagtatttcttcagatggcttacgtgaagaataggctggccctgatgctccttagtctggcatgaatcgtcagtgccgggccgggagcgttcacccacctcggcaatcgaatcgtcttccacggtggcggccaaggtgctccagtcctgtggctgggtgatttcaccgtcatccacttcccgcatgacctcatgcaaagtgggcaaccgcttaagtttttgcccgatgatgggtcgggtcaacaacaaggccttggtatatggatgcttgggatggtcgaagatgttctccaccgtgttgcgttccacgatatgaccgtcatacatgaccagtacgtcatccgcgatttcggccaccacgcccaaatcgtgggtaatgaacagcaccgacaatccgatttcgttcttgagtcggaccaacagacgcagaatctgagcctgcacggtaacgtccaatgccgtggtcggttcatcggcgataagcaggcggggctcgcagcacaaggcgatggcaatcatcgctcgttgcagcatgccaccgctcaactcatgcgggtaggccgtcatgatgagttcggggttcggcagttcgacacgtttgagccatgcaatcgcctgtgtctcggcttccggacggggaacatcggcatgggccagaatggtttcaacaagctggtcgccaacggtgaacaccgggtcaagggaatgcatcggttcttggaagatgagcccgatatcggcacctcgcacctcgcgcatctgcttgacatccaaggtcagcagatcacgcccttcgaacagcacttcgccggattcgatgcggccgggccgatcgatcagattgatcaaagacatggccgtggcgcttttcccggaaccggattcgccgatcaaacagcacacgcgtcctcggcgaacgtcaaagctgatgtcatccacggctttgcgtacggagccgtcatccggataaaagtatgttttcaagtggcgcacaccaagtacgatgtcatcggaatcatcgactttgtcctctttatgtgctgttttgttcgatactatgatgctcataaatgttccctcgtgttacctgcaccgtggtgcatgaccgcatgattcggattattcgatcacatgtcacgaatactgtttggggtcgaaagcgtcgcgcaacctgtcgccaatggtattgatggcgatgaccgtggcgaacaccgcgataccaggcgagatccatagccaaggatgcatctggaaatcgatgaggttgttggccgccgaaatcatgttgccccaggaaggcgtcggctgcatgacaccgagaccaaggaagctcaatgcggattcgttcatgatgccgttggcggtggccagcgtggcttcaacgataagaatcggatacgtgttcggcagtatgtgtcggaacaatttggagcccaggcccagaccgagcacatctgtggcccgcacatacatccgctcacggatggaaagcacctgtcctcgaatcatacgagcaatgctcggccatccgacaaagctcagcatgatgaccacgaaatacaccttggcgtcattgggcactttgaaggcgctgagcagggccgcgatgatgaacataagcggcatgctcggaatggacagcacgatatcagcaatgcgcatgataatgccgtccatccagccgccgaagtagctggatatgacacccaataccgcgccgaacaccactgagacaatcatcgaaatcagaccgatggcaatggagattcggccggcgtacatcacacgggtgaatacgtctcgaccataattgtcggtgccaagcagatgagccagactcggcccctgcttgatgttcatcacgtcgtaatcctcgaacccgtagtgagagagcggaggaccgacatagctgatcagcacgataatcgccaagatggtcaatgcgatgatcgcggaccggttgtgcaggaacgaacgcatcgcgtcacgccacagcgagccaccggtgcaagtcgtatcccgagcgagtttttcatcccgttcggcattggttttgcgggatgcgaatggcagtcgaacgctcacttggcactcccctttgctcgcgtgatacgtacacgagaatcggccatcgtgtacaaaacgtcggcgatgaaattgcccacaaccgtcagaatggccagcagcatggtaatggacatcagcaacgcatagtcacgggtggtcaccgattcgaattggatgcgtccgatacccggccagctgaacacctgctcggtgatgatcgcgcccgagaacagggccggcaaacggaatcccagcagggtaatcgccggcagcatcgcgtttttcaacgcgtgcttgtagatgacctgtgattcgggcaatccttttgctctggcagtacgaatgaagtccatactcagggtatccagcatgctggtgcggaagtaacgggtcaacgggccgaagttcacgcatacgatcaccagcatcggcaggatggcatggtgcagtacatcgaaccaatactgtgctcccgtgtagttggatccggtggtgatcagtccgccgaccggcatgatgccgagattgatggagagagtcttgataagcaccaggcccacgaagaacgatggcagcgacatcaccgcaaacacgacgaaagtgattatgcggtcaaacagcgaatacttgtggcgggcggaatagatgctcaccgcgatggccaaggcccacgcgatgatgaatgccccgaacgacacgaggaacgagttccagatataggtgccgatgaccttggataccggctggttgtattgcatggagaaaccccagtcaccatgcagcagttgacttacccacaagaagtaacgttccagaaccggcttgttgaggccataggcctcacgcaattggtcgagtcgcacctgggtgagtttggtgtctccggagaagaaatcacctggcatcatcgcgaacagcgcgaagaccagtatggatacgccgatgagggtgggtatcatcagcagaaaacgttggagcgtgtaacgtagcatggattaatgagccttatgcctagtgggggtttggatggaaggcaggatgtcactctgcacggcgagacgcctcgtgacacagacctattgggtccatgccgcgaggcgtcatctcgtgtggaatgccgtcactggttcttgatggacagctttgccagctgaatcgccgagtcaccggttccgcggaagaacttgtcaccattctgaatacgatcgttccaggcattgaagcccttgatgtatccaatgagcagatacggcggatcgttgctgagttcctgatagatcttctgataaatcggctcacggctggcgcggtcggacttggcgatgctttccttgaccagcttacgaaccgtggcattgtcgtagccgttatcattgacctgcgggtcagtggtaccgaacggcttgaccgcttcatacggatcgttgatgaccgaggtacggaaggtaatcaaaccgtagtcaccggacttcaaccgcgtggtctccgtgttctgatcggtgaccgtggcctgcaggtcgacgccgatcttcttccactgctccttgccgatgctgatgatcgggtcggtctggtccttggtcacgtagaccaggctgagcttcttgccgtccttctcacgaatgccgtcggggcccttcttccaaccatccttgtccagaagctcgttggccttgtcgggattgcattcgtaggtgttcacgcccttggtggagtatgcccagttgctcagcggagcgtatacattggccacttcgccgtagcccttgtaccaagcggcgacaatctgcttgcgatcgaggccgtagtacagcgcctgacacacttccttggttaggtatggcttcttggtgttgaactcggaataggagtagtacggattggtacggatgttcacatccgaccaaccgaagtccttgagctgggacagcacatcggaatccggaataaacacgtcggtatcggtatcgccattctggtaggactggagcgccgtgtcatcggtgacgaccttgaagattaggtgttcgatctttggcttgctgccataatagttcggatccgccttgtaccgcacttcctggccgggcacgtacttgtcgagctcgtaggggccggcacccagtggcttgtcgtagaactgctgcaggtaatcgagcttgccgcgccggtagtccttgccgtagtacttcttggaccgcacgtagctgccgatggtggtcagtgccacagggttgactttttcagtggtgacggaaacggtcttgtcatccacgaccttgatgccggaaatcgaatcggccttgccggattggtaatccgcaacgcccttgatgccgatgtcggtaaagtcggcgaggccaaagttgtaggccgggtcattttcaagggtcagcgtgaaagccacatcatcggcggtcactggagttccatcagagaacttcgcgctgtcgcgaagatggtaggtgtaggtgaggttgtctttagacacttcccacgatttggccagatcgcccgcggggttgccgtccttgtcatagacgaccaatgcggcgaaaatcggctgattaatgttctcatcccatgcgttgcggtagaagtacggcaggaacacgccacctgggttcttgatggtggcaacgaacgtgtcggtacgcttgttggcgttggccgggctcttggacgggtccgtagcctttatcgtctcgttcttgatggcctgcacgttacccgaagattgagtggcactgttgttcttggaattgccggccgcaccgcatcctgcgagcgcggtggcggcgacgagtgccaccgccaatgctttaatgccgcgggcaataagctgcggcttggttgatattgctatgtttcccctcttgttgcgtgaacgcaatcatgtctcaccggaactgatcattgcggaatcacaccgattcgtccgatgactgattgccagtcaagatgacgcggaagtctgatgtcgcgcatccgttcctctcgcgttccgtttcccgaccttaacgcaaaatgattgcagtctgaccggcgttgttatatcaatcatttatacgaagctatggcttcacgtttttcagtcgttttgtggggtccaagtccgaagaacagcatccccgcgttgtcaagccgccacggactggcaggtcggcagcgattgcggggcccagtgtcgccaaccggccaaggtttggcaggacagcgacgctcacgacacgtcagcgtagtcaagaggccagtccatggcgactcggcgacgctaagacgcctttcagcgtcgttatccggccaaacgctggcaaggtagcgccgctaagcggtttgagcgccgccgtcttgccagcttttggccggttggcgacgctaagcatccatgagcgtcgccaaccggccaaggtttggcggaatggcgacggccgaatggtaggcatggccgttttgcttctgtaatctgtattcgttcggaacatatacgaaaagagccagtggtttatgtcaccgacccttagatatgaatggcggaaacctcagaaagagggctgaggcgaaactacttcagttcgcccaatgcctcaagcttgttcttgatgtcgagcgcagaaggctcgacctggaaggcgccgtccgagtacaggacgacggggatgtgcttctggccgctgatggcgaccgcgcgatcctccgcgccttcctcggtttcgatgtcgtgccagttgaacgcggcaccgagatcgttcagcgcggccttggcacggtggcagtcgccacaccagctggctccgtacacgtcaatggccatgtttgctcctttgatcgtaattgctcgttatggttcgttgtcgtcgcgaacttcgtcgtgagtgatgatacccgtcagaagtgcgcgttgagtttcttctcgcagtactgctgcagccaggtgagcaccgtgctgaacagcaggtagatcaggcccacctcgatgtacagcgccagcggctcgtagtagacggccaccacgcgctgggcggccatgaacatctccaccacggtgatgttggcggccagcgacgtgtccttgaccagtccgatgaacgtattgaacagtgcggggaaggccgaacggaacgcctgcggcagcacaatgcgccgcatgatcgtcacgtacggcatgttgaccgcgtatccggcctcaagctggcccttcggcacggccagaatcgcgccgcgcaacgtttccgaggcgtacgcacccacgttgagtgagaacgcgatcacggcggacggcagcgcgggaatcgtgatgccgatggagggcagaccgaagaagatcacgaacagctgcaccagcagaggcgtgcctcggaacacccacacgtacacccaggcgatctgcgccgcgaccggcactttggccacgcggatcagcgcgacgatgattgccagcagcaggccgagggcgaatgagatcagggtgagcgggatggtcacggtaagtcccggaataaggagcttgccgaaggaatccaccactatcgaccatacccgtgcgtccattgccttgtcctttgcctgtgtgatgcggttattgcgttgttacggtacctgatacggcggccgtcactcctgggagaagtcctcgccgaagtatttctcggaaatcttggtcagggtgccgtccttttgcagcttggcgatggcgtcgttcacggccttgaccaggtcgtcgctgcccttgcggaacggcagctgagcggccggcgtcttctcggacttggcggcgatcttgatgttcgcgtccggcttctgcttgaggtagtcgagcacggcgagaccgtcgttgagggtcacgtcggcacggccggactgcagggcctcgacggcttggccgaagtcgttgacctgcacgatttcggcgcccttctcctgggcggtcttgttccagttgctggtgccggtttcggcggccttcaggcccttgacgttatcgaaggaggagacgttcttcgggttgtccttggtggtcacgaccacgccgtacgagtaggtgtacggttcggtgaagtcgtacttggccttgcgctcgtcggtggcgctgatctggtcggcgaccgtgtcgtacttcttggcatccacgccggcgagcagcgagtcgaagctgccttcggcgaactcggccttgacgccgatctccttggcgatggcggtggccacttccacgtcgtagccggtcagctcgttggtcttggaatcgtggtagctgaacggcgcgtaggtgccttcggtggcgaacacgatcttgccggcggacttgacctgctcaagtgcgctggtcgaggtcttgccggaatcggacgagtcggactctccggcggatgacgaaccacacgcggccagcgagaacagcacggcgacgccggacagcagggccacggccttgcggaacactccatgggtattggacatgatgacgaacccctctcttggttggtctctcattggttgatctattagagaaaatcttgaatgctgtgctgacggcgatggcaatgccgttgggcacgcctgccgcctcatcggaccgtcaggcggccgccggaatcatcagcacgttgttggtggacgacaggaactccgccgtgcgttgctgcgtggggtgctcgaagatctgcttgggatctccctgctcgaccacgtgcccgccttcgatgaacaccacgctgctcgacgcctcgtaggcgaagcgcatctcgtgggtgaccatgagcatggtcatgccgtcctggcccagctgcttgatgacctcaagcacgccggtgaccatttccgggtccagggcggaggtcggctcgtcgagcaccagcagctccgggttgagcgccacggcgcgggcgatgcccacgcgctgctgctggccgccggacagcgtgctcgggtaccggtcggcgaagtccgccagcccgacccggtcaagctgttcgagggcgatcttgcgcgcctgttccggcttgacgccgcgcgagtagatcagtccctcggccacgttctgcagggcgtttttgttgaggaacaggttgtagttctggaacacgaacccgatcttcgaacgcaccttgcggatgtcggcggtgttggtggtggtcaggtccaccggaccgtcgccgaagtcgacggtgccggaatcggcctgctcatggaagtccagaatgcgcagcagcgtggacttgccggagccggacggcccgatcaccgtgaccacgttctgacgcgggatgtcgaggtcgagcccgtccagcaccttggtgccgttgaagctcttgctcaccgatctgatctggatcatccgggctttcctcctgtctgcggtccgcgttgtggtctcgccgattgcattgccacccgccaaccctagtgcaaggccacaggtggcaggtcggcgtggttatatgcgttgcctataaagcgctatatgcgcagcatgtatataaggtacgccatgcggcacgccgcatggtacagattcagcttgtagcacgctatcggttttcgcgattgccacgccccaaccgcgccggttgcgccgtgctaggttcgggaaaggcgcggccgaaccgtcgcgccgatcatcgtcaacgactggtcatggggattcgcgatacatcaggagagggtcatgtccgattacgttcgggtcgccgcacaggaactgcaggactttgcgaccgcagtgttcgaacgtcggggtttcgcccatgatgacgccgctttcatcgccttaacgctgctcgatgcggaccggcacggcatcgcctcccatggcatgcagcgcatggccatgtacgatcacaagctacgccacggcatgatcgatccgtccgcgcgcgccaccgtggtcagcgatgccaaagcctgcgcggtgctggacgggcacagcggcatgggccagctcatctcccgcgacgcgatgcgtctcgcaatcgccaaggcccgcgaacatggcatcggactggtgaccgtgcgcgattccaatcatttcggcaccgccggcctgtatgcgcgactggcggccgaccaggggctgatcggcgtggccagcaccaacagcaatccgctcaccgtgcccacgcacgccggccacccggctttgggcagcaatcccatcgccttcgccgtgggacgcggcgacgaccagttcgtctacgacgcggccaccagcactgtctcgctcggcaagatcgaggtgctcgtcaaactcggcgaatccatcgagggcgattgggccgtggacggctccggccgcgtcaaccatgactccgccgacgtgatggacaacattcgcgccacgccgcgcatcggcggattgacgccgctcggcggttccggcgagctcaacgccggatacaagggctacggcctggccacggtggtggagattctcaccggcgtgctgtccggcggcctgctgtccctggacatgaaaggccagcatatctgccactgcttcgccgccatcgatctggaggcgttcggcggcgcggccacggtcggcgagcgcgtcgcctcgctgtccgctcgcctgcgcgccatggactcggtggacggccacgacgtgctggtgccgggagacaaggaacggcttgccgcagcgcgcaaccgcgcttccctgcccatcgacagggcgacgttcgatcagcttgcggttattggcaagcgcgtcggggtcacgccgccggcggccctgccgaagacttccggcctcgaatccgaaaccgccgcccgccaataggcgacaaccaatcgcacacatcacacgtacaaggaccaccc

SEQ ID NO: 1626 - DNA, 3170 bp, Unknown
  R221_24m  MAG No. k141_78718
cggttccgtgttctccggcaccgagttggcattggtctctctgcgcggctcgcagatcgagcaaatggagcaggaggacgctcgcggcgccaaagtcgccaaaatcgcacgtgacccgaacaccttcctctccaccgtgcaaatcggcgtgacgctctccggcttcctgtccgcctcgttcggcgcctcttccatcgccccctacctgattccggtggtcgaaagctggggtgtacaccccggcatcgccggcggcctggtgaacatcatcctgaccctcatcatctcctactgctccatcgtgatctccgagatggtgcccaagcgcatcgccatgcagcgcaccgagcagatcgcgcgcgccgtggtgcccgccatcgacgccttcgccgccgtctgccgcccgatcatctggctcatcggcaagaacacgaacggcatcgtccgcctgctcggcttcgacccgcagcagaccgagtccgaggtgtccgacgacgagctgcgcgtgctggtcagctccaacaccaacctttccaaggacgaacgcacgattctggacgatgtgttcgacgcgtccgaaaccatcgtcgccgaggtgatgcgtccgcgtgccgacgtggtcttcatcgagggcgaccagcccctggccgaggccgccgcgttcgtacgcgaccagccgtactcccgttacccggtgaccggcaaggatttcgacgacgtgatcggcttcgtgcatgtgcgcgatctgctggacgtgcgcgatccgaacgccaagatcgtgcgcgatgtggtgcgcgaaggcatctccctgcccggcacctccaagctgctgccgagcctggaactgctgcgtaagcgcggcatccatctggccgtggtcatcgacgagtacggaggcacggacggcatcgtgacgcttgaggatatgaccgaggagcttgtgggcgatattcgcgatgagtacgatctgcccagcgagaagggcggcgaacgcaccacccgcaccgcgttcgtcaatggtgtggccacgatcgaggccagcatgaccattgaggacttcgccgatctgaccggcatcgaattggaggacggcccgtacgagacggtcgccggatacttcctgtccaagaccggcaagatgggtgcggtgggcgacgtgctgcattccgacgacggctacaacatggtcatcaccaaggtggatggccgccgcatcgaaaccatcgaagtccgcaaagccggtgccccggaccatgcgccactgccagccgaatcacaaagcgacgatgccaactagccacgtgatattcaccacctattcgttcggcccggggcataaccaaaaatcgtagaattatatggacaggttccacctactgaaagaaggaacattatgacacttgcgtttgttgtgccgggccttgatgaagcggccagtgagaaggccatcgccatcctacagaaccgactgagccaggagcaggaggccgctctggtcctgaagcacgcacactggaacgtgaccggcccgaacttcatcgccgttcacgagatgcttgaccccgaggtcgaggccgtgctggctcaggccgacgagaccgccgagcgcatcgccactctgggcggcaccccggacggccgcgcggacgccatcgtgcgcaaccgcacgtggaagtcgttcgacgccgagggccgcgtgggcaccgaggagtatctcaaggcgctgatcgagtactatgacgccttcatcgccgacgaccgcaaggccatcgccgagctggacgagctggatgtgatcagctccaacatcatccaggaccacgtgcaggaactcgaaaagttccagtggttcatgcgctctcacctggcataagtaaaagcagtattccgtggctcccctcaaagaggggagccactttcgtctcacgtgaaatagagagtctccacatacataagttggaaaagtgtataaaactccacattttgaggttggaaaacgtagccaaaaccgcatcttatggttggaaaacgtgactggaaccgtatttctgtggttgtaaaaatgtagccgtacgttcaacaacgagtggcaggcccacatgcgggccgcacacttagtcaacaagtacatgtcggtcagatggttcggactggtcagagggcccgctctgatcagttaggtcggtctgaacggactggctgggctggtcggcctgagtagcccgtttggaccgatccggttcgcccttgctggccttcacactgcttcagctccagctgaagttcgctgatgcgccgttcgagttcgtcgatgcgccgtacttgtggcgaagtgagactgaggggagcctacaaaatgctcacaggccgagggcaccggccacggccatggcctcgtgttcgggatcggcctggccgatgtgtacgttgacgtgaatttcgtcatcgcccggctcttcgagaatgtcggactgggattgcagcatgctcggcttcatgaagtggccttggcggtgggaaaggcgttccatcacctcgtcgaatgtgccctgcatgtagacgaacaccacgccttgacggcgcagcttgtcgcggtagatcttcttcaacgccgagcaggtgaccacggcgggctcgccggcggccacgcgctcgtcgatccacgcggcgatggtgtcgagccaaggccagcggtcttcgtcggtgagcgggtgtccggcggccatcgagatggtggcgcattcggaccatgcgaacgaatccgatcaggccatcagccacatcaccggcactgaagcctgacccgtcatcgtcacagcaccacgcggcggttgaggtcgcggcgcagcgtcttccagccgggtaggtaggcggtcatgcggcgttggaatccggcgccatggccgctttcccacagatgcgtcatctcatggaccaagacgtattccaggaattgcggttccatcactcccaattgaaggttcagacggatgcggccggttcgcggcgtacacgatccccagcgcgaggccatgacccgtagcgtgatatgcgtgggctgccggccgatgaccggcccccacttggccagcagctgtggcaacgcggcgttgatcgcggccgccgcttgtcgtttgcgttcgtcggtccagatttgggagcggtcaaaa

SEQ ID NO: 1627 - DNA, 4412 bp, Unknown
  R221_24m  MAG No. k141_79150
gtgggctatccgtaggtgaggggagcggctgtgccgcgacggaaaatccggaggattttcggtctgtaggcaacgtgcgagccgacaggcgagccagcaaaacgcgggcgaagcccgtccaaaattgctgtaccgttgccatagtgctgtgagctccctctgatgagggagctgtcgaacgaagtgagactgagggagagatcccacagaccaatcactcccgccttacaataaagccatgaagcgcatcgatgtgaatcatggctggcggttccgttcaattggcaaggaccgcgatacggcagcgcggcagccagtcacgctcccgcacgatgcgatgattcacgagtcgcgcgaccctcgcgggccgcacctcgcgattcatcgaacgaggacatgacggcgtggccagctggtcatgggcgggctatgagggccgcgacgccatcgtgcatgtcaccgatgaccgccgcattgtggttgatgcaggcgggcatatcgccgtcggaccttctgccgaagctgtggatgtggaggtacaagtggactctgtggccgcacaacacgacctgcctgccaatgccgaactgctcggcgtggccagcgccaatcccatcaccgtcgatgaactcgccgacaatacctgcaccacctacttcggccgagcccaagctatttggcgaataccagccgaaacgtctggtattgcctgcagcacaaacgccctcatgccatcgtcatgacggtacgataggtacagtcgatgcccggaaaaccgacccgggcatcctgcgggaaggatgtaccatggtcaatgcggatttcgctcagttgcgtcacgcctacgaatccgggtgtacgcggccattggcttggcgacgggcgcaattggatgcgctatgccgtctggtagcggacaatcgtgatgctttcgtggctgcggccatggccgatttgggcaaacccgcggcggaaaccatactgatggagctgaatctggtggccggcgaggcgcagttcgtccgcaaccggctcggactgtgggccgcgcgccatcccaaggcgatgcattggatgctgcaacccgccgccggctggacgatcgccgagcccaagggcgtggtactcatcatctcgccatggaattacccggtgctgttggctctggagccaatggccgacgcgctcgccgcaggcaacgccatctgcctgaagccctccgagctttcgcccaacacctcgcgcctcatcgccgaactcgtgccgcaatatcttgacctcgagtccgtgtgcgtggtcggaggcgggcccaaggaaaccggcgaactgctgaaatgtccgttcaaccatatcttctacaccggcggtgggcacgtcggcaaaatcgtcatgcgtgcggcggccgagcacctgacaccggtcacgttggaactcggcggcaaatcaccgtgcttcgtggaccgtacggtggatatcaatgtggccgcacgacgtatcgcatggggcaagttcaccaatgccggacagacctgcgtggcacccgactatgtgctcgccacgccggatgtggccgaggctctggccgagcgcatcgccgtagccatcaccgaattctatggcgaagatccgaaggcctcgcctgattttggtcgtattatcaacgatcgtcattttgaacgactgtgcaagctattgccggtcggcaccgtgccgtctgaggagccgagctcgccgctggtacaggtggcatcggcggtaggcgcggccatggatatggtcgggcggcgcttcaatgtcgcggctgccggacgcggaagcgcgggggagacagccggtggtggcaccggtagcgcgaacaatgcggcgaagccggcggccggttcgaatacggcagccgctgatagtgatgcgactgcctcggccgctgttgagccgagcgagattcacaaggtgcccggcgtattcgatccggccgggcgaatcgtttgcggaggcaaggtcgatcgcgccgcccgatatatcgcgcctaccgtgctatacggcacgtcaccggatgcgccggtaatgaaggaggagatcttcggcccgattctgccgatcctggtggttgaggatgccgagtccgcaatccgattcatcaacaagcggtcccggccgttggctgcatatgtgttctcgcgcgatcacgaggttcggctgactttcgaacgtcagaccagctccggagctttgggatattcgttgccgttgggtcacctgctgtccagccgactgccgttcggtggcgtgggcgcgtccggcatcgacgcctaccacggcaaagcaggcttcctcaccttcagccacgtcaaaaccgtggttaccaagccgcagttccccgacactctgcgcctcgtgtacccgcccttcaatgaagccaaggccaaactgttcaacatcatcgccaaattcagctagcgtgatatcgctcgctgatattgggtgatggcgttgtcatagtgacgttcgctgtcccggcagccacgtcaatcgattgattcgtgtaccgggtcagatttttctgtcctggtatttgatttcgagtcattttctgcttaccgggacaaaactgacgccgaaagtatcgtccgcgtattacgaaaatggcggaatagtgcggttttgcatggaagggaattccaaatattcctatattcgaggtgttcaactgtcctggtttgcgaaaaagagccgaaatcagctaccgggacagaaaaatctggcccggtagccacgtcaatcgattgacatggccaccgggccaaaaatatgcggcagatgcgccgcttctgttacttcagggctttgaagccgatgtcgtggcggtagaacagtccgcgcagctcgagcttgtcgatgatcgcgtagaccttgtcctgagcggacttgatgtccggggcggaggtttcgacgagcaggacacggccggagttggcaatcagaccacccttgtcgtcggaggcgacgccggcatagtagacatgcgaatcctcgtcgacctcgatctcgggcacacgggcacccttgatgacgttctccgggtagccgttggaggcgatgaccacgccgagggtggcgttggactcatcccagatgaattcgggggtttcgccgtcgagaatggcggagatgccggcaccgaggtcggaggtgagcttcgggagcacgacttcggtttccgggtcgccgaaacgagcgttgaattcgatgaccttcggtccgtcggcggtggcgatcaggccggcgtacaggatgccggtgaacggcgtgccttcctcggccatgccttcgacggtggggcgcacgattttctcgatggcctcgtcgaccacggactgcggaatctgcggcaccgggctgtaggcacccatgccaccggtgttcgggccttcgtcgccatcgtgggcgcgcttgtgatcctgggagatcggcatcggccagaaatcagtgccgttgacgaagctcatcagggagaattcctggccgtcaaggaagtcctcgataacgaccttggcaccggcggagccgaagcgatgatcgatgaagatgtcttcaagcgcacgctgggcggtgtgctcgtccatggccacggtcacgcccttgccggcggccagaccatcggccttgatgacgatcggcgcgccatgctcgtgtacgtaagcctgagccatgtccaagtctccgaacgtctgatatttggcggtcggaatgttgtgacggtccatgagctgcttggcgaagtccttggaaccctcgatctgggcggcggccttggacgggccgaacgccttgatgccggcggcggcgaaatcgtccacgatgccttcgatcagcgggacttccgggcccacgaacacccagtcatagccattgttcttcacgaattcgataagtgcggcgtggttcgactggctcagctgcgtggtgtggatgccgtccttgagcatgcccgggttgccgggagccacggtgacttcgtcaatgctcggtgccttgagcagcgtgtaggcaatggtatgctcacgcgcaccggagccgatgaccaatactttctgacccatgtttttccttcctaaagtctttggctcccctctttgaggggagccggtatctggagctacttcagtacgatttgcgtgtcggtggtgtcggtggtgatctggccgagcacgtaggcgggttcgttgttgtcggcgagcagcttcagcgcctcgtccttgcgggcggggtcaatggccagcaccatgccgatacccatgttgaagatgttgtacatctccttgtgatcgatgttgccggccttctcaagcacgtcgaagatcgggagcacaggccaggtgccaagctcgatctcggcggccagaccgtccgga

SEQ ID NO: 1628 - DNA, 15818 bp, Unknown
  R221_24m  MAG No. k141_79884
cagccctcgtagcctgaaccgggccacacgggaaaggacgccggacgccaccggcagggcgaagcgcgcccacgacagccaaccggaatcccgacacgtcaactccccaaggagttgacaaaaacataggaacaccccccccctgcaatgttccgaaacataccaagcgaaaatcggccatcagcaatcccctgaaaacgttgagggctcgccggaaccgctatacataccgtcgatcggtatgtatagcgatcggcaacgccgcataccgcataccggagggaggccagcacggcacgtaacgcacaccccgaggtgacgcgcaatcgcattctcgacgccgcgcaacagctgttcatgaccaaaggctacgagcacacctccatccagaacatcgtggacaaactcggcgacctctccaaaggcgcgatctaccatcatttcaaatccaaggaagacatcctcgaagagctcaccaaccgggacagcgacgtgcaggacgacttcaacgaatcggtaatgggccgcagcgacctcaccgctctcgaaaagttccgcatattgtggcgccattcgatgaccgcacaggaccatgtgcagatcatgcgcgccgccatgcccatgctgagcgacccggtttcgttcgccgcaaacatgcggatctggagcaagcacctgcccgaacggttcctgccgctgattgaagagggcgtcaaggacggctccatccccaccgcatatccgcgcgaggccgccgagctgctctcgctcctgcccaactactggctgatgccgtatttctatccggcgaccttgcccgagatggagcaccgcgtccggtgtctggcagccatgctcagcgcgattggcgtgccgattttcgacgacgaacttatcgaaattaccgccagaggcatgatgatattcgacaggctcccctcagtcgcctgcggcgacagctcccctcagagaggggagccaaggaaaggctcacaatgaacacagcaataaaacgcaagaacgacaacagcacccagcgcccgctgcgttcccgcgacttcgtgctgttggtcgccggccagggtatttcgctgttcggcaatatgatgctgcaattcgcgatgtcaatgtgggtgctggacgaaaccggctcagccaccatcttcgcctcggtgctggcaatctccatcgtgccgaccatcctgctctccccgttcggcggtgtactggccgaccgcgtcaaccgccgcaccatcatggtggcgctcgacgccatctccgccgtgctcgtgctggcgagcgccatcgtcttcgcctccacgggcttccatatcgcgtccatcgccaccatgcaagtgctgctcgccgtgctcggtgccttcgaaaccccgaccgtgcaggccgcgctcccccagatgttccggcagcacggcccggccaccatgcgccaaggcatggccgtgatcaatcaggtccaacagctgagcagtctgctgccgagcttcctcggcggcgtgctgtacgcgatgttcggcatccgcctcatgatgatcatcaccatcgtgagcttcgccggagcggccgcgctcgaatgtttcattcgcctcggcgccccggatcgcggcgacgaggagctgcccactccacttgaagacctcaaggcaggcgtacgattcctcatcagagaccggccgaatgtattcaagctgctactgttcgcggcggcactcaattttgtgcttatcggctattccggcgttggcttcccgtacacgattcgtacggtgctcggcttcgacgccaccatctatggcattgccgacggcctgatcggcgtatccggtgtggcgggcgccttcaccaccgccctgttcgccgcgctcaccgtgctgatggttccgctcgccgagcagttcgaggactgacgatcggcgcgcacgccacatcccgtcagccagtcatattcgtcgcccataattgaatcaccgcacaaaaaggcacgaaagaggtacctatggccacgctcaacccccaatcattggtcacattgtggcagatcgaacagtatggttcgttctccgccacggccaaggccacgggttggtcgcagccggccatcagccagcagatcaaaaagctggaggcacagtgcggttcgactctggtgcaacgcacctcgcatggtgtggaactcaccgccaccggttcgatgctcgcccgccacggcgaggccatcgccgatcggctggagcgggcggcccgtgaggtcgaggattatcggcatcatcggtttgctcacctgcatttggtggccccaccgtcaatctgctctactatcgcggcccgtaccgtggtcaagctcagtatgttcacggacatcgagctgagcctgattcagatggagccgccggaggcgatcggtctgatttcccaaggcaaggccgatgccgccgccgtgttccggtacagcagcatcccgaacttcctgcacatcggcgacgatctgaccttccagtcgctgggttacgatccgatgcgattgttggtccgccgctccagcgacatcgccaaacgattcgaggagaccggcgaacccgtgccgctgtccgccgccaaagacgagcattggatcgccggctgccccacctgccgcgcaaatttggtgaaactggccacccgtgccggattcaagccggatatccgccactgcacggatgattactgggccacgcagaacctggtcgaggttggcatgggcgtctcgctggtgccggcgctcgatacacatatcaatctgcaaggcgatctggtggcctgtcccatcgccgacgattttgcggcgcgcgaggtcggcatcgtgactcgtgccggcgaccatcgcccagcgcttggttcattgctcgaagagctcgagcgcacgtcactcaaatatttgagtgccaagtagtcacacagcgataagcaagcttgcgagcgccatcacgatttcggggagccagaccgttgagcggcccttctgcaccgggaacaatggcatgttatgagcatgaacaacattccccagtcaacgactgtgagcaacgcaaccgccggcgcctcttgctttgatgccaatcacatcgacgtgacgaccatcgaggatctggagcaggtcggttcggataaatggacccgttaccccggctgcatcggcgcattcatcgccgagatggattacggtctggcaccatgcgtggccgaagccatcgaagaggccactgaacgtggcgcgctcggctacattcccgacccgtggaagaaggaggtcgcccgctcgtgcgccgcatggcagcgccgctacggctgggaggtggatccaacgtgcatccgcccggtgccggacgtgctggaggcgttcgaagtgttcctgcgcgagatcgtgcgcgccggtaactccatcgtggtaccgactccggcctatatgccgttcctgagcgtgccgcgcctgtatggcgtggaggttcttgagattccgatgctgtgcgagggcgccggcgagagcagcgggcgcaatgatgaatggctgttcgatttcgacgccattgagcaggcgttcgcgaacggctgccatgccttcgtgctgtgcaacccgcacaacccgatcggcaaggtattgacgcgcgaagaaatgctgcgattgtccgacctggccgccaagtacgacgtgcgtatattctccgatgagattcacgcgccgttcgtctaccaaggccacacgcatgtgccattcgcctcaatcaaccggcagacggccatgcaggctttcacctccacttcagcctcgaagtcgttcaacattcccggcaccaagtgcgcgcaggtgattctcaccaatccggacgatctggaactatggatgaggaacgcggaatggtccgagcaccagacggccaccatcggtgccatagccaccactgcggcctatgacggcggcgcggcatggttcgagggcgtgatggcgtacatcgagcgcaatatcgcgctggtcaacgagcagatgcgcacgagattcgccaaggtgcgctatgtggagccgcagggcacgtatatcgcgtggctggatttctcgtcactgggcatcgatgacccggccgactatttcttcaagaaggccaacgtggcgttgacggacggccgtgaatgcggcgaggtcgggcatggttgcgtgcgtatgaacttcgccatgccctacccgctactggaggaatgcttcgaccgcatggccgccgcacttgaggcggacgggctgttgtaaaaaattgtggctcccctcagagaggggagccgaggaacggccgaattaatcgaagtcggcacccaacgcttcgagtttgccgcggaagtcggcgtagcctcggtcgatcaggctgatgccgtgcacgtccgaggggcctgacgcggccaaggccgcgatcagatggctgaacccaccacgcaggtccggcacgtcgatgtcgcgtccggtcagcggggtcggtccgaagatcacggcggaatgcttgtagttgcgctgccggaaacggcacggcagcgagcccaggcactcgcggtacaactggatggtggcacccatctcgaccagcggcttggtgaagccgaaacggttctcgtacacggtctcgtgcacgatcgacaggccgttggcctgggtcagggccaccacgagcggctgctgccagtcggtcatgaacccgggatgcacgtccgtctcgatcgccacgggcttcaagtccccgcccggatgccagaaacgaatgcccttgtccgtcacctcgaatttgccgcccaccttgcggaacacgttgaggaacgtgatcatctccggctgggtggcacccttgacgaaaatgtcaccgtgcgtggcgagcgcggcggacgcccaggacgccgcctcgatgcgatccgtcagcgacgtgtgcgtgtacccctgcagttccttgacaccctcgatgcggaaggtgcgatcaacgtccacagaaatgattgcgcccatcttctgcagcacgcacaccagatccatgatctccggctcagtggccgcgcccgacagttcggtcttgccctcggccagcacggccgccagtaaagtctgctcggtggcgcccaccgacgggtagggcaggtggatcttcgcgccgtgcaggccgttgggcgcggtgatgtggatgccgtccttgtgttccttgtccaccgtggcgcccagcttgcgcagcgtctccagatggaagtcaatcggacgtccgccaatcgcgcagccgcccaacgcgggaatgaacgcctcgcccagacggtgcacgagcgggccggagaacaggatcgggatgcgcgacgaaccggacagtgtatccacgtcggccacatcggccagctgcacacgcgaggcgtcgatggtcacaatgccgttcgcaccgtccacatccacgtccacgccgtgcagacgtagcaaatcggacaccacatgcacgtcacgaatctccggcacgttcttcagcaccgacttgcccggtgccagcaacgcggcgaccatcgccttgctcacgaagttcttcgcgccacgcaccttgatcgtgccattcaaaggcttgccgccctcgacatgcaacacgtcatccggattctcagccacgccactctcctcaatcaatcaagattcaaaaaatgctaccgtccagtttgccataagccatgtgccgactccgtgaaatgcaccccagccgaactttgatcaccgtgcacaacggatcccataccccccgtcgaatcaaaccgataacgtgatcttcctcacatttgccgccacggtgttctccatacttctacgctacgattcagggcaatggcatcagacgccatggccacaagcaaaggagcattcatgaccacagtcgccgtcatcggctgcacgcacgccggcacgttcgccaccacctcgattctcgccgagcaccccgattggaccgtccatgttttcgagcgcaacggtacgctgtccttcctctcctgcggcatcgccctgtgggtgggcgaccacgtatccgacccgaagaaaatgttctactcctcccctgccgctctggccgaagccggcgcgaccatgcatatgcgcaccgacgtgacgtccgtggacctcgacgccagaaccctcacctaccgcgcgctggacgaggccggagaccccgccgaacagaccctcgctttcgacaaactggtcgtgaccaccggctcgcgcccggtcatcccgccgatccccggcatcgacagcccgcatgtgctgctgtgcaagaactgggatcacgccatcgccatcaaggaaaaggcgaaaaccgccaagtcggcagtggtgatcgggtcgggctatatcggcgcggaaatcgccgagcagttcagcgtcaccggcgtcaagaccacgctggtcgacggccttgatcgcccgctggccaataatttcgataagaccatcaccgatcaggtggcggccgcgttcgaggagcacggcgtcacgctcgcgctcggccagaaggtggtcgagttccgcgacaatgacgacgacaccgtcactgtggtcaccgaaaagggcgagtacacggccgaaatggcgattctggccgtcggcttcctgccgaacaccgacctgctcaagggcaaggtggacatgctgccgaacggcgcgatcgtggtcgacgactacatgcaggcgtccgcgccgggcgtgtacgccgccggcgactccgccaccgtgttctacaaccccaccggccagcacgattacattccgctggccaccaacgcggtgcgccagggcctgctggtgggccgcaacatcgagacgccgaccgtgaagtacatgggcacgcaggccacgtccgccgtgcagctgtacgatctctcgctcgccgcctccggcctgacccgcgccggtgccgaacgccgcgggctcacggtccgcgagacctcgctcaccgaggattatcgcccggacttcatgctcaccaccaccccagtcacgtcgattctgacctgggacccggaaacccgcaaggtcaagggcggccagttctgttccaaggccgatatctccggcgcggcaaacgtgatttccatggcgattcaggccggcttcaccatcgaccagctcgccaacgtggacttcctgttccagccgaacttcgacaagccggtctactacgtcggagccgtggccatgaaggcggcggccgagtaagacggctgtacccaccgcaaaaaagaaaccccggcgtgatgggcgccggggagagaaaggagagaagaagaaagaggttaagttatgcagcttgttcggccgtgattacatataacagcaacagtttcaatgcaacatgggcactgtctgggaatcgtctgggaatcacggcccgtacaggctgttgcttgtttttggagccgatttaccggctggccttgatcttgtgggccagttcggcgtcccacatcgcgccggtggcggacatcaccgagtccgcgccggcgtcacggtacgcctggtagtcggcgggcgagaccacgccgccgacgccgttgatcgcgaaatcgagcccgagcttttcacgaatcgcggccagacgggcgaccatgtcgaggccggcgccacgaatcgcattgccgcacacgcctgagcgatcgcggcccgcgccgggcagggcctgattgccattggcatcgaccagtttggcggaaatcgtattgatggtgctgaagccctgcacggtgccgtggcccacggtggaacgcaccataagctccagagcgtcgtcgctggggatgtaggcgagcttgaccatcagcgggatgtcgccgatctcctgcttcacggcctcggtgatgcggcccacgagcagcggattgtggcatagcaggcggttgtggccctcgttggggcagctggtgttcatcaccatgagcttggcaccggtctccttgaccaggcgggcggtagtggcatggtcggcgatgtattcctcctcgctcatgccctccacacgcgagccttggaagctcgggaccagcacttgaccgggaccggcggcctcgatggcggcgcgcatgtccggctgccagacgtcagggctctgcgagggcacaccgaagctgttggagatggaaatcggctgttcatagttggtgtcggccagcacgccttcgtccagttcggcgctgcccggcgtcagtgaaccgtccgccgacttggggtgtacggcgagcacgttcgggaacgggttgcagccccaggcgcgcgaacgcacggttttgtaggtcgccagatcgaaacccatgtggaaagcggccgtggtgaaacggctgttgagcagcgggcctgcgggaatgccgaaaggcaggttgaccggctggcccaaaaaggtggccaaggcaccctcggaggcaccctcgctggtggttccggcggcatcggcaccgttgccatccttcagcgcctcggcgaacgcgccgaacggcccttgctcatagttgtcttcgtaactgcggctgacatcgtaaaacggctcaaaatcactcatgcttcaacgataagccaacctgcatgcgcacacgcacactcaacccatcatcgcgccgacaaacgaaataatggcgaaagcggcattggctaccacaaagatgatgaacgtcggagctgcccagccaaagtacgtgtctggaatactacgattcgtacggtgatattggcgcatctctttgccgtatatcacgaatatgataatcgatccgatcacgccgatcacagatagcgacaatgagaatatcaaatatgcgttgtcatcaagatagttgccggcaagggtatcgatggcgccggaaagaatcgcattgttgaagatgtgcagtgcaatcgaccaaaccaacgagtattccatggccacgaatcccagaatcaggccaaagaggaacgcgaatgtgccttgcactacgtcgtcatggaacaggccgaacaccattgccgaggtgacgatggcgaagttcttgcccaacggcttgagctccttcatcagtacgccgcggaacagtacttcctcgcaaatcggagcgaccagcccaacgtacagccacatgcttacggtgacgctggattcggcgatgctgtctgacgtgggagaggcaagatcggtgcccagcatggaaaaagcgacctgcaccaacataacgatgccttgcacgcccatgcccagcacgatgaacatcaacgcccagagaggctgcatgcgcccgccgccatattggctgatgtggccaagctgattgggctccccgtacgagtcgcgatgctggccaccaagccagaattcgcaggtgaagatgtcacggtggcgcatgagcagcagaaatccgaacgcgacgaacaccgatatcaggctgatgatgccatcccactgcacgccggacaaatcgctcgcggttattacgccgacgataatggtggcgaccattgcgcccaagagcatcatgccttcataggcgagagtcagtcccattacacgattgaccaccttgcgacgccacgtgcgccatacacggcgaggatcgatcggcatgaccacgggcattgctgcgggcatcgtggcaggcattgcgttgggcattgtgactggcattgccggagccgtttgcacgaatggttgcggcgcagcggaatagggttgtggcgcgtagcccactggttgagcgtagtacggatgagcgaggggctgtggagccgactgttgcgccgggtatggggaataggcggattgcgccggatacgtcggctgcgtgggatacatcggctgggcaggatacgtaggttggacgggatatgtcgggtatacgagctgcgcggcgtattgtgcaggctgcacagcaggtattgcggcttgcggcacaggttgtgaaacaccttgtgaaacaatccgtggaacaccccgtgaaacatcttgtggaggtagcggttgtgcccatgcctccggctgacccgcatattgcggctgcatgctcggcccaggctgaacatactgtggcgtctgtggcatcggcgtctgtgactgtgccgcagactgcggtgccggtcgaggtggcaacggttgcgctgacagcgattgcgccggagccgtatcggaatcgttcgacggattcatgtcattcatggtcatgatgctcaacctaaccgtcattactggatgaatcgtgattatgtccacaaatgtgtacgaattcaggcacagtatttcgaacgctaggacggagttcatgagtgttgaggaaagcgccgccacgccggtgttggtggctgcggtggataacgaccgtatggcgttgttggcgctgaagggaatattgccgcaactcctgcccgccgcgcaatggatgtggggcgcgggcaccagtgagacctttgtttgatgcgatgcgagcgacccaataatctcaatcagacacagagccaacggccctgggcctgcaattatggactcgcctttcggcgaggctcaatgctggcctcgctgctgtcgcagctcggcacagggcctgctgaaagcccaccgggctttcagcaggccgatcgcggctaaataatgccgcaatcggccaacggccctgtccagtctgcgtcctcaggctcgcgggcggactcgattctttcttcggcccagtgtttggcggggatggtcttgggcttgaaggggaacttttcggcgcgcatcttttcgtaggcggcgatgtcgtcctcgtgctgcagcgtcagatcgatatcgtcgtagccgttcatcagacgccaacgcacgtaatcgttgacctcgaacggcagggtcacgtcgccgcaagtgacagtgcgggtctccagcgagacagtcatctcacgaccaggctcttcctccagtagcttccacaggagttcgacggactcctgcggcataatcgcggccagcacgccgttcttggcggtgttgccgtagaagatgtcggcgaagctcggcgcgatgaccacgcggaaaccgtaatcgtgcagcgcccacacggcgtgctcgcgggaggagccgatgccgaattcggggccggcgaccagaatctggcccttaccggcgtattccggcttgttgagcacgaagttcgggtctcggcgccatgcgtagaacagggcgtcatcgaagccggacttggtcacgcgcttcaagaacacagcgggaatgatctggtcggtatcgacgttggagcggcgcagcggcacgcccacgccggtcagtgtggtgagtttttccataacaattttcctttcggggatctctcccccagtcagtcttcgactgacagcccctcgtcagagggggctcacgtgtattgactcagagatcggcgggagacgagattgtgccgcggatggcggtggcggcggctacggccggcgacgccagatgcgtgcgcgagcccttgccttggcggccctcgaagttacggttcgaagtggaaatcgagcgctcgttcggcaccagcttgtccgggttcatgcccaggcacatcgagcagccggcgttacgccattcggcgccaaagtccttgaacaccttatcgaggccttccttctccgcctgcaaacgcacgcgggaggaggccggcaccaccagcacgcggtggatgttctcggccttgcggtggcccttcataatcgcggcggcctggcgcaaatcgtcgatacgaccgttggtgcacgaaccaatgaacacggtgtccacggcgatgtccttgatcggcatgcctggcttcaaacccatgtatgtaatcgcacgttcggcggcggcgcgcttggtggcgtcggcgatcttgcccggctccggcacggaggcggtgatcggcagaccttggccggggttggtgccccacgtcacatatggaccgagcttggtggcgtcaatatccaccaccttgtcgaatacggcatcgtcatcggtcttcagcgtcttccagtacgccacggcctgatcccacagctcgccttccggcgcgtgcggacggcccttcaggtactcgaacgtggtctcgtccggcgcgatcatgccggcacgcgcaccggcctcgatggacatgttgcacacggtcatacgttcgtccatggtgaggttgcgaatcgcctcaccacggtattcgatcacgtaaccctggccgccgccggtgccgatcttggcgatgatcgccagaatgatgtccttggccgtcgcgtccgcgggcagcttgccgttgacgttgacggccatggtcttgaacggcttcagagacagcgtctgtgtggccatcacgtgttcgacttcggaagtgccgatgccgaacgccagcgcgccgaacgcgccgtgcgtcgacgtatgcgaatcaccgcacacgatggtcatgcccggctgggtcaggcccagaatcggggcgaacgcgtggacgatgccctgatcggcgtcgcccagcgggtgcaggcgcacgccgaactccttgcagttcttctccaaagtcgtcaactgcaacgcgctcgtctcatccgggttcgggcgatcgatatcaacggtcggcgtgttgtgatcctcggtggcaatgagctgatccacgtgacgcggcttgcggccggccaagcgcaggccctcaaacgcctgcgggctggtgacctcatgcatgagcatcagatcgatgtacagcaaatcaggagctccgtcgctgcccttgcgcaccagatgatcggcccagaccttctcggccagtgtcgttcccatagtgattcctccaaaaaattccgcgcgaggtattgtgttcgcgccttgttcgtggtattagcctatgtgcttgcgatgggcccggccatgagcatgccggatattgagatacggtcaaatgatggcctcaatatgactcggacccgactcgaacatgacctagtcatgactcggttccgctccagacatgtctcttcggcatccacgaacgccctttcaacttcatggccaccctgtgagacacttccccaatttgccatttcactatgtgagatggcataatcgcccttattatgactgattcccgggaagaaccattgaacaacagcttgaccgagtccgagccggttgaagacaccaccgccaaggacgatggggaaatccattccggcgttggcgtccttgataaaaccgtaaagattcttgacgcactggaatccggcccgtctacgctgggccagcttgtggccgccaccggtctcgctcgaccgaccgcacatcgtttggctattgcactggaacgccaccgtttcgtactgcgcgaccagcatggccgattcgtactcggctcccgtttcgccgaacttgccgccgcagcaggcgaggatcgtctgctgaccgccgccggcccgatcctgcagaccctgctcgatcgcactggcgagtctgcgcagatttaccgccgccaaggcgatcagcgcgtgtgcatcgccgctgtggaacgcacctccggcctacgtgattccattccggtgggtgccatgctgtcgatggaagccggttccgccgcccagattcttctggcttgggaggattccgaccgtctgcaccagggattgcgccacgccaagttcaccgccaccaagctggccgccgtacgcaagcgcggctggtccgagtccgtgaacgaacgcgaagagggcgtgtgctcgatttccgccccgatccgcaacgcctccggccaggtcatcgccgccatctcgatttccggcccgaccggccgcatgggtgccgcccccggacgccgctatgcgccgctggtgatggccgccggcaagtacctcaccgaggcactggtcaaagccgttcgctgaaacataccagtcaatccaaccgatagcccaaccggcagaaatcccgcgtcacaacgaaagagacgcgggatttctgggctataggaacaagagtgtggtgttcgcgcaggatgggcaagatcgggtagccggcggtggccacaggacgttccctctgacgagacgatgccgtaggcatcatgcaggtaatagcgagccgacaaaacgcgcgcagcgcgggttccctctgacgagggagctgtcggcgaagccgactgagggagagaccgcggccaaaggccgcaaaaacaccgcatcggccgcaggccgattcctatgatttcgcgatgcgccgacggttccgtttcatcgaggtcaaggccgaagacgggttggacatgcttgaagaacttggaggcttgtcggaggaagccgagagccgcttgacgaagctgaatgagaccatatcctcccccgatatcggtttgggttcggattaccatgtcggccctgcgtatttcctgaatctttccaaatccgaatccacggcgaaagcgttcgatgacctttggcgtgatttcctgcaaccgctattgcacgattacgtgcgcggcatgtataacgaaacagaaatcatggagaagctgaaagcggcatatgaagatgcttcggattcgccgcagccagcggaacggtcggtatgagtaccgtatcgatcaaagacaactcccgcattgaggcaaccacgctggctcccgtcaaggatatcgtcgcggctgtgtccgatcgttatgggtacggcaatgacgagcgtgagatgatccgcatcatcgacgctgtctacgccgccgcgagtgctcgcgcatgggcgacgccgtcgtctccctgctcgactcccccatgttcgcaggccgccgcaagatcctcgtcgggttctcccagggcggctatatgtcgtatcgcatggtgctcgagcatccgcacgtgttcgacgcggcgatcctgatgagcccgtcgttcaagggcgaggagtcgacggacctcaccggtttcgactcccccacccgtttcctgctcttgtacggctcgcgggaccgcacgattccacctgcggaccagcagaccgcgcgtcgcgtgctcgaggccaccggccgactcgaataccgcgagtatcctggcatgggtcagccatcgtcgacgaggagatcggcgacatccgcgccttcctcggtctctagccggttccggacggaccgcccggttccgctcggtccgtccaccccgccatccgaccatccgtcacacacgtcacgcacccgtcaccgcccgcaatcggtgtcggcggcacgcgtcgccgccgtcacacgccgaggctgcgtccgatgacgccgaggaacgtttcggcgccggcacgcacgttctacggttgcacaggtttcccgaattgcgggtactccaggccgtgcaggtgatttcgacgtgaacggttcccgccgcgtagactgttttctccggaccaggcgaacctcctgcgtcgcaccccgaatccgtccgcaacggctggcatcgccatgccggaccttgatccaatcacacccgcacggcatggcgcacgggcccttccggggcgcgcttgcgccgacgggccgccgcaatgccgacgcagccgcacagcagcaccgtcatgcacgcccatgcgccggcggtccggccgtcatgcagatcggtcggatcgggggcgggaacgggtatgctcacacgatggccggagaccaggagccggtgggagttgatgccgtatggcgtacaggtcatcaacgtcagccgatcctgcccgggaacaatgcgcagctgcgaggtatcggtcggttcgatcacggtgatgcgatcgacttcgtaggccagggtcctgttcatcgttgagatgtag

SEQ ID NO: 1629 - DNA, 3712 bp, Unknown
  R221_24m  MAG No. k141_80620
ccccccacctcagtgccaaatgcactcctattccgtaatcgtcagcagcccgtcttgttcttcgacgcacaaaaacgtaggccgttcctggccggggtcgttgggcgagtggaccgcgtaacgcagcacgccatcgagaccgttgaacagcatgccgtggccgccgtggctaagcagaggctcggggcattgcgtccaaggcccagcaatcgaccctgattcgctgatggcctggccgactgcatatccgccttccgtcgaccagctcgaccacagcatcgccagccgtccgttggaaagcctgcacaggcagggaccatcggagaagtaggcgtcctcgtcgatgccgaattccgctttcgcgaacggcaccggcaccgcccacggcgcatccgaggcctggaacaatgtcatgctctcccccaccgtccgagtcaggtcggaggacagacgtacggcatccatgtctccggcgggcacatcctccaaggaatgcgagtagacaagccacatatcggtaccttcaccatgcagagttccgtcaatgcaggactgattcggatcggtcagccggcagacatattcgaacggatcaagcggactatcagcgcgtagcatgtgcacgcttttgcgcccgtccggctcgccgagcgtggcaatcaggtggaatacaccgtctcgctcgtagcattcgggcgcccagtaagcacggtcggccgtgaattcatccggcttgtggaacacctcgaacggaccctcccaattgtcaaggtcgcggctggtgtagcaatcaaaaccatccatcgcgccccacacgttatcagcgcgggtgccatacaggtaatagacaccgtcgtgaggcaggacgaacggatcgcgcaggtggatgtcagttcgtttcattggtcaggtcccctttcatgagacagtcgtcatcagtcacttcgcgctttcgaggcacttcttttggaatccgctcacaccgagagccaccgctccggccagagcaatcgcggcaccgatgaacatcgcgccggccgcgtgcgaaccaaacagtccgttaatcgcgttgacgagcacagggctggcaaatccgcccagtgcgttggccgtggtcatggcagcaatgcccagcgggatgaggtagggcttttcgatgacggtgacgaggaatggcgcctgcgcatagtagatgctcaggccggctccggcaaagaaactgccgatgatgagcagtggcaggctggccgagcagccaagcagcagcaaagacaggccctcgacaatgaagccgaccatcagcaaatggttcttcacgaatcggaccataagaccgacgcacaaaccagccagcagtccgccgaactgtccgatggtggaaatcagtccagcggttccggcatcgcccaagccgcgctgctcgaccaacagggacaagttgttgctgtaggcattgttcgccagaaggaagaagaagccggcaacaaccaagaaccacagtttgccggtcataacctcgcgaatcgacgcggaaggccccgttccctgaatccggccggcttcgtccgtctcaccattcttggtgggcagcgtgaatgcgcagaccaccagcaccacggcggcgaacaagtagatgaggtaggcgtgataccactgtgcggtggcgagtttgccggccacggtcatgaacaccatcgcaccgatgctggccacggcaacctgctgacccataatcgactgtcgctcatcgccctcgtagtgcacggagatcaaagtaggcagcacgttgttgataaagcctaggcatacgcccatcaacgcggaaaacgcgatgactgcagccagactggaatgcacgaagtacggcagcagaccgaacagcagcatgccgcctgcaccaatcagtgccacggtcttccgggatagaatgctggcgagtttgccggtcagccaagcgccaaccagtgcggtcagagtgatgccgaaacaatcatctgcacgctggagagcgagctgtccgggaatgcctgagcaaccaatccgatgaccggcacaatgaaaatgcccgatagcgtaatggaactcggcgataggatgcccaccttggttttcatattactcatcgtcaattctcctcgataacgactttgttattgacattgcagtgctgttgttatcaacgatacgagagtaaaactcggcaatattgacatgattatgctctataatgacctttatcgatggcgcacctacagcagcatctacagcaaaaggagtgacggccatggagcgcgatgctttccggctgccgggcctcaccgccggcgatgacaaccagtatgccgatcacacgctcaccggcatggcagccgatgcggcgaacgtcatagccgcaggcggtcccgccccgctgactagcttcggcactgtcgctcaagccgcccatctcaatccagatgacggcttcggcatcattggccatgatcttgcacacccatcgcacctacaccggcatgactatatggaaatcacgcacgccatcgccggtacggtactggtctgggtcgaaggagagaccaacgtgctgacacagggcggcaccatactcatcaagcctggagcccgtcatctcatctcccccatcatcgaatacgggcaaacaccacacgaggcggacatcctgattaaacccgagctcatcaggcaatgccgcattccgattctggaagcagccggcgccgaccggatgttcattagctggcttgacgatgaccggcagacccactgcctgctggcagccggcaagcaccacgccggcgaggccgctatcagccgcatgttcatcgcctactgcatcaacgcaacctacaggccagacttcaccgtcatcggcaacctgctcgagctgttccacgaaacgtcccgagtcttggaacaccagccacgtaccgatccgctgatcgccgccatcatcgaaaccatcacggcagatcccgccacggcccacaaccaggccatagcggacacacttggatacagcgtgggatatctgtcccggtacgcgcgcaagcacagcgggcacacactcggccaactcatcaacgaggaaaggctccgactcggcgccgaactgctcgtcaccaccgacgacaccattgccgaaatcacccgaaccattggctacgaaagtccagcctatttccataaactcttccgcagccgctacctcattacccccgaccgctaccgcaacgacttccgtatcgcattacgttgcggatgacaagcgccgcttttcccccgcaacgtaccggaatccgagatctcgcgagctggatgacgccgtttgcatagcgctatactcactttttccacgcaccacaccagcacacccgccacgcaagcgacaagtgtatatcggacgaatagcatggcgaatcccgccactatcatcatcacaacaaaaacgaacacatcggcatgatcgcatttgccacggtgcaggtataggtagctcaccacaatcatcgggacccccccagccccgccacaaccagaaaaccgcccttggcgacgttgcctcaggcggttttccagcggaaggagagaaaggagaaagaaggaatggaaaggtgccatgcgggcataacacaacaccgcacatggcgaaactatcgaatcagcccatcgggcgcactggcatcataattga

SEQ ID NO: 1630 - DNA, 3319 bp, Unknown
  R221_24m  MAG No. k141_81248
ctggtggcaatctttgccgtggtgctgtccgtgttcaactccttcgccctcggcatcggccgagtcaagggccgtcgctggatcattctgttgatcatgctcgcgaacatgctgccgcaggaagccctcctgtacccgctgtacatcatgttcaaggaaatcggcctgtacaacaacccgtggtccatcgtcatcatcttcaccgtgatccaaagcgcattcggcacatacctgttgtcgtcggtgtacggcaccttcccgaaggcgattctggaagcggccaccatcgatggcgcaagccgctggaagattctcaaggatatcgtcttcccgatttcgaagccgaccctggccgtcatgctggtgttcttcttcatctggacttggaacgactacatgattccgatggccttcctgatcgacaactcctcgcagaccgtcccgatcgccatcgcctcgctgtccggcgaccgtctgatggatgtgacgaccacggcctccgcctcgctgatcagtatcgtgccgaccttgattttcttcctcctcttccagaggacgctgtcgaacggcatcaccaccggcgcggtgaagtaaggtcattcgcacaacaggcaattcaatcaacaagcagtacatattgattttggtttcggccgccttgttccctgggggtcgaaaccacctctccaccaaggagcagcaacaatgaagttcaccaacggctactggatgattcgtgacggcgtcgacgccctctacgctcgtgaagcctacgaactggcggcggatgccaccaccgaaagcctcaacgtcctcgccccgacctccgtggtgcgcggccgatacgataccctgaacctgcccacattcaatgtggacatcaccacacctgcggaaggcgtgattcgtgtgcgtgccgaacactggcagggtgccaccgaataccccggattcccgctcaacgccgacaagcccggcagccgggattacgtgactgtcagggctgatggcaatggcgacggcgaagtcggcgtcaatggcgcggacgtcacgctgaccaccggcgggctcacggcgaaggtcgtcaagggcgcgccttggaaccttgccttccttgatggggacggcaaggtgctcaccgagtcagcaggcaagtcgctggcccggttcaatcttggtgccggggcgaacgtcaccgcccagccggtcggcgaattcggtgtgagcatggacggctccgcccatgacgagtccgacgtgttcaccgccatccagctgcatctgtcggtcggcgaagacgtatatggcctgggcgaacgcttcggcgcgtacgtcaagaacggccagagcgtcgacatctggaatgaggacggcggcaccgcttccgaacagggctacaaggacatcccgttctacatgacctccaatgggtatggcgtactggtcaacaaccgcggccacgtctcctttgagatcggttccgagaacaccgaggccgtgcagttctccgtgcccggcgaggccatcgacttctgcgtgatctatggccccacccccaagcagattctcgaccgctacaccaagctcgtcggacgcccggcgaatgtgcccgcatggagctacggtctgtggctgaccacctcgttcaccaccaaatacgacgaggccaccatcaactccttcatcgacggtatggccgagcgtgatattccactggccgccttccactacgactgctactggatgcgcgagttccactggtgcgatttcgagtgggacaagcgtttcttcggcgacatcgaatccacgctgaagcgcctgcacgaagacaagggcctgcacatctgcgcttggatcaacccgtacatcggccaacgcggcgaaatgttcaaggaaggccgagacaagggctatctggtgcgcaagcccaatggcgaagtctggcagaccgacttctggcaggccggcatgggcttggtggacttcaccaacccggccgcctgtgaatggttcaaggacaaggtcaaggtcctactgaatcagggcgtggacgccatcaagaccgatttcggcgagcgcatcccgcgcgacgtcgtctggtatgacggctctccgaagctctccatgcacaactggtacacccagctgtacaaccaggccgtgttcgaagccatcgaagaaacctacggcaagggcaacgcctgtctgtatgcgcgctccgccaccgtcggcggccagcagcagcccgtgcattggggcggtgactgcgagtccaccttcaacggcatggcccagtccttgcgtgccggcctgtcgctgacctcctccggcttcggcttctggagccacgacatcggtggcttcgaaggtgcgttcccggatccggccgtctacaagcgttgggtggcgttcggcatgctcggctcccactcgcgactgcacggttccaccgtgtaccgtgtgccgtggctgttcgacgaggaagacgagaagaacggcgtcgcattggtgcccggccagaccgccgtggatgtggtgcgcgagttcaccaagctcaagcttgaactcatgccgtatgtctaccagcttggcctgcagcctcatgtgaacggcaccccggtcatgcgttccatgttcgtggagttccccgatgacccggcatgccgcacgctggaccgccagtacatgttcggtccgtccatgctggtcgcccccgtgttcacctactccggtgaggtttcctactatctgccggacggcgtgtggaccaactggctgaccggcgagaaggcgcagggtggttggcgcaaggaaacccacggctacgattcgattccgctgtgggcgcgcgatggcagcgtcatcgtcaccaaccccggcgaaaccaagccagaccgcgtgtacggtgagaacgcgctggtctccgtgttcgtggatgatgtggagaccgccgaagccgttattacggaaatcgacggttccgccgtaaccttcaccgcgcgccgtacgccggctggcatcgaggtcgcgagctccgatggccgtccgttccgtgcacgtttgggcgcgtctggcgatatcgtcgacgttccggatggcagcgtgatgctgtgacgcgtgctgtgcgtgacgtgcgtggtgcatgtggtgctgtaacacttcggtgttgcggcaccacgcttttgtgctgatatagggatttgtgctagtcgaatccgcgaaatgttcagtaaatgttcacgtagcgaaatcggcatagaatgcgagcaaacgcataacggcacggtgctgttcctgcgtacgccaacgccaggcgaac

SEQ ID NO: 1631 - DNA, 7115 bp, Unknown
  R221_24m  MAG No. k141_85884
cgacgtgatcatggtgctcgaccacggcaacatcatcgagcgtggcccgcatgacgagctgatcgcgcaaaagggcgagtactatcagctctacaccggcgcggtggagctggagtagtcggtacgcctgcaaaaaccgcacctcgattatcgggttgaagtaattcttatccggtagttgggggcgcggttttctatgttgagagccgtgtgttggcgcaggattgcgagtatttacggcaaaacgcaatgtctgattgcgcctgctggtgcggagcatgttgatcgaacagactaccgcaccagcagcatctatcattcagaaagggaatatcatgcctgctatggatgaaacgcttgtttctcttgattgcattcatggggccgtgtccgtcgttggctcgatgaatgccgattataccgtcaccaccgagcgtctgcccaaaccgggggagacagtgctaggagggccgttgcgggtgcttcctggtggcaagtcggggaatcaggctgtttcggccgctcgtcttggagccaaagtccgattgtttggtgtgctcggttccgacgctaatgcggattttttgcttgaagcattgaacgataccggtgtggacaccagttatattcggcacgtggatggggccagcgggaccacggtcatcaccgtagacgcggcagatgcatgacttcggctttaatcaggcggtaattacgcttggcggggatgggtcggtggtcatcgatggtgatgatatctatcgtattgcgccagttgcggttgcggccatcgacactaccgggtgcggagatgcctttatgggcacggttctggccggacttgcctcgggtcatgcgttggcggacagtgcgcagttggcctcgtacgtttccgcgtacgccgcgactggggtcggtgcgcaagcctcttatggtactgctgctcagattcgtgagcggtttgatacgaattgattactgagaagtgtggagtattgccggccgtgaattggtgcagacctaacacgttcatttaggcgctatgcagtgtcgaatgttctcggcgcggattttacgaagtattgtcagcaaatgcatcaaggcaatggcggcggtctgggcgggactacggccacgcataacagtatcgagtactcgaatgagtcctatgacgcgaaaactcggaccgtgacgatgcatgccgttatcgactggagtgatccgtaccgattcggggattcgaccggcagttttactgcgccggacatcaccgttgtctttgacaagtccgggaaaatccagcgcattgactccacggtctggggattcccgcctgcccgataattatcggagggcctgaaacatgcacgttctcatcagcgctgcgggtcgacgatgctgcaaccatacggcgtcatacccgcatgacgtgagttacactatgtagtaaagtaatttactgaaatactgcgtattgttacgtactgaggcgtggaaggctcaactatggtcacgatgaaggaaatcgcacagaaatcaggcttctcgcaggccacggtatcccggctgctcaatggggacccgacattgtctgtcaaagaggagacgcgacgtcgcatcatcgaggtcagcgagcagcttggctacgctaccggatcacgccgtatcgcattgccacgccgtgtggccgtactcgacaacgccacccgcgaggaagaactggcggacgcctatttcgatgaactacggtccgtgctcggcgacaatgccagagcccagcacatggaactcacgtcgttttcccatatcgacgatctgattgccgacgccggtgatttcgacggcttcatctccatcggaccgtccgtactctcttcggatagactgttgaagctccatctggtattgccctatggcgtattcatcgacaccaatcctgcgcccagcctgttcgattcggtacaaccggatttaagccaaaccattttggacgcattggatatgttggtgtcctcgggcaaacgacgcatcggctatatcggcggtactggcttcacgatgggtttgcacgaatatccggaagacggccgattaaccgcattccgcaattggaccgagcgtttggggctggatgcggaaggcctgatttacgcgcaaggcgcgttcactgtggacaccgggcgcactctaggggaggaagcggttaacgatcatcgagatgacatgccggatgcgttcatcgtggctgcggactcgattgcagtcggcgtactgcaggcgtttaccgctgcgggagtgctggtgcctcgcgataccagtgtgatcagtatcaataaccaggccatcgcccagtacacttcgccgacattgaccagttacgatatcgaccagaatgagctggccgatactgcgattacgatgcttgccgaggccatctccagtcggcgcacgctgcaccaccataccttcatctccaccaccctagtggtgcgtgacagtttcgtaccagcacgataaagaagctccctctgtgcgataaagaagctccctcgtcagagggagcttctttatcgctgttagaacagttccagattcacgtcgagcgtgtaggcgcgatcggcgggcagctggtactgctcatggacgggcgcgccccatgaatcgtctccgcccacgcccatttacgcggccaacaggcgcaggaacgtgtgacggaccggcggcaactcgttctggtgggtcgcctcttccagcatgagcgagctgtacggcaacaggctcgccgcgaaatgttcgctgccggcctggctgatacgcatgccgtgtccttgggcgtcaagcacttcggcccaacgcaagtcttcatggttgccggtctcctgcggcaccagatacggtgcattgtcttcggccgcggtgcgctcgaaaatgccgagcttgccaccgtgcagacggtcgtgataggccccctcggggccaaggccgtagaagcgcaggttctcgtactgcttgggaagtgtccattccaatccgaatgccggcagcgtcggcgcatcggtggcaccggcatatcgggcggtcagatgtacacgtccgctggcggcatccacctcatagcgcacggcaacttgggtttcgcccggttcggccaacgtatgacgaatgccgccaacgggcaccaacctcgttgacggcattcgtctttccaggacaccgcaatcgcggatgcatgccgtttacgcgttgaatacgtattggtcaaggcggcgcatggcctccttgacgcggctcaagggcaatgcgagattgacgcggatgctgtagggggcctggaacatgtcgccgtcctgccatgcgacgcccacatcccagccgcgtttctccaactcgggcaggctcaggccgtggcgttcgcaccactgctcgcagtcgagcagcagcatgtaggtgccttccggtttggtcaaactcactccttggaaatgcttggtgatgtagtcgtaggcgtaatcgacgttgccggtgagcaccgccttcagttcgtcgagccactcatggccttcgggccggtaggcgccgatcagcgcgtgcatggaaagcacgttcatgtcgttgtagtggcatttcgagcttttggccacgatgcggtcccggagtgtgggattgtagatgatgtggtagcttcccaccagtccggcgagattgaaggtcttgctgggcgcgtagaacgccacggtcctgttgcgtgcgtcctcgctgaccgattgggtggggatgtgctggtggttccccagagtcaaatcggaccaaatctcgtcggaaatgaccacgcaatcgttggccttgtacacttccatggccttctcgatttcccaacgttcccacacgcgcccgcagggattgtgagggctgcagaacacggccacgtggatgtgatgctccttgagcttcctgtccatatcctcgtaatccatgcgccatacgccgcgctcgtccagcgtgagcggactgtggacgatgcggtagccgttgttttcgatgctccgggtgaacccgatataggtcgggctgtgcagcagcactccgtcgccgggggcggcgaacgcggtcagcgcactgatcacaccgcccaggaccccgttctcgtagccgatcgcctcccgggtcaatccggtgaccccgttgcgcgtggactgccagtcgatgatggagctgtaatagtcgtcggtgggggagaagtacccgtaggcgggatgcttcgcccgttcgatgatggcctgcggaatcgtgggcacggtcgggaagttcatgtccgccacccacatggggatgacgtcgaaaccctcgcgtggcgggtccggcgcgaatcccgggtcggtgcccagtccgtcgaccgcgatcgaatccatgccatgcctgttcatgatggacgtgaaatcatacgtcattgtccgacaatcctttctcggtccgtggtggccggtcccaatctaaatcgggctcctgacggtgccgtggccgtgggcggcgatttgaccgcgtggcgtgttaggatatgcaccgttgtgaggcagtgatccgttatcagcggggagtcttcggaagaacggcggcaatcgcccagtagaaccgacgggatcggcccgagacagccgaacacaagcggtcgcgcaggctcgcggctccgagtgcaacagttcggagcggcgcaaccggtgcgataagcgaggtggtaccgcggtgcggagcgcataccagcgctcgtcatcgtcctcgtaggcaggaacggcagacatggctgttccgggcggaacacagtcggttccggctgcgaggcgattgactaatcggcccacggttcggtacgtgacattcgtgaaaccagccggcacacgtcggcgcccggcaatcgccatcaatgacgctcctgtaggaccagtgcacagtactaacaggagatttacggtgagcgaaaacgtatatcccaaggcgagcgagggcggcgagaccgcgcacgtcgcgccgaaccccagcttccccgacatggaggagaccgttctcgactactgggacaaggacgacaccttccagcagtccgttgaacgcaacccttccggcgaccacagccagaacgaattcgtgttcttcgatggcccgccgttcgccaatggcctgccgcactacggccacctgctgaccggctacgccaaggacgtgatcccgcgctaccagaccatgaagggccgcaaggtcaaccgcgtgttcggctgggacacccacggcctgcccgccgagcttgaggcgcagaaggagctcggcatcgactcggtcgaccagatcgagaagatgggcatcgacaagttcaacgacgcctgccgcgcttctgtgctgaagtacaccaacgaatggcagaactacgtgcatcgtcaggcccgttgggtggacttcgagcacggttacaagaccctgaacatcccgtacatggaatccgtgatgtgggccttcaagcagctctacgacaagggcctggcctaccagggctaccgcgtgctgccgtactgcccgaaggaccgcacgccgttgagtgcgcacgagctgcgcatggacgccgacgtgtaccaggaccgccaggacaccaccgtatccgtggccgtcaagatgcgcgatgaggacgacgcctacgccgtcttctggaccaccaccccgtggaccgtgcccaccaacttcgccatcgtggtcggcgccgacatcgactacgtcgaggtccgcccgaccgaaggcaagttcgctggcaagaagttctacctcggcaaggatttgctgccgcactatgagaaggaactcggcgagaattacgaggtcgtgcgcgaactcaagggcaacgagctggcaggccgacgctactacccggtcttcccgtacttcgcgggtgacgaggccgaatccgaaggccacgtgcccggcccgaacggctacacgatcttcaccgccgactacgtcgacaccgtcgaaggtaccggcctggttcaccaggctccctacggtgaggacgatatgaatacgctgaacgcgcacggcatcaagagcaccgacgtgctcgacgatggctgccgcttcaccgcgcagtgccctgactacgagggcgatttcgtgttcgacgccaacctgccgatcctgcgcaacctgcgcgccggcgacggcccgctcgccgagattccggaagagcgccgcgcgatcctcttccaggagaagagctacgtgcactcctacccgcactgctggcgctgcgccaccccgctgatctacaagccggtctcctcctggttcgtgtccgtgaccaagatcaagccgcgtctactggaattgaaccagcagatcaactggatcccgggcaatgtcaaggacggtcagttcggcaagtggctcgccaacgcgcgcgactggtccatctcccgcaaccgcttctggggttccccgatcccggtgtgggtgagcgacgatccgaagtacccgcgtgtggacgtctacggttcgctcgaagagctcaaggccgacttcggcgactatccgcgcgacaaggacggcaacatcaacatgcaccgtccgtggatcgacaacctggtccgcgtcaacccggacgacccgaccggcaagtcgcacatgcaccgtatttccgatgtgctcgactgctggttcgagtccggttccatgtcgttcgcgcagttccactacccgttcgagaacaaggagaagttcgaacagcacttcccggccgactacatcgtggaatacatcggccagacccgcggctggttctacctgctgcacgtgatggcgaccgccctgttcgaccgcccggcgttcaagaacgtgatctgccacggcatcgtgctcggctccgacggccagaagatgtccaagcacctgcgcaactacccggacgtgaacggcgtgttcgacaagtacggttccgacgccatgcgctggttcctcatgtcttcgccgatcctgcgtggcggcaacctgatcgtcaccgccgaaggcattcgcgacaccgtgcgccaggtcatgctgccggtgtggagctcctactacttcttcaccctgtacgccaa

SEQ ID NO: 1632 - DNA, 3871 bp, Unknown
  R221_24m  MAG No. k141_85921
aacctgagggtgacctgccgcttcgtcgccatgctgatcctgtcttccatacgacaagccaaacagaccaacccggtttcgcgctcactccaggtgaggcaccactacccatttcgcgctcaaaaaacgtgaggcacgtcggggcttcactctgaagtcaagtatttgatacaatttggtgcaaaaagatagtaaatagcaataaggagtggctatgagcatgcagattgccacgcgagttgatgacgagcaggctgcgttgtttaaggagacgacccgacagctgggtaccaccccggccgatgccctgcgtatgttcatcagcgcgttcaatgattaccgtgggttcccctatgaggtgcgtttgccacgaaatgacgtggagccgtttgcgtccgagcgggacgctactgagtatgccagtcgtctcgccttgaggatgtccgatgaaacgaggtgagatttggacgttgcaggccgatggctacgccagcaagccacggccggttgtcatcgtgcagagcgatgccgtcgatcggttcgattccgtcatcacttgtctgctgacctcatacgattcctccgacatcgacacgcgggtccgattggaaccaagtccggagaacggcctgaacaaagtgagttacgtgatgacggacaagatcgtcaccgtcgaccgcaaactgctgggataccaagtcggcgtggttgatgatgcagccatggcgaatatcggccgtcagctcatgcgggttctaggtttgctgtgacgtttgggatggctggcgggcgtgcgtctacttgtgacatcgtttatgcacccttgaggccgtatgatgatggcgtcgaattcaagctctccccaacgtctaagaaatggcttccttcatattacggtcatacgaccaacaccatatgaaggaagccatcatgaatggtctaacggcaatcagcttctcacacgtgattgccagtcattcaccgaatcagccgcggttgtcgaacatctgcagcagcatcttgctgggttcgacggcatagacggtgtgcggcagacgggcgctcaggtagacgatgccgccggccgtaagctcgacttcacggccttcgccgccgacgcgcagcttgccttccagcacctggatgatcacgggcatggccgcggtgtgctcgctcagtgcctggtccttgtcgaagccgaacagcacggcgcgcaggccgtcctcgcgcagcaccgtacgggagacagtggcctcctcctgaatatcgatcaacgaggccaagtcttcgatgaatccaagatgcggctcggtcgaaatggcgtggccttcggcgtcgtgggcgtcgtgcttgcaggcgcagtgcttggcctcacccgcttcagcggccgcgacttcgccatgcttgcagtggcactccttcttcgcgcccggctccgcggccgcgccctcggcgtgctcgtgcttgcaggcgcagtggtgttcgccgttggcggcagccgcctcggctgccgcggcggctttcctacgctgcttgcacttgcaatgctgctcgtcgcgtcctgccttgcatgcggtctgctgctcgttctcatcggccatgatgctctcctattcgtcgcgcgtacctcacatacgcgtcatcgcttttacttgtttcccattatccggccatcgttgggccggcacaccgctgttacgcttcgggcttgcgcacctcatccttgacggattcgtccaggttgtccggctgcaggccgagttcgtgaatcgagtaggtgccgccggcgcgcagtagtcggaaggcctcgccgataatcgcctgcttgccacgctcggtctgcatggtaagcatggcttcgccgatcaccacgtcggcgctgttggattccagaccggtgtcggcggcgtcgcgctgcacgcagcttgccggaatcgtggccttctcactggtgagtttggagatgatgtccacgacctgctggtcgcggtccacgccacggtagctcttggggtcgcggtcggactgcggcaggggcagctcgcggttggcggcgggtttggtggcggtggactgagatgcctgagaaggctgcgatgtagtggtcatgtgtcgtgatgctatagtccacagcccgcccgcacaagggttttcgctagaaatcagccgaatgtgagaatgctcacccgagtaggcgcctgagcatgcggctcagggacgattcaggggatgctcaggggtcccgtcaccgattccccacatatcgcccgcgttcgcctaatagaatggaatccagcattcgattcggtatccggcgcaatgccggcaaacgtgaggaacttacgatgagggtcatcggcaatattctgtggatcattctgggcggactggcaatcgccatcagctggacactgatcggactgtttctgtgcatcaccattatcggtattccactaggagttcaggcgttcaaaatggcgggccttaccttgacgccgttcggcaaaaccgtgcaatacggtggcggcgttggctccacgctggtcaatatcctctgggtggtgctggtcggctggtggatggcactcggctatctgggtgcaggcgtgctcaactgcatcaccatcatcggcatcccgttcggcctccagtcgttcaaaatggccaagctcgcgctctggccgttcggcgcacagatctacagtctgtaacaattgtttctgcagtaagtccgatgcaacgcattatcatcgtgcgttgcaccggacttttttatatacaacgggcatttcacacaccgcgtgatttgacggatttggatgcaatgccttatagtgcgcgaaccatgattcaacacatcgcattaagcagcaacggcgtgaacgaacacgccatctgatcagtacacctctcattggcgcatagctgaatcattgccggtgatatcgagcgactcattcgcaccatgcctcataaacgcacctgtacgagcatgtgttcttggcatcgtcgcaactcaatgcaccgcggcaaaacccattgcataccatcacatattcagaaagaacaacagatcatgaagtatttcactactgacacgcatttcgggcactacatatgtcactcacacgcagtcatgcgcacaactatatttttgcatcatccatgattttatagttgtttattgactcatttccttctccatcttatactttctacaatcaaggatgctctttgggaagcgagtctctctcatggatatgaagtatagaagtttggcaaggctgttccatgccgacaggtcagtcgattccttcaataaccatgcagcactcgcacggcagcggcttgaggcagattccacattcaggaccggggtcatcacgccattgggcgagctgttctccgccacgccacgcgagacgaccctgctcatggaaaatatacttctcgccgaaaggcgcatatcacggctatggaacctgattcccggcgtcatgcactgggactacatacggcattccatcagtgaggaactgttcgccaccaacgagatggaaggcgtgcgcagcacccgcaaggaaacccaggacgccgtggacgcggccgacaaggcaaggagggacggcgacgactccaaggcgcggttcagcgaatttgccaagctgtacctgaacctcacggacaaggactccgcgttgccggcaggcatcgccgccatccgcgacatctacgacaaggtcgtgctcgacgaaatcgatgagagcgatcagccggacggcgacctgttccggaaaggcgatgtggaaatacaggggccgcacggcctcgcgatccataacggagtcaaaggcgaaggcaacatcggcgc

SEQ ID NO: 1633 - DNA, 18581 bp, Unknown
  R221_24m  MAG No. k141_
acataaaagtccttggaaacggccgagatcatcgcgcacatcgcatccagggcgaacggatcattgtccaatacgggcgatacggatcgaccgcgccgcagccccggtcatgtcatcatgtcccatgccgctcatcgtggccacggtcgcagccggacaaaacctgctgtcatgcgattacttgacacgatgttgcgcttttggccatgcgcaggttgaatgggattgcgccacgaaaggatatgccatgaacgatctgctgattatcgacatgctgcccacgtacgggctgctgttctacctgctgatctcggtattcgtcttcgtgggatgccgtggtctgcgccggaggacctcggatcgtggcctgctgcgttttgccgtaggcgcgttcttggttgtttccgcgctcggcgccgtgttcgctgcgctggtgtatatcatggcagcgcctttggcgcagccggatatggtcgacttctaccgcacgtaccggccaggagctctgatcttcctgctgggattgttcatcatacaatttgtcttcggcgtcgctgccgtgtatcggggaaagtaacctggtatatcctgcgataaacgcattggcagacacttgctgcctatctgtaaacacaccctagataaggcttgcggccgttggccgagcacagtagtagtgtggtctgctgtgtcaacaggaggagtgtgaccaatgcggctgattgagacatggctggcggaccaggaacgcgcgtttgacttgttcgcgaaattcccggcggaggagacgggattcgagaacccagcggccggcatgaatcgtgaacggttcgccgcatatgtgcgagggttgcgtgatgagtcgcttggcgtcggcctgccggacggctgggtgccagccaccaaatacattctcgtcaatgatgagggcgactatgtgggcatcttcaacctgcgtcaccggctcaccgacttcctgcgcaacggtccgggccacatcggctacggtgtcgcccgcgaataccgcggtcacggctacgcgaccgccgggctcaagctcacgcttgccaaggcccgcgagctcggcatcaaggaggcttacctgagtgtccgcaaaaccaatccggcaagtcttgcggtgcagcagcattgcggcgcacgtatcgaccatgaggacaagacggaatactacacacgcatcgccacctgcacggagagcgatggcctctatgcgcgaggcgattgacggcgcctcttgcgtgtaaatggccgattatcaatcggttttaatcgatttcgcctcggtcgataaagtcgccgtcgaggaaccaataatcgtgcggatttccgcgtaacgccatgaacggcgtgagttccacgccctgtgtctcagctctgctcagcagataggctcggataatccacggatactccagcacgcccgacttgagggtgatgatttgctccactctgctgccgctgacgccaaaatccctgccgccgttcggcggtcagacccagccggctcatgttctcctgaaattcgcggatagtcgccgcgcgttgctcactgttcaaagacatggcttcatgaatgttgcattggcgccttaatcatccatagttaaggcaccacgcaacatacgattcgcttacccacgcagccatacgacgatggttggaatggactgttcggcgaagcggtctatggcgtcggcggtgacgtaggcgtgggcggtgaggcgcaggtacagttcgccgccgaccgcgctggccgcctcggatacccgacgctccgcgtaatcggcaagatcggacatgtaccggcgcacggcatcacagccccacagtcgctcgatctcgcgcagggactcgggcgcggcgatcggaccgcataaatcctgggtgccttgctcatcgaatcgctccgggaacgggtcagcgaaaccccacgagtcgatcagtggccacaaatcctgaccatcctgaccgccttcgggcggaatcaccagcaatgccgtgccacgcggcgcacacgggaacttatgaaaattgccgacccaccaatcggactgcagtccgccggccggatcggccagttgggcgggagcgtgcgcgccatcaaccaaaatgcggatgccgcggcgatgggcttcggcggcgatgcgctgggccgtaaacagcatagcggtggcggaagtaatctggtccaacacgatgaacgacgtacgctcgctcatctgcgcggtcacggcgccgaccacgccatcctcgtcggcgtcaatggtaactggtgcatcttcctcatccatgcgaatgagacgaatcgcctttcatcccaatgatttcgctctcatggctgatacccgcgtgccgtcatgttccgtaccttggaatcagaagtcgagagatatggtccgaaaccgaatggagcgggccgaagcagggagcattgaagatgggatttcttaagaacttttccgaaccgtttgcgttcgcgatggcgctgtggccgtttgtgtccatgctgctgacggtgccggtgctggcgttgctgtatcatcgcgacaatcgcatccgactgtcgtcggccatagtggcgtatggcacggtgctgtacctgctcggcctgctgtgcttcacactgtatccgatgccggccgatgcggcagcctattgcgccgcgcaccatctgacgccacagctcaatccattgcagttcatcggtgacatccgtaccgatggtctcaccgccgtactgcaaatcgcgtttaatatcgtgttcttcctgccgttgggcttcatcatgggccgtatctggcgttggccgctgccggttaccgcagtactgtcattcgccacgtcgctgtttctggagacgatgcagctgaccggcctcatgggcgtgttcccgtgcgcctaccgtctgttcgacgtggacgatctcctgtggaacacgaccggcgcgctgatcggattcgcgctggccatgctttcgctgcgcctgattccggcgcgggtcgccgatatgacgccgaccaccacacctggcttcatgaggcggctgatcacgttcatcatcgacatgacgctgatcgggttcgccgtgatgccgacgcatctgttcgtcatgatcgtccgcccaaacctgccctcgggctccaacggctcatggcagtcgatggaaccgttcgactggaccggctcgatcctcttcctggcggcgctcatcctcttcgagggcgtggtgccatggttgcgcggcggctgcacgttcggcggcagcttcacgcacatgacgatagagacccggccgcgcgaagggtggcttcgcgtggcgttctatgtggcgcgcatggcgacgctgatcgccgtggtgtggtggcatagtggcggattcaatctgctggtgttcatcggcctcggcatcttctggctggtcaagcgtcagatgccgtacgacctgatataaaccggcgctccgctgcttggcgttacaggaaaacctccgaccactggtcgggattcggaatgctgcgcagcgggccggccaacgatacggccaatcccgctacggaacagaccacggctacggccatcaccgccgtgaaaccgagatctggctgttgcaacagccagccgaccatcgccgggcatgctgcgcccagtatgccgaccgtggtttcaaatacggcagaagcccgcccctgcatgttgtcgggtgtcttgccgtagagaaagcccagcagaccagcgttcaacgcggggaacggcaggccggccagaatctggcagatcagaatggccgcgtagctgtgcaggaatagcagtggcatctggctgaccacgaacaacgccagcgcgcccgcaatcagtttccctgtgggaaccatatcgactagcttgttggccaacagcgagccgaccaaagtactcacgcccattgccgtgccgagcagtccgatcatgaccgcgttggcgccacgggcggccaacatgatctgcgcgccggtgatactgactacgcaggcgatgtcaccatagcgccgagcatgattgcggataggaaattccttttggtcagggcccatcgccagccttcgaccaagtgcgtgggaaatggcacaacagaagtgccgtgggcccaaacggcgaccacggcttagcgcgacgagtcaacgcgcattagctgtctgcgaacgacaccaacaccttgtacataacaatgcccctttgcaaaaaacaaactccaattattgtaccagttcgagcatagaaccaggcgcgtcactgggcacaacataatcggccatcaatggtttctcggcttcgaggggctgatttcgtccggtggagacatctacttggctttcgaggggctgctcaaacgccaaaccgcgagtataaacggctttgcggcaacgccattacgccattgtggagccttgtctactcgggcatcagccccttgaaacggagatagatctccggcaagtgccaaatcagcccctcgaaatcgagttaggcgttgttttcgcgtttgcgctgccgttcgagtgcgtaataagccgcgtagcagcaggcgacgaacgggatcatgcaatacagggtcgaacgctgcgtatcatcgagcaccacgagcaccagcgcgccgatgcacatcacgatggccagccacggcagcaccgggaaaccgggcgcacgatagccgagctcatcggcgctgtgcccatcccgcgcccattcgcgccggaaacggatatggcacacgcatacggagaaccacaccaccagcgtcgccaaacctgacacggcgaccaacaccagatacacggtcgaggcggcgatcacggaagacagcaacgccagcagtgagcccgccatgctgaacagcacggcccacaccggcacactacggaaattcgtcctagcaaaacgttcgggaatcagccgctccttggccagcgaccacaccatgcgcgaacacacgtacaggccggagttcgcggcggaaagcacggccgtcaacaccacgaagttcatgatgtcgccggcgaacggcataccgattgactggaacaccagcacgaacgggctcgtatccacgccggcctgatgccaggggatcaaggccgccatcaccagaatcgagccgatgaagaaaatcgccaggcgcagcaccgtggtgtgcacggccttggggatcgcacgcgagggatccttggtttcgccggccgccacgcccaccacttcggtgccggagaacgcgaacaccacggtcagcagagtcgagaaaatcggcgcgataccgcttgggaaccagccgtcggccacgaagttgcccagcaacggcgcggaatcatgaccggcaatcggtatggcgccgaagatcgccagcaggccgatcacaatgaacgcgatgatggcgaacaccttgattgacgcgaaccagaattccgcctcgccgtacagccgcacggacatgatgttgagcgcgaacaccaccacaatgaacacggccgaccacacccaggacggcgaatgcgggaaccatcgctgcatcaacagccctgcggccgtgaattcggaggcgagcgccaccgcccagttcagccaatacaggatggcgatggtgaacgcggtgccggggccgatgaaccgcttcgcatacatgtggaagctgccggcgtacggcatggccacggacagctcgcccaacgacaccatcacgcagtatacgagcagagagccggccgcgtaagcgaggatcgcgcccaacggtcccgcctgatgaatcgcgtagccggagctgacgaacagaccggtgccgatcacgccgcccagggagatcatcgtcaggtgacgcgactccatcttccgttcaaggccggtatcgtccttgggtgtgccggctgccgccatgctcgggtctcctttggtcgggtgaacagttgtgtctcgtgtcggttgtgcgggcggcgctcgatgccgcctaccatatgatagcggtaacacgaacagcgagtggaacacgaggagtttggaatgatggaactgtatatcggatcgcatctgtcgacggccggcggatggaatgcgctgctggaacgttcccatgaggagggcggtaccgcgttcgcgttcttcccgcgttccccgtacggcaagcgttcgaaggcgctcgacccggccggcgcggcggcgttcggtgcgcgtctgaaggctgagggctatgggccgttggtcgtccatgcgccgtacgtctacaatctagccggcaaggatgaggccaagcgcacattcgcgatcgaggcgttggccgaggacatcgagctgctgaccgccatccgcgaggccggacaggaggtgtatatcaatattcatcccggcgcgcatgtgggccaaggctccgagaccggctgccggctgatcagcgagggactgaatcaggtgttcgagcgcgcggccggcgtcatggtgcttctggagaccatggccggcaaaggcacggaatgtggccgcaatttcgatgagctcgccacgatcatggatggcgtggagaataaggcgaacgtcggcgtcacgttcgacacctgccatgtgttggatgccggctacgatttggtgcacgactacgacggtgtgatgcgccagttggatgaggcgatcggcttggccgaggtcaaggcgattcacgtgaacgattcgcagtttggcctcgactcgcataaggatcgtcacgccaacatcggggagggccagctcggcatcccgtttttcacgcgactggtcaacgacccaatcatggccaagctcccgatgatcctcgaaaccaaggagcagacgcccgccacgcatcgcgacgagatcgagttgttgcgcggattggtgcaaaagtagtcgtagtcgaccaatgtcgagcagaagagacctgtttttgactgagggccatacgaggttagctatcagcggggcgttgattgacccgtcttcatatacagctgcatagccggttccagctgcaagagctcaaaacagacgcatgggttcggcggaatccaatggctgaataagacgtttgccgtcgctgttcagtggcgcgacttcgtgaaattgcagatgccgggaaagcatggtacccgcttcccgcatggaatctaacagtgcggctccgtcaacggagcggtccagccatgaggcaaccatattccgaggcgccagcaggggcatgcgatcatgcaccttgacgaactcgtccgcggcagggcaggtgatgatggttgcggtcagctgccatggcgatgcgggagacggcctccaccatgagtacaggccggccaaagacaatagttcatcatgtggtgcgtgaaaatagaacggcctgcgacctttccattcgtagtagccggaagcggggatgatggctcgcatggattttgtggattcggcgaacgccggcttgacatgcgcagactccacacgcgcattatatgtggggtagctcagcactttgctggcgctccatcgcggcaccagcgaccaataggcaccggtcagatgacggcggccatccttgccctgtgccaccacgccaatgttctgcgtgggtgcgatgttgtaggaaggctgtggcagagtgtcaacgcgcacgtcatcctcgtctaccgcgaactgtgaggccacggcatcccaatccaaatcaagcgcgaatctcctgcacatgcgcccagtctatgccatcaatggaatcaatcccaggccgtatgaccgatattcatggcgattttcctttttgttggccgctctggttccgtagcgatacgaaccaacgaggaatagcccagaatgtaggacgggttcggcaatcgggacggggcgtgacctagagtggcgcatgaccgaacaccaacaaagggaggaccatgtcggttttggacgaactggtggcgggagcgctggaggatcagcgcacccgtgagctcaccgtatcgcttgaggacgtgaagaaggccgcgctggcggccccggctccgattgacgcgacacgatggcttaagcgcgccgacggcatccccgtgatcgccgaaatcaagcgcgcgtctccgtccaagggccacctctccgacatcccggacccggccgcgctggcccgcgaatacgagaagggcggcgcaagcgccatctccgtgctcaccgaaggccgcagattcctcggcggccttgacgatttcgacaaggtccgcgccgccgtgcacattccggtgctgcgcaaggacttcatcgtcaccgactaccagatcttcgaagcccgcgcccacggcgccgacctggtgctgctcatcgtcgccgcattggacgacgcccagctcaagcacctgctcgacctggcgcacgagctcggcatgaccgtgctggtggagacgcacacccgcgaggagatcgaacgcgcacgccaggccggagccaaggtgatcggcatcaatgcgcgcaacctgaagaacctcaaggtggacgtgaacaaatacaacgaactcgcggccgatctgcccgataacgtcatcaaggtggcggaatccggcgtattcggcgcggtcgaggtcgaagactacgcccgcgcgggagcggacgcggtactggtcggcgagggcgtggccagcgccgatgatcatgaacttgcagtggaacgactagtaaaggcaggagcacaagtgaaagcatccgaaacgaccccgctcagcgaacatcagggaccgtattggggccagttcggtggccgctatgtgcccgaggccctcatcaccgccctcgacgagctggagcgcgtgtacacgcaagccaaggccgaccccgaattccacaaggagttcatgacgctccagcagcgttacgtgggccgtccgagtccgctgaccgaagccccgcgcttcgccgcactggtcaagcagaagaccggtctcgacgcccgtatcttcctcaagcgcgaggacttgaaccacaccggcgcgcacaagatcaacaacgcgctcggccaggccctgctcgtcaagcggatgggcaagacccgcgtgatcgcggagaccggcgccggtcagcacggcgtggccaccgccaccgtgtgcgccatgctcggcctcaagtgccgcatctacatgggccagatcgacgcccgccgtcaggccctgaacgtggcccgcatgcgtatgctcggcgccgaagtggtcgaggtgaccctcggcgacaagatcctgaaggacgccatcaacgaagccctgcgcgactgggtcaccaacgtcaaggacacgcactacctgctcggcaccgtcgcgggcccacacccgttcccggccatggtgcgcgacttccagaagatcatcggcgaggaagccaagcagcagctccaggactggtacggcatcgaccatccggacgcgatctgcgcctgcgtgggcggcggctccaacgccatcggcgtgatgaacgccttcctggacgacgagcgcgtgaacctctacggctacgaagccggcggcaacggccccgaatccggcaagcacgccatccgcttcgcccccggcaccggccagctcggcatgttccagggcgccaagagctacctgctggaaaccgacgaaggccagacgctcgacacctactcgatctccgcaggcctcgactacgcttccgtgggtcccgagcacgcatggctcaaggacatcggccgcgtgaactacagctgggccaccgacgaggaggccatgaacgctttccgcgacctgagccagaccgagggcatcatccccgccatcgaaagctcgcacgccgtggccggcgcgtacaaggccgccgccgatctgaaagccaagggctatgacaaggccgtgatgatcgtgaacatctccggccgaggcgacaaggacatggccaccgccggcaagtggttcggctacctgaccgacgatcaggccgccgcgctcgatgtgaccggcgcccacggcaatactgtcgcctgaacaagaagaggagattgttgattatgaccaatgaagcaaccacgccgtccggccagccgctgggcatcagccacaagcccagcaagtcaggcgctatgttcaccaagttcaaggccgagaacaagcccgccttcatcggctacctgccctacggcttccccaacccggacgtctcgcttgacgccttcaagacaatggtcgagcacggcgtcgacgccgtggaaatcggcctgccgtactccgacccggtcatggacggcccggtcatccaggctgccgcctccatagccctgaacaacggcgagaccatcaagcgcgtgttcgaggccgtcgaaaccgtggccaacaccggcggcgtgccgctcatcatgagctactggaacctcgtgtaccactacggcgtcgagcgtttcgcccgtgacttcgagaacgccggcggcgccggcctcatcaccccggacctcatcccggacgaggcgggggagtgggtcgaagcctccgaccgtcacggactcgaccgcatcttcctggtctccccggactcgtccaccgagcgcctcgaaaccgtggcccgcaacgcgcgcggtttcgtgtatgcggccgcccgcatgggcgtcaccggcgaacgcgccaccatcgacgcctcgcccgaactgctcgtggagcgcacccgtcaggccggtgccgagaacgtgtgcgtgggcatcggcgtgtccaccgccgaacagggcgccaaggtcggctcctacgcggacggcgtcatcgtcggctccgcgctcgtgcacaccctgctcgcggacgacgacaagaccgcacgcgacccgaaggaaggcttgaagctgctcgccgccaaaagcgaggaactggccgaaggcatccacaacgcccggtaaacacccggtgcgcctcacgcggattgtgccgtgacacggtagggtagtcacagagcatcaagcacaacccgcgcgtgaacacaccatgagcaccagcaagtagaggcacgatgaatctggcttatattccctcgccgaccttctccaagttcgagatcggcccattcactatccacatgtatgcgatctgcatcctgatcggcatctgcgtggccgtatggatcctcaccacacgttggaagcggtacggcggcaccttcgaccagattctcgacaccacgctcgtcaccgtgccctgcgcgctggtgggcgcgcgcctctaccactgcatcaccacgccggccgactacttcccgcccaccggcaacttggtcaacatcctcaaggtgtgggaaggcggcatggccatcttcggcggcatctccgtcggcaccttggtggcgttcctgtggtgccgccacaagcactatccgttcgcgatcttcgccgatgccatcgccccagcgctgcccgtggcccaggccatcggccgactcggcaactggttcaaccaggaactctacggctggcccaccacgttgccgtggggcctgaagctcaacgacgcggacgccatcggcaaatccgaaatctgctattccggcgcgcaatgcccggactacaggaccacgctgttccaccccacgttcctgtacgagatgatctggaacctcatcggcgccgcgctcatcatctacctcggccacaagctcgccgaccggctcaaggccggccagcagttcgccatgtacctgatgtggtacggcctgggccgcacctggatcgaaaacgtgcgcatcaactactccacggtgattctgggcctgaggaccaacatgtggaccgcgatcatcgtcttcgtgctcggctgcatcctgttcgtcgtgctctaccagtacgggccggaccccaaggcgcaggcgcgcgggcttgcggcggtcaccgccgacgagctcgaacgccagagcatcgaagaggaacagcttcgccagaaaaagcaagccaagcgcactaagtgacaccacgataaacagcgccgaaacagcgcgaaacacgggaccccaagtcccattgcacagataaggtaggaaaccatgagcaatatcgcaatcgcacccagcatcctgtccgctgacttctgcaacctcgaacgtgatctcaaggccatcgccaacgccgacctggtccacgtcgatgtcatggaccatcattttgtgccgaacctgaccctgggcgagccgatcgtcggccgcatctgccaggtcaccgatctgccggtcgatgtgcacctcatgatcgaggacccagaccgttgggcccccgaatacgccaagctcggcgccgcctccgtctccttccacatgggtgccacccacgcccccgtgcgtctggcccgccagctgcgcgacatgggttgcaaggcctgcttcgccgtgcgtccggccgaaccggtcgagccgctcttcgatatcctcgacgagttcgacatggtgctcgtcatgaccgtcgagcccggcttcggcggccagaagttcctcgacaaccagatggccaaggtccgccgcctgcgcgatgagatcacccgccgtggcttgaagacccgcatccaagtcgatggcggtgtgagccccaagaccgcgcacatcgtggccgaggccggcgcggacgtgctggtcgccggctccgccgtgtacggcgccgagaatcctgcccaggccattgacgacatccgcgccgaggccgaggccgcgttcaaggcctgagctccaagcctgaaccgcaatccacctttcatccataaccacaagagaagaatctgaatcacatgaagacgtttgaatccctgttcgccgaactgtccgagaaggcccagacccgccccgaaggctccctgaccgtcgacgagctcgacaagggcacccacttcatcggcaagaagatcatcgaagaggccggcgagacctggatggccgccgaatacgagggtgcggaccgcaccgccgaggagatgagccagctgctctaccacgtccaggtcatgatgatcaagcacggcctgacgcttgaggacatctacaagcacctgtgagaggaacgcaaatgctgagaatcgcagtgcccaacaagggcatgctttccgagcccgcatggaacatgctgtccgaggccggctaccgtctgcgcaccaaccctcgccagctggtcgtgcaagatcccgacaatggcatcgagttgttctacctgcgtccgctcgatatcgccgtatacgtgggccgcggcgccatcgacgtcggcatcaccggtcaggatctactcaagaactccggtaccgccgcgctcgagcacatgccgctcggctttggtgcctcgaccttccgtttcgccgcaccgaacgaatccccgatcaccaccctggaggatgttcagggcaagcgcgtggccaccacattcgataagctcgtacacgactatctggtcgagcacggcatccaggccgagaccatccatctggacggtgcggtcgaatcctccgtgcagctgggcgtggccgacctcatcgccgacgtggtctccaccggtaccaccctgcgcaacgccggcctgcgcgtgtttgccgaaccgctcatgcactccgaagcttgcctgattcgttcgccgcgtctgaacgagcaggacccacgtctggccgtgctgacccgccgtctgcaaggcgtgctcactgcgcatcagtatgtgctgatggactatgacattccgatcagcaaggtcgccgccgccgtggccgtgacccctggctttgaaagcccgacgatctccccgctgcacgacaaacagtggaacgccgtgcgagtcatggtccccaaggccaaggtcaaccagctgatggatgatttgtacgaagtcggcgcacgcggcatcatcgttaccgctctgcaagcctcccgcatgtagactgttagtcgatatgaccaaccagaaagtcaacgccagatacagtccggaagcacgtgacatctatttcactgtgcccaatttgatcagcgcgctgcgaatcatctcgattcctttcatcagcgtgctgatctccaagcacgagatgattgcggcgctagccctgatcgccatttcctcggcttcagacggacttgacggcatcatcgcgcgcagattcaaccaagtgagcaagatcggtcagattcttgatccgatcgccgaccgactgctcattttctgctcgattctggctctcagcgtcgccggcatcatcccatggtggatgctgattatcgtgggactgagggatctgtggatggcgattcaggtgctatggcttgcccagtacggttatggtccgctgcccgtgcatttcgtgggcaaggctggtaccgcgctgctgatgatttccatcgtcggtcttattttcgccgatttgggcaccagtacgttcttccacttgctctacatcgccgcgctggccgccggcatctggggcatcgccatgtattggctcgccggatatatctataccaagcagggcgtcggattgttacgcaaggaactgggggagaagtatggcgcttgaggccacggccccggtctcgttccccatacccaaggagaatgagccggtacgacgccgcgccgtgttctcccactcagtccgaggcgcggaatcgcatcatgcgctttccccggatgacgccgccgccatccgcaccagacgtcgccgtaaaaccaacgacgattcgcttcagctcatcgatgatcttgtcaatcgtccgatggatccgatgttctccgactcacgactggtccatgagcatcgttcgaccttctccatctggtttaatcgcatcgtcgtattcatcatctgcgtcggcgttggctttgcctgcagcctattcgtgcaacagttgcaatccgatccgcgtaagcaggtacggcagactttggccacgcaattggagaatcgcaactcgcagatagacgaactcaccacggacgtcaataatttgcgatcccaagttgacgaacagtccaagaaaatctccggcagcgtgaaaagcgacacgcttatccaagacgaaatggtcaatggtgccacggtggtcgaaggcgaaggaatcaccatgacgctggccgatccaatcgcggcaagccagtcggatcaatcctcctcgacgagagtcggcacctccacgaacatccgagtcatcaccgatctggatctgcaacaactggtctccctgatgtttcaaaacggagccgaagccattgccatcaacggtaataggcttggcgcgcaaacctcgatacgcaaggccggcgggcatattctcatcggcatgaccgcgatacaaagcccctataccattgaagccataggcgataagagcgccttggccgaagcgatgggggagaagagacttgcaagtctttacgattccttcaaggaagccggtatctacccgcaggtgagcaaatccaattcgattacacttgaggcagcagtcactggcgaagtgaagtacgcggaaaggaatgaataatggcagccgttctgggactgatcatcggcgtcgtcatcggcgtgttcgtcaagccggacattccgatcatcgtgcagccatatctgccgattatggtggtcgctgcccttgacgccctgctgggtgccgcgcgagcctatttcgagcgcagcttctccgaccgcgtgtttgtgatctccttcctcgccaacgtggtgacggcaacactgctcgtgttcctcggcaaccagctcggcgtcggttcgcagctgcagacagccgtcatcgtcgtactcggcatccgcatcttctccaacgtgtccgcgatcagacgcttcatcttccgaggctgacaagggtactgacgtatggcacgtaaagcacaatcagacaacatgctggagaaaatgcgcgaccagcatgtacaagacaaggtcaacgaccggatggaaaccgggtcgtttcccacggtgcgtaagaagccccggaaggatctcaaccgtgccagcaacaaatcacggttactatcctcgattctcatcgctctgatgtgcgcgttgttgggtttcgcctacatgagccagatcaataacactaaatccacgtacgaaacgatggacgagagtgaactggtaaggctgctgaacgagtcgaatacgcaaatctcgaatctcgagcagcgtaaaacccagttgaacagccagctcaactcactgaaatcggcggctaacgagcaggagcaggcgcgtaagatcgccaagcaaaacgaggagaccagcggcttgatttccggcagactcccggcaaagggtcaaggcgtgaccatccgaatcggacgaggctcgacgactaaagtggacgcctcaatcatgttcaaccttatcgaggaacttcgcaatgccggtgccgaggtaatcgccatcaataacgtgcgcgtcatcacctccacctacattcaggacgccgaagaaggcttgatcgtggatggcaccaccatcaagcccacatacacagtgaaggccattggcaatccgcaggaactgtccaacgcagtcgatatcgccggcggcgtgggtgctcagctccaggtgaaatacgggtccaacgtcaacgtacagccttctgacagcatcattatcgacgaagtacgcgaagctacgcaaaaccagtatgcaaagacggtagaataggggattatgaccaacccgattcctagcgcaggcgaaaccaccattatcggcctgcccgcgattaatgtactgcccattaccaccaccggcgatcgaccgctgactcaagaggatctggacaccatcaccagattgtccgagggaacggcattgctgatttccgccaggggagcggtctcaggttctcgttacttgcttgacgaggatgaaatcaccgtcggccgtgatccgcgagctgatattctgctcgacgactccaccgtatcccgtcagcatgccgtgttccgcagggtcaacggtcagttctttgtggttgacgcaggaagtctgaacggcacctacgtgaaccgtcagcgtgttgatcaggcgtcgctgaagaacggcgacgaaatcatgatcggtaaattccgtctcgtgttcttcacgaaatccgccattatttcccaatagtccacacccagcacggggttagactgattgcagaaattgcaatcatgtgattacaccagtgtgagtcatatgcgagacacgcatgagttaggggagtgccatgggacagaccgggctgcatcttcatgtttcgcttgaggaccgtcagaatctgaacgctgacgcgattcagggggagttgttctccaacgtcgatactgaggagatcaagcgcggctaccgtggcactgtggcctccaaggtggccggcatcacgtaccgacagctcgattattgggcacgcaagcagattgttgagccgtccatcacaccgtctcatggctctggttcacgacgattatactcgtttaaggatgtggtgattctcgctgtatccaagaagctgcttgatgccggtgtgaatctgcagaacgtgacggcggccatcggattcttgactcaacgcagcaccgatcagctggccaatgtgaccatcatgtgcgatggtcaaaacgtgcacgaatgcactaccagcgaacagatgctcgaactgttgcaaagcggtaaggcagtgttcgccgtgtcggtgggttcgttgtggcaccagattgagacggccttggaacaggaagaatatattgatcttgaggctaagccgctgacgattgccacgggccgtccgattgatgaactgactgccatgaggatgcgcaagaagctcgaggcacagcgcttgcaacgcgcaaccgcctgatacatgtatggttgttggcgacttgccggctttggtcggcaggtcgctttgttgtatgtgttgcttttgttgcctgccatcttatgtttttatatgttgcggtgattattatgactgattggaggaccgggtgaacgggattgttgtcggattgttgccgggcgttctgtggatggtcgccgtcatctttgctgtgtccatcatcactataacggtcagccgaggccatctgttcacgccgaaacgccggcgaccgccggtcgatccggtcgactggtcgatggtgaaaacgcatttcatgtcgtttgcggcggcgctgattccgtttcccgtgttgacgtttacagcggatttgatggatgctcgcatgctcgcgttctacgaccacgcgcaattgcccggtgcaatcatcatattcgtgctggtgctgttggaacttgtcgccatgtatctgcaggcgcgcaacgcttcggaatccgcgatggacaagcgtttgggcgttgcttctcaccggaataaggatgatgttgcgaagtagccgattctctgcggcgaggctaatccgcagctagatactactggttcggctaaaatcaccacatactattaaccgataacgtacgttatgtcagattagttatccttgacgaggattcagtcgcctgtatcaactagtccacgcataccaggccgacagccaaaaggccgacagccaaaggagcaccggagcgaccacc

SEQ ID NO: 1634 - DNA, 6945 bp, Unknown
  R221_24m  MAG No. k141_88112
acttacccagcgggactgggcaatcaaataaatcaagattgaggaaagccctcgtcatgcctgatgacactgtctctcacgcttcgcatctcgcggggataatgaagcggaatgttggccgcaccattagtggctttgatgccatgttggcttgaacccaatcgtcccctgccgttatgcaatgcggaaatcattgctgcggcggcagagacgcaaggatttcagatattggccacggagtctcgatctatgtacgaggccttgatcaacgttcgtgtcggcgtcagctcgggatgttcgatacggtccacaagcgtattgacggcagattgggtgaccagttccacgtcgttttcgtaggcggaatatggcagatacagagcgtccgacatctgcttttcattgatggcgatgacggagatatcctcggggatgcgcagtccgcgatgttccactgcccgtctgaacaccaatacggccgattcattatggatgacgaatgcggtgtcctcacctcgaccgtcaagaatgcgagcgatgtctgtgtcgatgattccgggccttgtagagcaatgtcggatagtggcatgcatgccaagtcgttctccggaacgttcgatttccctgaggaatcgagcggtgtcgttgagttgttcggcaatcacccggctactgagcgtgatgacgctgacgcggcggtgtccggcatcgtgcagtgtacgcatggtcgaggccgccatgtccgtgaagtcggtgtcgaccacatcaagattcattggattgactgggactcctagcgagactgttggaatgccggattcagcggcaatcggcacacgcggatcgttctgcctgacgtctaaaaaaaccagcccatccgccttgtgtgattggcaggcgttctccgtagcggagccgtctggatcgttagtgatgagcatgtcgtagccggtttcggcggctgctcgggataagccgttgatgtatgtgccacgggcaatgtcaaagtaggcgtcctgccggttgctggtcaccacggctatggtcatggtcttcgaagtggacaagctgcgggcggcatgattgacggtatagccgagtctgtccattgcctcacggatacgttgttcggtggctgcagcaacggggcgcgagcccgaaagcacgaatgagaccgtggttttggagactcctgcctcccgcgccacgtcgttgatggtcaccatacgttttcccttcgtcttttgtcgacattgcggtatgtgcctttgcgaatctatgcgggaatcgccatgcctgtataggaatgtatcctaatatcttttctcaaattgtgctaaccggtttgacccctgtgttttcagggctttagaacggttcaccaatcgcggcgcgccgataatgcaaaccggtttgcatggttcgtttatctgatttatatttatttatgcaaaccggtttgcatctggtgcggtaaagacccgacggtgggtcgatgcaaaggaccagatggtcaaaaggaacggtctctcaaggaggagatatgaagtccaataccgctcttaagataaccgccgcattatgctcctgcgccatgcttgtcggcgtcagcgcctgtggttcgagcaacagcgccacggatgataaggtgatcgaatggtgggatgactggacccgccacgaggatggctccgagttcgacaaactggtcaaggcgtgtgcgcccgaaggctacacaattgagcgccaagccatcgccacttccgacctgctcaacaacctcaccaccgcaatcaaggaagacaatggcccggatgttgcggtcatcgacaacccgatgattccgtccgccgtcgatgcgggtttggttgctggttccgacgaaactggtcttgacgtttctgcctgggatgagaaccttgaggctccgggcgtagtggacggccaggcatatggcgtgccgctgggcggatccaacacgttgggtcttatgtacaaccccaccatcattgaggcagccggtgtggatgtatccaccatcaccgattgggattcgctcaacgcggccatcaagaaggtcgttgacgccggatacaagggcattacgttctcgggcatctcgggtgaggaaggcgtcttccagttcctgccttggttctggggcgcaggtggtgatctgtccaagcttgactcccaggcgcagaaggacgccgaagacctgctttccgggtggatcagcaagggatgggctcccaagtccgccacgaccaacacccagtcggcctcctgggatctgttcctggctggcgactacggatttgctgaaatcggcacctggatgcagtccgaggcagacgaggccggagccaaacttattccgatccccgcaaaggatggcggcgtggccaccgtgccgaccggtggcgagttcgccatggtcgcctaccacaagaaggatgcggaatcccactacaagctcgccaatcaggttatcgaatgtctttccgaggacgagactctgcttaaggtaagcaacgctctgagcaacctcgctgccaagaaggccgtgcgtgccgagcagctcgcggctagcgacggcttggctcagtggaaggaatccatcgagaacgccgccggccgtacctccgacttgggtctcaaatacgaggaagcctccgcaagcatctccgaatccctgctggcggcccttaacgcggcttgatcggtcccgattaccgctccgccaacgtaccagatgacgttttccgggcgggtattgtccgcccggttcatacaggagaaaccatgacagcctcaacaacaagccccgttcgccgggcaaagtccggcactccggtccgggccaaactggccatcgccggattcattgccccactgattatctacttggtaatcttttacgcgttcccgctcatccagaacgtgtcaatgagcctgcaccgatacacgcgacgaaccttcgttaccggagatgcgctgttcgtgggtctcgacatctacaaggaagtcatttcctccgtggagttctggccggttgtggggcagaccttcgtgttcgtggtcgtctcgctgatattccaatatgtaatcggcttggccctggcggtgttcttcaacgataacttcaagctctctggtgtgttgcgcggcatcatgctggttccgtggctgttgccgctgattgtttctggaaccgtctggcagtggatgatggaccctgactccggcatcctcaacatgttcctcggtctgtttgacatcgaacccatctggtggctccaggcggataactcgctgtgggccgtcatcatcgccaacatctggctgggaatccccttcaacctcgtgatcctgtattccggcctacagaacatcagcggcgacctgtatgaagccgcctccctcgatggctgcaacgcctggcagcgcttctggaagatcaccttccctctcctgaagcccgtcacttcgatcaccctgttgctcggcttcgtctatacattgaaggtcgttgacgtgatctggatgatgtcccagggaaccggcacctcgcgtaccctcgccacctgggcctattcgatggcatttggcaagggaacttcaatgactatcaaatactcggaggcttcggtgctcggcacgattctcatcatcgtggcgttgattttcggactgatttacctgcgggtccagaagacccaggaaacctgctaaagggagatgattgcaatgacgcatcgtagcacctggtggaaaaccgctctcggcatcatattgacgctcatcatgatgtttcctgtctactggatgatcaacatctcgttcactggtaaggcatccattcgttccggcgacctgtggcccaaggatttcacctttgacaactacgcccgcgtaatcgccgaccaaatgccctatctgggcacttccatcctcgtagcggtatgctgcgtgattctaacgctggtcatcgcactgcctgccgcctacgcactggctttgctgcgctgtccaggcagcggcgcgctcagcttcctgctcatcgtggctcagatgattcccgccgtcgtgatgtcgctcggcttctacgagatttataacaacattggtctgctcgatacgttgcccggcctgatcctcgccgactcgaccattgcggtgccgttcgcggtcatgctcctgacttctttcatggccggcatcccgcggtccctgcttgaggccgccgaagtggatggagcctcacgtacccgtcgcttcttttccattgtcatcccgttatcgcgcaattcgatcgtgaccgtctccctgttcgctttcctatggtcttggagcgacttcctgttcgcttccacccttgactccggcggcggcaagatgcgcccgatcactatgggtctgtacaactacatcggtgcgcagacccaggaatgggggccgatgatggccaccgcagtgcttgcatccattcccgcgaccatcctgcttgtcttcgcccagaagtacgtcgccgcaggcgtgaccgccggtgccgttaaggactaagacagtacgacacttcaaccacaaggacgacaaccatgacaacttcattcaccatcgacggcaacgccctgatctggaccggggacggcgaaaccctgcgcatcgaaccttgggaagagaacagcgtacgtgtacgcgccacccgcaaccgtggcttcggcccggtcgattgggcgcttctggaaccgaagaatgaatccggccgtgtcgcagacatcgccgtcggcgaggacggcgaacacgccagcctgaccaacggcagcatcaccgttaaagcggattcgaatcatgctccattgctgtctgccggatatgaaaccttccggtgtgacctgagcttctggaacgccgaaggcgaactcctgttccgcgaatatccacaaggtgggtcgcttttgctcaaggcgcgtgactacactccggtgtccggtgaaagcttcgccgtgaccacgtctttcagcgccgatcccaaagaacggctgtatggcatgggcgaataccaacaggacgtgcttgacctcaaaggctccacctttgaacttgcgcaccgtaattcccaagcctccgtgccgttcgtcgtctcctccaaggggtacggcttcctgtggcacaatccggctattggccgcgccacttttggacgcaaccgaaccgaatgggcggctcagtccactgaccagattgactactgggtcaccgccggtgactcctacgcgcagatcgaatcgcaatatgccgacgccaccggacatgcgccagtcatgcctgaatggggtatgggcttctggcagtgcaagctgcgttactggaaccaggaacaattgcttgacgtggcccgaggcttcaaatcccggaacatcccgctagacctcatcgtcattgacttctttcactggcctcatttgggcgactataagttcgaggacgaattctggcctgatcccgaggccatggtcgccgagctcaacagcatgggcgtcaagctcatggtgtctgtgtggccgcaggtctcggtctcatccgagaacttcgtggagatgaagcgcaacaactatctggtaagcgctgaagctgggctcaatcttgacatgatgttcgaagagccgtgcgtcaactatgatcccaccaacccgggagctcgcaaatttgtgtgggacaagtgcaaggccaactattgggacaagggcgtgcgcgccttctggctggatgaggccgaacccgaatatggtgtctacgattttcgcaactaccgctaccacatgggcagcgacctcaacgtgggtaacgtctatccgcaggcttacaaccgcggattctacgaggggcagatagaagccggcatggaaggcgagatcgttaacctgactcgatgtgcgtgggctggatctcaacgttacgggtcgttggtctggtctggagacgttggctccacattcgccgatctgaaatcgcagattacctgtgctattcacatgggtatggctggcatcccttggttcactacagacatgggcggcttccatgatggggtgatcgattcggattcattcaaggagctgctggcccgctggtgcgcgttctcctgcttcctgcccgtcatgcgcaaccatggtgaccgcagcctgggggagtcgaccggcaagcaaaccatcaccaaggcaaccggtgagcaccgttcgccttcgggcgcggacaacgagccatggagctatggccctgaaatggagtccatattccgtaaatacatcgccgtgcgcgaggtcatgcgcccgtatacccgtgaactgttccagtctgcccatgagcagggtcagccgttggtgcgaggactgttctacgagtttccgaccgatgaacacgtggccgacattgcggacgaatacctgtacggtcctgacattcttgtggctcccgtagtcgaggccggtgctgcttcccgtagtgtctaccttcctggcgatgagacgaccacttggactgatttgcgagacggcgccgtatacgcgggtgggcagagcatcgagtcgtctgcagcaatcgacacggtccctgcctttgcgcgagatggtcgggaccatggtttgattggtctgttgtagttcttccatctcctcttccgaaccattaagggctttccacgcggcatatacagtgctgcgcggaaagcctttaatggttaatgtgatgcttcaggatatttatggttacttcttcttggctttcttgacgcgcttgggagcgggagccgctttcttgggctcgaagaacggccacttgtgcaaagcccaggcgtgcagcgcgggaatcttggcaacggcgaagccgatgaccagaccgattaccatggcccaggtctccagatcatggcctgcgaccagc

SEQ ID NO: 1635 - DNA, 40816 bp, Unknown
  R221_24m  MAG No. k141_89665
cacattgtgcgttacagacaactgtactcctcgtggcgagccttaagtaccccaggaaatttggcttccaaaaacacaaaagcctgaaaccggctattgcctcagcaatattcagtcggtttcaagctaaatcgttaatcctctggtgaaacgacggtctacttcttcagcagaggcgcgacctgttcctcgtaggcggtcagtgcggtgtcgatcacctggtgcatgtcatagtacttgtaggtgcccaagcggccgccgaacacggtgtttggctcggccgcggccttggcctcgtaccgcgcgtacagggccttgtccgcgtccgtgttcaccgggtagtacggttcgtcgccgcgctcggcgaaacggctgtactcctcccacaccacggtcttgtccgggttctgggcatcgcggcgctccgggttgaagttcttgaactcgatcgcgcgcgtgtacggcacgtccgcgtccgagaagttcatcaccgggcaaccgaaatggtcgccctcatcgtaacggacctccttgaagtccaccgtgcgccacttcaggtcgccaagctcgtaaccgaagtaacggtcgaccggacccgtgtagaccaccggcacgcccgcggcccgcagggccttcttgttgtacggctgggattcgtcgaagaagtccacgcccagcgaaaccgtgatgcgcggatcgtcgatcatgcgttccatccacttggtgtagccgtccgcgggcagaccctcccacgtgtccttgaaatagcggttgtcgtagttgaagcgcaccggcagacgcttgacgatcgacgcgggcagctcggcaggatcggtctgccactgcttgcccgtgtagttcttgatgaacgcctcgtacaggggacggccgatgagctggatgcccttgtcgttgaggttctgcggatcggtgccggccagctcgcccgcctgctcggcgataagcttctgtgcctcggccggcgtgtaacgcgcgtggaagaactgattgatggtgcccaggttgatcggcagcggatagacctcgccgtcatgcgtggcatacacgcgatgcacgtagtcggtgaacgaggtgaaacgattcacgtaatcccacacccgcctgttggacgtgtggaacaggtgcgcgccatacttgtggatctccgcgccggtctcctcatccatatacgagtaggcgttgccgccgatgtggtcgcggatgtcgatgatatgcacacgggcacccgcatgctccaccgcctgctgcgccaccgtcaggccaaacaggcccgcgccgacaatgacgagatcggggtactgcgcgccctccgacgggccgtgctgcgtattctccgccgcatttgccatgactcaaaacctttcatgattccatgtgcaattccacacgcgtttcattgtccaccagtatagcgagaagcacctatgtacatatgcgattccgaattcagcggctcctataggcttccggcttgtgcaggctgggttttcggctttacttggtgcacgcgcgacgtgcgcctaccctgtggcatactgttcatgtccgcataaacagggcggcctgccggctacgaccgcagggcgcagacacgtgaagaaggattcgccatgacgcaggtttcgccgcttgtctcgatcgtcgtgccggtgtacaacgccgagaaatacctacgttactgcgtggactcgattcttcagcagtcgtatgagcatctggagatcatcctcgtggacgacggcgccaccgattccagcccgatgattctggacgaataccagcggcgagacaatcgcgtgcgcgtcatccaccagacgaacggcggcatcgcgaaggctcagaacgccggattggatgcggcgcatggcgagtacatcgcattcgccgacaacgacgatatcctcgaccgtcgcaacatcgagttgctgctgcacgcgctgatttctaccggcgcggatatgagcaaggcccgctggaggcagttcggcgtctcccagatcgaggaagtcgcgatggaagccagtgaaggcgccgccgaacccgaacatgtgagcgtgtccacgaatccgctgcgtgcctaccagaccgtgttctgcaagagcctgcgcctgatcggagacaagctcgggcgcaacacggaggcccgctatttcaacgaggcgaactggtgccgcctgtacaagcgcgaactgtgggacggcgtgcgattcccggagggcatgtacgcgcaggacgtgatggtcgccggcgaactgtacgcccgcatgaacaaagtcgccgacctcaacgtgaacctgtacaactggctgcagtccgccggatcagtcacacatcaggaacgcagcttcggtttctaccatgacaatttcgccgctggcgcgcacaacttccgcttctgcctgaatcacggcgtgctgccgatgcgcagctactacacgatggtgggagcctgcacggaagaggccacgtcccccgacttcaacctgcccgagaatcaggcccagcacaaggccgataaggcggaactcgatcagctgctcgccaacctttcccgccagcagcgtttccgctgcactattacccgccgcatccgcctgctggagaaatacgtctacgaccgcaaggtcaagaacatgaagtaagcaagtagggattcactccatcattcgatccatctcagcatgagctgggcacgctacctccgttgttgtgattgacactgttcctatctgatattggaaacggaaccaatcgtatgtaccgcaatgccccacatacgttcaaaaacaccttcccgattgaagataatcgcaaacaacgatttgcgaattacctcgagcatgagcgcgacgacgaaaacgaaggcagaaatcgccagcatccatataatcggcaatctcgtctggtagtacttatcgaaggcaaaccactgagtccaaagcaattcgcggacgaacggatgatccgtaataagatacacccccagagtccaagatgccacggaattgaccagtctcgagcggaaccgcatacgggagaaggcgatgaacataccaaaactgacacctaacaccggcaatgaccattctctatccaatggggccggctccggtatgaagctcagcccatcgaaagccggcacgaactacacatcaccgaactatttcatggaaatggccagtgagcacatgaacgcgaaagtgtctccttatctcgcgttcctgtccaccgtacgcaccaagctgcctgccgtggaacgactcgtgctcggcgagggcggtttcacgaacgatacatccaccacatatctggacaagaacggcgatgttgtgaaacgcaaggacctctccaaacagcagaaaaccctgctcaaagagtatcggctcatccaatacgacatgactgccggcaaaggttatctcgccaataccgatttcttcaatgtaccgaacacacagcataggtaagaaggcatcgtcacgtagttcagttcacgatagaatcacgtagcatctttactgttgcgctccgaccacggctagaattacgtgtagcgcatcgtagaaggagtgtcccgtgaagattgcggttgccggtactggttacgtcggattgtcggtggcgttgctgctgtcgcaacataatgaggtgcacgcgttggacatcgtgcctgagaaggtcgagctgctcaacaacggcaagagccccatcgtggatagcaagatcaccgcattcctcgatgcggaccggtccggcgagcggccgttggacttccaggcgacgctcgacccggaacaggcgtatacgggagcggattacgcagtgatagccacgccgacgaattacgacgcccagaagaactacttcgacacgtccagcgtggaggcggcgatcgaggcaatccgcaagtacgaccaaaccgcatggatcgtcatcaagtcgacgattccggttggttacacccagcagattcgcgaacggttccacgatgaccgtatcctgttctctccggaattcctgcgtgagggccacgccctgtacgacaatctgcatccgagccgcatcgtggtcggcgcgccgcaggatgatgcggaggccgtgcaggcggcgcacacgttcgtggacctgctcgcccacggtgccgccccggaggagaaggaccgcgtcaacccggatgggtcgaggggcatcccccagctggtggtcggtaccactgaggcggaggcgatcaagctgttcgccaatacctatctcgcgttgcgcgtcgcctatttcaacgagttggacacgtatgcggaaagccgcggtctcaacacgcacgaaatcatcaagggcgtgtgcatggatccgcgtatccgcgacgattacaacaacccaagcttcggctatggcggctactgcctcccgaaggacacgaagcagctgctcgccaattacgataaggtgccgcagaacctcatcgaggcgattgtggagtcgaaccgcacacgtaaggacttcatcgcctacgaaatcgaggagctcgtcgaccgggccaaggcgaacggcatcgccaaacctgtggtgggagtatatcgtctgacgatgaagagcggttccgataatttccgtcagtccgccatccaaggcgtgatgaagcgcatcaagtcgcgcggcatcgaggtcgtcgtctatgagccgacgctcgacgcccccgatttcttcggcagcaaggtcacgcacgacttggactcgttcaaacgcgaagcggacgtgatcatctccaaccgttggaacgacgacctcaaggacgtggcaggcaaggtctacacaagggacctgttccgcagggactgatcgaatcgttctgagtagtccggaagtggagatacctagaatcgcgtgattcgcgtcagacgaataagcgttgtcccgtctcttcctccgaagaggcgggacaacgcttattcctgcgtttatttccgcacatacgaaattgaggaaagcccaatccccgacatgaacaacataatcggaaggaactgtatcagatacctggaatgcccggattcaaaaatcagtaaaaaaaaatgattgcaccgaccatggcaatggcgagccatacatcgtaagaaacatgttctccgaacttctctatcgaaagtacctcttcctccttaaagaaagtcctagacattctcaaacaattcatcaggattccactcaccaacaaaatatagaaaatctgctctatctgaatcagcgttctgttggagttggaaccgccagtgtaaagatgggatactttttggataaaaagattttcatggacggcgttcagtggctcattcgcaaatggtctaggcaggaagacattgccggcatatcgctgaacgccgaacgagccatccgaggtgaagtttctgaacttcgtcagcagaaaagtggagtatcctacaacgccatattggcgcagcctctgcttgatgacggcattgttcgcatccaccttctcctgatacgtgagatgcgacatggtgaattggtactcggattccaaatatccgccggtgccggtcattcccatcatgacataatgctgtggggacagcgacagctcatggttgtaggggacgagctgctgagtgcggacagcatggttgtagggaacattcgcacacaggaagccaccggccatgagaatgagtgacgccagcaatgcgacgcagtgtcggcgattcattttcagaagcaatgcaaccaacaatgcgattacaggaatcacagctgatggcttcaagttataggtgaccgccagattcaggccaaacaggaagataagaaccggattcttccaactggacagaaaagccttatcaatggttttctgcgacagcagccagaagcagaaagcgcagttgatcaccgtgaacggcatgcaaaaggtatcgctgtacggatgcaggcaccatcccgacaggccgaggaggatacaccaaagcaggagaacgatattggctaccgaatcattaagataccgcttggccactgcatacattccgatagcacaaacgtcaactaccagaacggaaatcactcgcattacaagcaacagcgcttcaaggcttgtcacaaagggaagagccttgtaaatcccgagttcaacgaagaacaggaggtagttgttaggggaattggaaagataggaagctccgtccaaccctttgtccgtaatgacttgcggattgacgacatagtcaataacccattcggcatcaaagcccgttgccggccctaatgcgaagaacatcacgatttgccagcaaatcacgatgacgaaaagaatccacttatacctcaccatcatatgccagatgccacgaacggcctgtctcacttttgcaaacaccgataccgccacaatgaatacaagcagaacaaccagcaaaatcgttgaataacgattattcccactcacatcaatgtcaatcatttgtggcgacgtcgccctgatcgcgcagtaccaccaccacagcatcataacgctgaggcaaaagaagccggaaccaatcagtatccgtcgccatccggtggtcatatcatcgacggtttcactcatatgtttatgtttaattgtcatcattggctccaatccacaaaacgaaagcacatacgaattgaggccggcaatagtcacttagctatattgccgacctcaatcgagctgcagacaccatccgattcgaacgaaaagacgcctcgtcactgaatcatcttgaattgcagagcgcggtcgctcaacaacgcgtaggtcttgttcctgttgtttcggacagcgaagaagcaggaattgtcgtcattggtgaaggcgatcatatccgtcctgttggggtcttcgggattgtccagacgcaacgagacaagcagtttgaaatcactgttgttgaagtcgctgaccggaatctcaaaaccaacacgttgccgtccacgctgcttcatcggcaccgaacccgaatcgcagacgacgccacctcgtttcgtgtcaatcaaagaaatggccagatagaaggaaacatcctccgcgaactcgtattcgacatcgaagcggaacggttcaacaccatccgacagctggttggaaaccggccagatcttcaggaacggaacacgtgcattcagaccggtcggatacgcattatccgcatcgtcttccttttcggttttcttcgttgcgaaattctccaacgtgtaacggtccgccaccacgtccttatcaccacgctcgatgatttcgccgttcttaatcagaatggccttattgcagtacttcttcaccgagtccatgctgtgcgtcaccagaatgaccgtcttggtcggatccttcttgacctcagagaagaagttgtcgcacttgcgttggaacgcctcatcaccgacggcaagcacctcgtcgagcacaagaatgtcgccctgggctttgatggccacggagaacgccagtcgcacctgcataccgctggagtaattcttcagcttctggtccatgaactcgcccagttcggcgaactcgacgatatcgtcatacatggcggcgatttcgtcacgggtgaagccgagcagcgcaccgttgagatacacgttctcacgtccggtcagttcggggttgaaccccacgccaagctcgatgaacggcaccagcttgcctcggacatccaccgtgccctgttccggcacataaatttgggagatgattttcagcagggtggattttccggaaccattacgtccgacgatgccgaagaagtcgccctgatgcacttcgaagctgatatcgcggagcaccttctgttcggtatagcccttaatgcccttggtccagttcaggaaggccatcttcaggccgctggcctgttccgtcggcagacggaaggatttggcgacatggtcgaccttcagcacgaccggacgttcatccgccacatctgcagccgtggcggcgttgccagtattgacgttattctcaacgacagtcatcagagcacctccgcgaacttggcactatgcttgcggaacacgtggataccgaaccacagaatcactacagacagcatgtacggcaacaagcacagcaaacggttgtccaccagcgtccaaatcgtcggcacgtcctccggtgagatgagattatgtcggatatccatgatcgtctgcgtggttggaaccaacatgagcagcttggtcacccaagccagttcaggcgcacgctgggtgatcatcgtaatcgggtagatgataggcgtggcgtagaacatcgcctgcaaaacgacttcccaaatatgcgcgacatcacggaaatacacgtacagcgtggccaacaccagagccacgccgagtgcgatcgcatatagctgcaggatattcaatgggaccagaagcacatgccacgtgtaatgcgcattggcgaagaagccgaacacgatgacgaccagcaggttgatggccagggaaatcatggcgcccatcgtggtggaggcgacgatgatgtagttggggaaatgaatcttgcgaagcagatcaccgcggttcacaatcgcggacatgcccatggatgtggattcattgaagaagctccacaggcaggtaccgcataacagcgagatggcgaagctcggtgtaccgtcggagaacttcaggaatcggacgaacaccatgtacatcaccgcgaacaacatcagcggcttcagcaccgaccacagtactccaaggaaggaaccttggtagcgcaactggaaatcggttttcacaagctccttgaacaccaccagtgagtaatggtaacggtcgcggagtctgtcccatgctttcttcataaacaccttattctactcagacaggggatttcccgactttctccgccgaatccacctgccactcgtctctatcgatgcaaaccggagcgtactttcttcagcaccgcatatgccgtgcgaatcggcacccaagcggctttcctcaaccggctctgcataggtttgggtagcgggtaagtcaccgcacggaacactttaccgagcgcaagatgcgtcgtacggcgcagccggccaacgaacgtcaacgacgacctcaggctgccgaggctctccatcacgctttcgccgcgtcgcacgccactggtggtgtccatgaagccctgcgcggtgtagtacagggagtccacttcgatgcgtgcgtacttgtcggacatcacccatgcagggtaatacccctgcgattgggcgatatagccattggcccgttcgatggcgtgcgagatggtgccatcgacacccatcttgccttccggcaggaagtcctcgtaccgccacccatattcgtagaggggcttcaacgcttccacacggaaccaatagcacgatccgatggcggatacgctgggcttgcgttcatccagaggaacgtggatgtgaagcttgttttccagcagatccttggtgatgtcgaagttgatgccccaatcgtgcggcaccgtatgcgcgaaataaagggcgtggataggcggcggcggagtcgccatacccaagcgcggattattcgcgaacaacgtcaatatattccgcacataatccttggagccgagcgtgttctccagcagcttgtaggcgaatccttcggtctcggtcccctgatgcccgttctgctggttctgcccggacttcttgtcgtgcgcgaaaccgacgacatcatattttccaccgagaacgacgtctttcgctccgacgagcagcgccgacacgtcacgaccgcggttttgcaccgggatgaaatcgaccgtatgagtgaagccacgcttatccattgccttgcggatgtcgtcgattttcgactcattcgtcgtgatgtacaggtcggtgtcctcaggcagattggcaagatatcccagcgtctggtccagcaagtcgaggaaatagacgtggtagatgaacgccgaacgcaccggagcatccccgtcctcacgaggattgacggtacgggtcggcaacacgtagttgagatgcacggcttttgcgatatccgcaatattgtatgccggcagtaccgcgtcccatatcagatcggtgtcgtaatcggtatgccggcgcagatactccaacagttccataccgggctgaccggcggtctggttgaaatagtactggtattcaacgaagaaggaacgcttcttgaacaccgggcatcggtcgtcgcgaatcagggaaaccgggtcgtacagcatcggatacgtcgaacgcgaccggtacttgtcatagtcgatatatgaggcccaggtaaatccaagatcggcgaaccgtttggtgaacgtcatctcatgcttacgtgtcgcctccgcgtagtcttcatacacgggcatggtttcccaataacgctggaacgctttggaagtgatcagggatttccgatacgcatgccaatatgattgcagatgcgtcggaatctcctcgccgaaggcgacgtcgtgcggatatgcggtgatgccccagaaatcaacgttcttgccgtccattgtttcgaacatctccgagaacggaaaaaccggtcccagaatcgtatcgttcaggcagatgacctcatcgtaggcggcaagcttgctccacccgattgaaagcagcgcttggcggtatgcggcgatatcaaggcccttgttctcacgaacgatgatcctatcagcgaatcgttcaagcctcttacgagagtccgcgtccagttcgccgttggcgacgatgaccagctggtccagtgatttcacgagcttgctcaggaaataatccacgtagcgcgctacatgaccgtatttggcgtagatgcagtaaataccgcatcgtttccattgacgtcctttggatggcacagtcatatctccgttccttttaacggtgaagaatccgatgcgcggcacggcgcagtaggttacgtcgttcgctaccttccgggaacaccgcatcaaccacacggcgaatgggcgttcctgttttcaacacgcggcgttgctcttccagctggagttgctgccgatatcgctcttgttgctcggctattttcgcctgtttgatttcgaactcgtgcttgtccagtttccctttcaacgcgaggaaaccgttcacgcgttgctgaataaccgtatcggaaatgccgttcaaatccagactgttcagcaacgtcaaccagcgacgatacggatccgcatccgacgggaccgcatcatggtcgacgaaccactgcgcacgtgccgtaagagaatccaacaacatgtaagcggtattctcatcaccccaaacacggcgcagcgaacgcataccggcaatctgatcggtctccgtcaacctcatcacccattcacgtcccacgattccaagcaccacatgcctgtaccattgcgcgcaacgagtcatgttgtcgtcaccggagtcggccgcataccgcagcacagcattcatggaggaatggattcccgtatggccatgctcgaatttctgcaacgtctcaagaccggaaccggacaccccggcacccagattgtagcgaagaccacggtattccatgaagaaccgcattgttttcgcccgtgaagccaatacgaagaactcgtatgaatcctgcatgcgtccaagcggttcatcatacgttgcggcgaatccactacgaacgaattcgccgtcgaacatgcagtcgataagactccacgtgttgcgggttccgaaatcttcggagaacaccgacctcagcacatcctcaccatgcatgtcttcggtatgtagattgaacgaccgctcctcctggagcgccgtatcctgattggccgaaccgtgggggaccacggtacgaccgaatcgcagaatatcgaaattccgaccggacgcatatgaggaaagcacttcgcatgcggtatcctgcagacggtcgtcaccatccacgaacaccacgtacttaccggtggcatgggagacgcccgtacgccgggcaagatgcgcaccctcatttttgtctttagcgatcaacgagaagcgtgaatcattctgtatcgcggattcgatgaccgatttcgtggaatcggtgctcgcatcgtccacaacaacgacctcgaaatccggattggtctggttttgcagactctgcaggcaatcggcaatatatcgctcgacgttatacgcaatgacgacaaatgaaacggtgggcatacttcttcctccgtgcgaaaacttcaaacggcttcaggcagctttcggcttaacgatgatcttgtcgtcggccacatctttgaggtgcttgccgtacgggctcttgccgtacttctcggcggcctcaaacaactgttcgcgggtgatccagccgttctcgtaggcgatttcctcggccacggcgatgggcaggccctgcgcgcgctgcacggtgcgcacgaactcgcccgcctcgtacagggagtccattgtgccagtgtccagccacgcgtatccgcggcccagcgtacgcacgttcagcgcgcccgcctccaggtacatcttgttcagatcggtaatctccaactcgcctcgcgcggacggtttcacctgcttggcaaactccaccacgcgctcgtcgtagaagtacaggcccgtcaccgcgtagttcgacttcggatgcctgggtttctcctcgatggacacggccttcttgtccgcgtcgaactcgaccacgccgtaacgttccggatcgtccacgtagtagccgaacacggacgcgccctcgccgttctccgccttcgccttcgccttgcgcagcgtggcgcccagtccattgccgtagaagatgttgtcgccgagcacgagcgcgcacggctcgcccgcgatgaactcctcgcccagcaggaacgcctgcgccagaccgtccggtgacggctgcaccacgtaggagaatttcacaccgtactggctgccgtcgccaagcaggcgttcgaagttcggcaggtccttcggcgtggagatgatgagaatgtcacggataccggccatcatgagcacgctcagcggatagtagatcatcggcttgtcgtacaccgggagcagctgcttcgatgtcaccgtcgtcaacggatacagcctcgtacccgagccaccggcgagaatgatgcctttcataaggacctgctttcttcacagtcgtaatcagctcacaccagcttagccaagacagtggcgaaacagaaaaccgcgcaggtcattctgcgcggttttcacactgacatcaggccgtcggaatgggctgacagacctttccggtttgccctatctgtcctacttgccgagttccttgctcacgtatgcttccaaggtttcctcccagtcggcgggcgtgtagccggcggcctcgatcttggacaggtcgagcgcggaatgctcgggacgcgggctgaccggcgacttcgcgttcgcgaagtactcggccgtgctgatcggcttgaccttctccccgttgccgttcgtcagttcgaacacgcgggacgcgatctgcgcccagttcctcaccgcgccggaaccggtcaggttgtacgtgccgtactgggcatgcgagtccagcaggtggaagatcgcctcggccatgtccttcgtgaacgtgagacgcccgtactggtcgtccaccaccgtcacctgctccagctggtcgtccgggttcgcgacacggtccgacagcatcatcatcgtcttcacgaagttgcggccctcaccgatcacccagctggaacgcaggatgtagtgctccggagcgttcgccaccgcgatgtcgcccgcagccttcgtctgcccgtacacgcccaacggcgcgaacgcctcatcctccgaatgcaggtccgcggtgccgtcgaacacgtagtcggagctcacatgcaccagcgtgatgtgatggtccttcgcgaccctggcgagcaaagccgggccctgcgcgttcgccttccacgcggttggacggccctccggggtttcggccctgtcgacggccgtgtaggcgcccgcgttgatgatcgtcccgtacaggctccaatcgtacttgtcgtacgcggccgggtcggagaagtcgaactcgtcgatgtccgtgtactcgaaaccacgcagaccatgcgcctccgcgtacgcgcggaccgcacggcccaactggccgttgcagcccgtcaccagcgtgcgcttcggctccatcggcttggcgtccttgagcatcggatgatgcaggtccgcctcggagcgttcgctctcctccagcgggatgggccagtggatgttcagctccgggtcggcgaggttgacgaacgtgtacgtcttcttctgctctaacgaccagtgcgcgttcaccagatacgtgtacacggtgccatcggccaatgcctgaaagctgttgcccacgccacgcggcacatagattgcgcgagacgggtccaggcgggtcgtgtacacctggccgaagctctcccccggccgcaggtccacccacgcgccgaagatctcaccggtcgcgatgctgatgtacttgtcccatggctccgcgtggatgccgcgcgtcacgcccttcgtcgcgttaaacgagatgttgttctgcaccggaccgaaatccggcagacccaacgcggtcatcttcgcacgctgccagttctccttgaaccagccacgattgtcaccatgcaccggcaggtcgaacaccaacaggcccgggatgttcgtctcctcgaccttcaagtccttctcgaattcgaacgacatacgttccctactttctatcttcagaatcgttttgccacgttgctatgcagcgtgcaggattaagcgttttcaaggcctcccctttatcggggaaagcccaattcgggcattcggggcccaaggcatcgaggatgaagaacatgtcgtatctcagtttcgcgaactcgacccgcagaaggttctcatcatgaccgatacggttgcggatggtacgaaccgatttgaggcggtccaccagttccttgcgcagcctgtcctcaaacgggtcgccgtcgttgccgggaagccttcccttcggcatacgacgcagttccgacgcccatgcatccgcgatgttggggaacgcgcccatgaggacatgggcgagttcagggtccttgccggaacgggacaacatgccatcccacgtgcccaatgtcaattgggagaacacgtcgtcgcgggtgatcgcatccccgtgccttggatgcgtctggtcggaacgccaatgccgctgcttgcgcaatgccgtgttccgggcctccgcgatatagtcgcgctcggggctgttgatcaaagcccgtatcctcccgatcggatcgcttttgccggcttcaagccagtccgggatgcccgttatctgctgcccggacacccattcgcaaagccggtgatcgattgcgtttctgacgaatatctcgatatagccgatataaccgattgtgatggcggatgcctccacgttccagcggtacagcctcaccgccagatcgaccagccgttcccgatcgactgtatccacatgccgtcttgcataatcgagatacacttggaaccgcgcgtcagcaagaaaacgactcgccatcacggcattgtccgcttgctttttcaaattcatatgtgtatctttcttagtgctataggggccacaccttcgaggtgtggccattttcatattccgctcactggccctgctgcttgtacttggcttcggtagcggccttcgcgggctcccaccagtcgcggttgtccgtgtaccacttgatggtctgttccaggcccttctggaagtccgtgtgcgtcggcttccagccgagctcggtccgcagcttcgtgctgtcgatcgcgtagcggcggtcgtggccgggacggtccttgacccagtcgaatgagtcaggatcctggcccatcacggtcaggatgtcgcgcagcaccgtgatgttgttgcgctccccgttcgcgccgatcagatacgtctcacccaagcgtcccttggtcaggatggtccacacgccggtggagtggtcgtccgtgtggatccagtcgcgcacgttctccccgttgccgtacagcttcgggcgcaatccctcgaggatgttcgtgatctggcgggggatgaacttctccacatgctggtatgggccgtagttgttgctgcagttgctgatcgtggcgcggatgccgaacgtgcggtgccaggcgcgcaccagcaggtccgagctcgccttcgtcgacgaatacgggctcgagggatggtacggggtctcctccgtgaacttgttcggatcatccagggccaggtcgccgtacacctcgtccgtgctcacgtggtggtagcgcacatcgtacttgcgggccgcctccaacaggcggaacgtgccctccacattcgtcttcaggaacggctccgggttcgcgatcgagttgtcgttgtgggattccgccgcgtagtgcacgatcgcgtcatgacccggcacgatcttgtcgagcagctcggcgtcgcagatgttcccatgcacgaactccacgcggtcacccaagatgcccttgatgttctccaggttgcccgcatacgtcagcgcgtccagcaccgtgacatgcacgtccggatggttgttgtacacgtaatgaacgaaattcgacccgatgaacccacagccaccggtcacaatgatgttatgaggagtaaacacttcatcagccatgggcactatggtaccgttgcgcccgtacggacgacatcggtgacgtgtagcctctgtggccgttgctccggtcgattcctcacatagagggaacgacgtatcctagacacagcatctgtcagcgaaagaaagtagctcatccatgtctgaagacatcaagctgttcgtctcctgtcataaactggacacgcatattcccgacaatgccctgctgcagcccattcaggtgggagcggctctcgccgcttcccggatgcccaatctgctgcatgatgatgagggcgattccatctccgagaagaaccgctcctactgcgagctgaccggccagtattgggcttggcagaacaccgacgcggattattacggcttcctgcactaccgcaggtacttcaacttctccaaaaccgaatatccgattcatcacgagccgttcattttcggtgatgtgacgttcgaccgcaatgacgatgagacgttgcagcgaatcgacttcaatgaggaagccatgcgcaaggtcatcaccgcccatgatttcatcgcccccgaaccgatcgaagcgttggagaaaaccaccgtctacgaacagtaccgggattccttcggccaccatatcgaagaccttgataccgtgatggataacatccgtctgaagtacccggatatctggccgagcgcgcagaagtatctcaaccagacgaaggtatatgtctgcaatatgttcgtgatgcgtcgcgaactgttccgcgcatactccgcgttcctgttcgacgtgctgtccacgcacgaaaagatgcgcgacttctctcattattctccggtggctcgccgtgtctccggctaccttggagagcgcatttgcggcatgtacctcacgtatctgtatgacaagggctatgacggcatcgatctgcagcgcgtctacttccgcaacaccgatgacggacagcggcctgccactgcaaccggcaccaccggcgaaatcgaaacgctgaattttggcgcgacggtgcgtggaccgggcaaaatctattccgcgattcatgcggaacatctctccgacgattggcagttccgcatcagctcgaccacgtccgacggcaagcaggttcctgcgaaggtcgtacaggccgccagcgacccggtcgcggtgtttcccatcgtcgcgcaatctcagacggtgtccgtgagcgcggtagactcggatggacgcacgcgcgcgcagggttccaaaacgttcaacaggcgagccgcgcagctgatgtcctatgccaataggctgtcgcataacgcggaggcttcgacgattcacaattgcgataaagcgatgctattgggtgattcacatgtcgttgtggatgcgcttatcaataacctcgatgccacagacatcatccacggccatgtctccgttccgctggtaggcgacgaaagcgcgaaggattatgtggatatcatcgcgctcgacggccaaggcaaccagatttccatgggcgattggatttgcatgggcgaagagctcgacaccgatccggctcttcccggattgcgcgtgcgtaagatctcctattcgctgcatatcccccaagtcgatacgttcatcgtctgggtgaagttcccggacagcgaccgtcaggattcgttcctgtgctctttgccgctgcaaacgcacttgatgcaccaccagtgggccacacagacggagccggcctgtgccgctggcgattacgataagtggttccgtacccgccagcgcgcttcggctaacgagctggagattcagcagcgcacggttttcgatgtccagccgaagtattccatcatcgtgccgttgtataagacgccgattcagttcctgcatgccatggccgactccgtcatgaagcagacctaccggaattgggagctgcttctggtgaacgcttctccggaagtcgccgacctcaatcaggccgtggacaaactgtgcgcgaaggaccatcgtattcagcatgtgactttggagaagaaccagggcatcacactgaacaccaatgagggaatcaaaatcgcttcgggtgattttctgtgcttcctggatcatgatgacgtactggagccggatgcgctgttctgctacacgcgagccatcaacgagcatcccgacacggacatgctgtattgcgatgaggacaagctggacaacggcaagtatcgagagccgttcttcaagaccgagtggaatcccgatctgctgttgggcatgaactacgtgtgccatttccttaccgtacgcaagtccatcatggacaagctcgaattgccggacaaggagtatgacggctcgcaggattggcatatgacgttccgtatcggcgagcagtcgcggtacgtgcatcatgagcctcgcgtgctttatcattggcgcgtccacagccagtcgactgccgctcgtgccgaccagaaggactatacgctcgacagcagccgtctttctgtcgaaacgcatttggagcgatgcggcatcaagggcaaggtcgttgattcaccacttatgccgcgtcgtttcaaggtcgattacagcctcgccgaccacccgttggtgtccatcatcatcccgaacaaggatgctgtgccggttctgcacaactgcctgtcctcgattcgtaaattcacgacctacgacaactacgagatcgtaatcgtggagaacaacagcgtggacccgttcaccttcgaatactatgagatggcacaacaggatgacccgcatgtgagggttgtgaagttggaaggtatgacgtccttcaacttctcccgcatcatcaacttcggagccgagcaggcacgaggcgactactacctgctgctcaacaacgataccgaggtcatcactccgaactggattgaggagctgcttggaccttgcatgcgtgaggatgtgggaatcaccggcgccaagctgttgttcccggacaacaccatccagcatgccggcatcagcttcggcccggacggccccggccacctgtactaccagatgtcccgcaactatcccggcaatttcgaagccaccatgctggctcgtgatctgggagcggtcactggcgcatgccttatggtcagcaaggaggccttcgacaaggttcatggcatgaccgaggagcttgcggtgaactacaacgatgtcgacttctgcctgaaggtgattcgtgaacagttgcgcgtggtgttcgtgcccacggccgaactccaccattacgagtccgtgtcccgcggatcggatgcctccggcgagaaggccatccgcttcaagaaggagcgcggcgagttcatgagccgttggccggaagccttcactgtgaaagcgccgtttgagaatccgaatctgcaattcggcattatctatcagacgcttaaccgtgagtataagagggagaaccgttgattctgaaaacaagcaatcagattctttctcaggccaaggcttcactcacgagcatcgatgtcgtagcgtcagccattattggttttgccctcggtatggtgttttccgtaggcaggtccttttatgggtctttaggactgatgtccttcaaagacagttggctttggattcgcggcttttgctatggctgcgccgcagccatagcaattgccgcgatactggttctgtggaattggtatcaagacggccataaaggcatcgaggtacctccgtcaagattctcattgtggttgacgaatctcaccgcatacaaacgcgttgcgctgttcggcatcactatcttcgtcttgtggatacccgcatttcttgcattctatcccggcaactattcgagcgacggcccgattcaggcaacgtatcttctgaatgatggcgttgtcgatctgcattggccggcagcgcatacattgttgcttgtcggtcttatgcagcttggcaatctgttgttcggctcatacaacgcgggagtatcactattctgcctgttgcaggcgttggcccttgctttcgcgatggcgtatgcggccaataaaattatcgaatggggcgctcctatatggctggtcctgctcgcgaatggaatcacggtgttcaatcccgtgattcagacatatgcggtgaccactgccaaggattccctattcgctgtcttcttcatccttacggtgacgttactgattgagatgctccgcactccggaagcactagcttcagtgccatttgccacgaagtgggtactctccgtactcggcatgtgccttatgcgtaagcagggtgtatatgtggccatcatcgtgatgctcattgctctgccattcttgaggcagtggcgccgacgactgaccgcgttgatctctatcgcaatggttttcatcttatcggccgccttctccggtgtggtcgcgaataccgcaaccacgcgcgcggattccgcacgagagatgctgtccgtgccttctcagcaaattgcacgtacctatatgtacgactatgacacgttgacgaacgagcagatacagggcatcggcgcctattatgacttggatgccctcgaggctggacgcaccacagacaagccttgggatcctacccctattggcatgttctacgatacggaaacggggtccggctatttggctccgatttccgaccccgctaaagcggcattgttggatgaggctttcaactcggatcccttgggatacgtcaggatgtacttctctgtgatgaaaggtcacatgtccgattacgtccgtgctttcctttggggtgaaatcgggtacctataccctacgagctcggcagtgaaccgttggaccggattgtctccgtggaatgaattcggcaaaaccattgatgccggcggatcaacgaatcaggtgtccgactacaatgagaccaccaaattgccgggatatcttgcatggctctatgccggaacctggaacatgttccgcggacacccgttgttgacggtttgggtatccccggctctgccgtttttggcattactgctttccgtgattcttctgatcaagcgcaaagggaataaggtcctgctcatcgcttgggctttcccgctcctgtattgggcgacattggctttggcgccagtgatgtgcgtgcgctatgtagtgccgcttttcttcacgctaccgctgattgccaccattcccttacttacgcttaaggaattgtgactagacgatacccgagctttagttcacgacgtcgggggttcttcgtatccattctctacccacaatctccaatggatacggagaattccactctccacatatgcgatgcgggccactgataacgttgtagcgcaccccttttctcggcgtagcaatctgcaagatactccagcatgaaggatatagtggtacccatgcttgaagagaagaatccatccatcgccgttctcctgccctgctataacgaagaggtaactatcggcaaggtggtgcgcgacttccatgcggcgctgcccgacgcggccatctacgtgtacgacaacaactccaccgaccgcaccgccgagatcgccacagcggaaggcgccatcgtacgcaaagagccgcgtcaaggcaagggcaacgtcatccgctccatgttcgaagacatcgacgcggacgtgtacgtgatggccgacggcgacgacacctatcccgccgacgccgcgcccgacatggtcgccaaggtgctcgaaggctacgacatggtgatcggcgaccgcctctcctccacatacttccaggagaacaagcgcccgttccacaacttcggcaaccgtctcgtgcgcggctccatcaaccacctgttccgcgcgcacgtcaccgacatcatgaccgggtaccgcgcgttcagcttcactttcgtcaagacctaccccgtgctttcgcgaggcttcgaggtcgagaccgagatgaccatccactcgctgaacaacaacctgcgactctacgagatgcccatccagtaccgcgacaggccggaaggttccgtctccaagctggacacggtaggcgacggcatcaaggtgatgagcaccatcttccgcatgatccgcgaatacaagccgctgccgttcttcggcaccctcggcctgatcatcggcatcatcggcatcatgttgtgcggatgggtcaccgccgaattcgtaggcaccggcatggtcgtccacttccccacgctgatcggtgccatcatgctcgtcatcgtaggcctcctgctcatcgtcaccggcatcatcctcgacgtgatcgccaagaacgaccgcaaaacctttatagtggatgccaacaggttcgcctatgcaaaaaggcattggccccatcctcttccgcctcgcgatgctgcaccatatcgcaacaaccaataaacgcgatgccatgagttggcttaacacggttcaggttaacggcaatcgaggatttggcagcaatcccaatcagcccttacacaacacgttcccctataagacaacatgataattatacagatgtgaagagcaacattaatgaataaaacgacgcaagaaaacacgcatcttaaaatagaagacattttcaatcgatttatcacactccttgccgcactgattgtcacctgtctaggaattgccgctctatttcatacgatgattttccccttggattactctgaaaagcctacaaattctctcaaatacagcatcgtgggaaccgtaggcttcttcattctcgcgggggcagcctactatacgggcaaacatttaaaattcaagagacttccctcgttgaaaacgttctataggatacagacctatacagctcttttcatcggattgacttggctatcaattgcaaccacatctccagtcgcagatcaaggcacctcaatcacgttatcaatatggctacaaaacaacgatttgggaaatctgcatgcaaatgactacctacaacaatatccattccagtccgggtatatattattctgcactctaatggggcaacttttcggcatgaacaacatgttgccgattcgcctttttaatctcctgatgattatagtttcattgaaaactctatgtaaaatcacggagagaatgttcaagaatgatgccgtcaccaaagcgaccattgtattgtccacggcattcctccccctcattttattcgcgacatttatttacggcaacataccgtcgctcgcgttttgtctccttgcctgcctgctccagatggctgccattcaagcaagcgacgacataagaaaacgtcttgcgtacggcacattgtcagcggcttgtctcttcgttgcactctggtttaagcccaacagtctcatcttccttatcgggatcgaacttatatggcttgtcatcttgtttgcgcataaacgcgttctagtcatcacattcatcatattgggggcagtcgcatatatagcggcttcggcgataccgatcttccttatggaaagtcgaatcaacgttcctttggacaacccgacccccaaaacggcttggattgccatgggcctacaagagtctcgcgagcgtgcgccaggatggtacaacaattatgttgtaaacatttacaaggaagctcctcacgacaataatcaggtagatgcaatggcaaaggaggctatagcccaacgcatccaagcattcacacaggaccccctatatgctgcgcattttttcactcgaaaggtagccactacatgggctgagccaacatttcagtccctatggatttcatatggcggcaccggcggagagcgtgcggacctaacacaatcaaagctagagcatgagataatgcgtggcaggttgcacgccatatatatagtatattgcgacattatacagaatattatctatattggcgcatcctattgtcttatctttagatggaggggcttgaccactaaacaaattactctgattgtgatatttcttggtggattcactttccacctattctgggaaactaaatcggattatgtgctcccctatttcttgctgctgataccttacgcagctgcaggatggcatgatatcatcttcactaatcgcaaaatgatttacagccaacttaagcaagtacaatctaaataattccacttattgcaaggggtttgaaaccgagataacggcccagaaccccttgcacactcctaccgcttcgctccggtcaccgggtcgaagtagtacttttgcccgtcgatatactgcgtgccatacaccatctttccatcggagccatagtatacggtcttgcccccattggaattcagatactgccagcctgtcttacgagcgccggtcaccggattcaggtaataccaagcaccgccaatcttctgctccccatactgcatcttgccctcaggccagctgtaatacacgattttggagccgaggttcttccaaccgtacgtcacacgtccgttcgacttggaggtgccatcatcgaagaagtaccagtaacccgacacctttccttctccgtgcagcatcgcgccatccgaaccgtagtacacccacttatcgccacgatggtcacgcgtagtcacgactcgtcgccatccggcgaaacgtgcaccggtaccaagtttcagataatactgtttcccgtcaatcgtctgttctccgtatgccatctttccgtcggaaccgtaatacacggtcttaccgccgttggatttcagccgctgccagccctgcttgcgagcgccggtcaccggatccaggtaataccaagcaccattaatcttctgctccccataaaccatgtagggggagtagtatacattcctgccgtccggcaatacaacccaaccggtcatcctcgcaccgctaaccgggtttaggtaataccatttgccggcaatcttctgctcgccatacagcatggcaccatcttgatcatagtaggtccacttgttcacgtcacccttgaggtacgtccaccccgtcacgcgcgcccccgtgcccgggtccaggtaataccatttgccggcaatcttctgctcgccatacagcatgtgtccatcggtcggatcgtagtacacccatttgccgccgctcgacgacaaccactgccaaccggtgaccttcttgcccgtcgtcgcgtcgatgtaataccactttccgtcaatgagcacttcccgatatcgtgtggccggagtccggtacccgaacgcgtttaaatccacgttccccgtgattccgctaatctgtccactgctcgtgtactgccagccgcggtcgttcgtggggaacgcggtgtactgcatggtggagccgtactgcgccacccagcgggtcttgccgtggatgttgccgctgttgagcgcactgttcaggtagcttgtgtacgagtagacgctcagattgttgtaaccggccgcctgcagtttgccgtaccaggagttcaccataccgtcgtacacgctcggactcgttgggctcttgtgccccgtgtacgtccagttctccagatcgtagaacaccgggtaactcaggtcgcccggattcacgcctgcctggcgcagcaggtccaccacgtccgcaccctcggatgcgccgtcggccgcactttccgcatacgagaagacgtacacgccgaacgggatgccgagacgcttgcattcgctgatgttgcgcttcgcctgcacgtcgaagccattgccccagccgtagctcagacggatgatcgcgccctcgacgcccgcgttcttcaccgcctgccagtcaatcgtgttctgccacgcggacacgtcgatcacgcccttcgcctgctgggcgaacaggttgttgcgcgcgtcgaagaacgcctgcgtgccgttgtacgtgccccagtgcgcaccgtactcgttgttctgcaacgcggcgagcttcaccgacgcgttgtcggcacgcgtcttcgaggagaccgcgttcacgtcaccgccgttcgcagcgaccttctctttcacatccgcggcgctcaccggaatgaacgactcgccatccgtcttcgccaacggatcgggctgcttgctctccgtgcccacgatcttcggatcggtgaccgtctcgcccgtctcgatgtccttcaactcgccttccggcgtagccgcatattgctcggacaccaccgtcgcgtcatcggagatctcggcggacaccttatccggcagctcggcattcggattgtccggcatcgcgtcggcagccgtctcatcggcgaccgtcacaccgttcgcgaccggacgcgtcgcggaagtcgcggaccgcgcctgcgagcgcgcgtcggatgaggttccgtccgaggcggccgcggaggccgtcacggaggccgcggaccggacgccggacgcgtccgcatcggcgttcacatccgcgagcgcgctggccggagtgacgcacaccgtgcccaacatcgccgccgccgcgacggacgtcaccgccgcgatcacgccgcgccccgcaccggacgccgccgcacgcgcacgcaacgcacgcagcatgcccgtcgcacgcgccgcacccgtcgcgcccttcgaatccgagccgtcgagccacttcttttccaccatgcgtaactccttgacgcacccatcccgcgcacccgtacaccgccacgcgttccgatggtcgaccggactctcacacgcgggaacaggcaggcgggaataggcgtaatcccaacgttttcaaccgcgtctcagtctaatgtgcgcggcggataaggcgggcggagcgaagcggacaaaatcagcggaactccaccgcacattccggcgacggcatcatcctatcttttgagaagatacttcctgtttctgctgcgcggcggcgcagtggcgagaacgactccacgctcaacgagccggctcaacgccttacgcgtcgtaggaaggcctctccccgagcgacggccgatttcgtggacatcaagtggcgtatccgccgacaatacggacagtatcgcggattccgatgccgtaagccccttacggcccccattcggctccccaccatcgaccttctccgctagtgcgtaccgatcagggccgatttcatcggccaaccccgcttggaccaatctatgcagaatcaccctgatgtcgtcggaatccagatacagcgcgacatgcaactgcggaaccgtcatatcgccatgcctcttcaacaagagcaacgccatacgttcatgacgagtcaaggggacgcccacatgatcaagccagtcacggttctcctgctgctccacgccgtagcgtccaagaacgaccgtgaaccgatcgggagtcgcgcggaacacaggttcccccagtgcgtgggatttcatctcgcgaatcaccagagggatgccggagccaccgccttccacggtcacatcattcgcatcgtcatacggtatctgatgaagcagctgcatcaacgtcgcattgcggcagcatgacacgccgctgccgatcgtggccagcgtgaccccaccccataatccgccaggattcgacacctccacccgatcggggtagatgtccacggtcacggattctccgaggaattgcgcatcatattccctgtgaaccacggcattggcgacgacctcgcgcagcacctcctttggaatctcgctatcggtacgggctccgacccccacgacgaacgtgggagcccgcaggtttttggcgatggtctccaccgcctgttcgattgcctccggcatattgccgtcgcattgcacacgatccacgaaacgcggaccctcaaccgccgatttctcgacacccggatgtgcgacgacgtcaatgatcagcttgggatagtactgctgcgggtactgtccggcggccaacagtcccgcaagacgcacctctccaaccttgttcaccatattcaatctggtcatgcgctcaagacgagtatcagtcccgcgcagcgtcttggaattacgatgctcagcaagcaccctgtccaccgcctcggcattcagatcggagacgtcggcttcagggacaaccatacgatccgcggaactgagcgtcagggcatgggtcatttcgaacacttcggttggcgacaatctcaaatccttgtcgtccacacggcggtacccaccggtttgcggccctctcgccgtaagatagcagggtttgtgctgaatgccgttttcatggatgtcgatgaccaggaacgacgagccgttctgctcgcatcgggaaacgtcatactccggaggattcgtcaaccgtgctccttgcggattgccatctcccataccatccatgaactgcgatgcaatatggttggcgtcgaatcccggaacaggcgagaaatccccgtcctcgctgattcccaacaacagcacgccgcccttggtgttggcgaacgcgctcacactctcccacacgctggcgccgatggtccgagcacaggatttcgcctcgaaacgggcatcatcgttgccttggacgcgtagatgttccagcacctcggcgatatcgtcattcgtccacatcatcatcccccttgatcagctcatttgtcttatttgttgcggccacatggatccaagcggtcgcctccaatcgacttcaaacccacgtctgaaatctcatgataacgtgaagataaatactctatgatgagcttatcatgattgcatcatgataagctcatgacatcaagaaccggtttatgacaagcggcacgaacacgcatgccgaacagcaacaggaacctgaacgcaagcatcaacatgtaaataccgaaattgaccgaaccaagaaaatcacgggaaatcacgcacgacattacgcgggtaaactatctatagcacatgagtatgggccgggaccgggatgagacggcttcgaactgagtatgaggatgggaagatgatcttcgagacaaacacgcagaaatcggacatcacgagcgccggtggcgatggttccggcgagcgcgccgaccgccgcgaccagccggtcgtgtatttcgtgcttccctgctacaacgaggcggaagggctcgtgcacacggccgacgtgctggccgccaaagtcgcacatcttaccgaaaccggacggatcagcaaacaaagccgcatcctgttcgtcgatgacggttccaaagacggcacctggagcatcatccgcaatctgcacgaacgcgacgcacacttgttcggcggcgtaaagctctcccacaaccgcggccatcagaacgcgctcctcgccgggctcatgaccgcgcgcgcctacggctgcgacgccgccatctccatggacgccgacctgcaggacgatgtgaacgcggtcgacgggttcatcgacggattctgcaacggcgacgaggttgtctacggagtgcgttccgcacgcaagaaggacacatggttcaagcgcaccaccgccgaagccttctacaaggtgttcgagtggatgggtgccgagacggtacccgaccacgccgattaccgtctcatgagccgcgagacgctcgacgcgctcagcgaataccacgaagtcaacctgttcctacgtggcatcgtgcccacactcggctaccagaccagcaaagtctactacgagcgcggcgagcgcgaagcgggcgaatccaaatacccgttgaagaagatgatcgccttcgcgattcagggcatcagctcgttctccacgaaaccgctgagcttcgtcaccggtgccggactgctgtctatcctggtagcgattggcatgttcgtgtacgtgctcgtctcgctcgggttcggccacgccatcgccggctgggggtccatgatgatctccatctggctcatcggcggactcatcatgctctccctcggcatcgtcggcgaatacgtcggcaaaatttatatggaatccaaacatcgcccccgttaccgcatcgaaaccacactgtaggaggggccggcggccagcggacggcccctcctacagtgcttggattatatctattttgtcctcatcacacgagtcaacgcgtatagcaatgccccctgcttgaggcagaaatgagaccgtcgccgttctcctgccttgctataacgaagaggtgaccattggcaaggtggtgcgcgacttccgtgcggcgctgcccgacgcggccatctacgtgtacgacaacaactccaccgaccgcacggccgaaatcgccgccgcgcccgacatggtcgccaaggtgctcgaaggctacgatatggtcatcggcgaccgcctctcctccacatacttccaggagaacaagcgcccgttccacaacttcggcaaccgcctcgtgcgcggctccatcaaccacctgttccgcgcgcacgtcaccgacatcatgaccggataccgcacgttcagcttcacgttcgtcaaaacctaccccgtgctgtcgcgcggcttcgaggtcgagatggaaatgaccatccactcgctgaacaacaacctgcgactctacgagatgccgatccagtaccgtgaccgcccacgaaggctcagtgtccaagctggacaccgtaggtgacggcatcaaggtcatgagcaccatcttccgcatggtccgcgaatacaagcccctccccttcttcggcggattgggcctaatcatcggcatcgtcggcattgtgctgtgcggcaccgtcaccttcgaattcgccaaggccggcgtggccacgcacttccccacgctgatcggcgcggtgatgctggtcatcacggggctgctgctcatcatcgccggcatcatcctcgacgtcatggccaagaacgaccgcaagaccttcctcattggcaccaacagattcgcatacaacaaaagacactgactaagcgccatatagaaacgtgatggggagcgcaacctacggttgttgtgtccccatcttttagcgtctagctcagactgtgaaaaacaatagaaaagcagaaagaacagcattgtggtatccatgccaccaaaactaccctaccgtcgtcaccgcctaacccgcttcacccacaccaaacagcgaaaggccgatttcttttatgcatcactactaccaccaacacctcacatatagtgggacatatgtctgatgcttccgatgcctctgatgctgtttctgctcctttgactgtgttctcacgagtggcggcgaacgctgcgtggaagcggtgattctgctgatgggtttcgtgctgattgcggtgacgcctgccgggcatattccagacgtatgggcgcacacatatcgcattgacggcatcgttaacggggatgtgctggctcggccggtcgactcgaccagcatcctgcattcgggcagcggcaatgtgggcgggtgcgtgagccgtgattggatccggttctccatcgaccattacgacggttacgatccggctgccgtcaatgccgattttcttgaacggtacggcacgggcagcactgcagcgggcagcggcacgaacagcaccagcaccgcaaacaccacctgcgtggacacgccctacaacaatgcagcggttaattcacccttcgcctatctgccgcaattggccgcctttgccataggagcagactcaacgctcacccctggcaccacatacgtactcgcggaagtaatcatgttgctggtgtacgccggttgtatgttcgccgccgtagccgcactcccccgctggcgcttgcctacggccctactcttggtctcaccgccgttgatcttccgctattcgttcgccatctcggccgattccatggcacaggcgctgtgcctattgttcgcgtgtctgctgttttcctgcatggccgatccgcgtgccggcaacggacgattgaccgcgctcatgaccgtaggcgtgctgatgggcatgtcgaaattcacgttcaccccgcttctgctgctgggattcctggctttgataccgtggcatagcgccgtatccaaatctacagccgtaccttccgcagtagacgctgcacgggcttgagcaccacggtatcggcaatcaccgcaaatagcagcgccgccagcaacgtagcgccaaacatcaacacgctgatacccgcatacgaccatccgtccgtgggcgcgggaatccgcgggccgatcagcaccttggacagcggtgagtgcaccaagtaaatcgtgtaggaatatccggccagccagataatcgccttacgcacccgcgccgacgtgatgtgcacgtcgtaccggaagaacaggaacgtcgccattaccaccatcgcaaacgcaaccgtgaccgtgcggccaacctgcatctgctggccggcgaacaggtacggcgtggcgacggtccaggccaggacgaatggtgccaacgcatacacaccgtgccgtatacgcgcggacggcggatagtattccaacacgaatcccaacagatagtagaccagcagtccccgccaggggaacgactgcaggaacgtcaacgggtatccggcaagattgcagatctgctcggcggcggccacggcggcggccagaccgatcagcagccaggcacccgaccggcctatcgcgcgcatcatcgcggccagaaacggcgtcgccagcacgaaaccggcaagcatgaacacgaaccaatagacggaatcgtcatacccggaaaacagatcaaacaacgttccagacacagcgccgccaaccgaacgatgatcaatcaccaggtaggcgacgaaccccatgccgcccgcatacagcagatacggcacaatcagcgagacgaaacgtttgtagtagtagcgcacgtacggcgcgaggctgctgggatcggcttggccggcaccgccgcctgcccgggcatcagagccagagcccggcagacggcccgctgagtgggtgctcaccggccggtcggcatcgaatgtcaggttgacccggcccgacaccataatgaacagcggattgcagaccatgaacaacgcgaacagcacggatcgcaccgtttccgcgctgccggcgagggccatcttgacgggcatgtagttgttgatcacgtggacgccgatgaccaggcacatcgccaccacgcgcagcagatcgtagttcacgtcgcgcggcctgccggcgacgccggaaacggtggcgtcggaaacggcgacgccggaaacggaatcgggcatggtcatcacatggatcccgtcagggacttcagatcgaccgggcagctgatctggctcttcagcttgtccaaggtgtccaggccggccgagggatcggaggacgcgcccttatgcgcgtcgttcttgccgccgttcgcaccatcggcgccgttcgcaccatcggcgccgttcgtatcggccgggcactcatccgtcaccttaccgttggagcccgtctcgacgccatccgcattcaccaccggcgtggttaccacgttcagtggatgtgtggcatcgctgctgacccgaacggtataggcaatcgtcaattcttttccgggctcgatccactgctggttgaacataatgtactgacggtcatacaggctcgcggtgttggtaccccatgaatctatatcagcctgcacagcggtgatttcgccaccgtacggggcggtaagcaccacgcggtacagcatgccaccgagcactggattctccgagccgccattaacgaaatcaggcaacgattcggccttagccttagtcagcgtgttcttcatggtgaaggtgaccgtgtattcgtcaccgagctgatcttccgtaaactgacccagctgcgtgttacgcacagctgtcgtgatgcgcttatccagcacgccagaatacagggcgttccggctggccgaggcgtcgccgcaggtttttgtgaccgtggtggaggtcttcagataccaatcctgcttgccttgctgcagctccgaaagatagatgccggtttcaggtacctgactgtcagcagacaactcgccactggccttatcgtcgataagtccggtggcaatcagcgcctcctgctcatccggatcagccatccatagcttgaaatgaccgctagcgctggtatctctgattgccttcaacagcggggatgcggtggaagcattcgcgttgccaagcacatggttcataattgcttgagccgcttcggaaacgaagttgttctgctgctcgaagtccgggtaatccgtgtacaggtctgaagcgaagaacggcaccgtggtggtgccatccagcactcggccgtccgaaagcttgaccttgcctgtggctcccagcaatgcctggaggaatacgggatcgaatgacaatacacccgctacgttctcgtcttcgttgcctttctgatacagccacatgtatttgttcatctgtgccacacgctggaattcggggtcgatggtcgtggtggccgggtactggtcaaaagtgtcgccaaatacctggcgctccttcagcaccgtagcatccattggcttctcaggaatgtcccaaccagaagtggtggcgaaatcaccgatggtaatcgtgcccttatctgccgtgattgcggcgatggtgcccaccatgccgcccgccgaacgcagctcggccgggttctgcaccatcaccagatacgtgcgcttgccgtcctcgccaagcagttgcggtagcaagttaatgaggccatcgtattcgctgagcatcgaatccacggtcttgagcgcagccttttcggattcgagcacggtggccaccttggcgacgctcggagtcggcaccttgttgagcttggtgagctgctgcgagatatccttatgcacctgcttgacgatatccggcatatccatcagggcgctgacgtccaccgagccattcttcagggagaagccctgcaatcgtttggacaggttcagcagatcagtgaacggaccgttgaccagcgtatccacggaagccagcatttcgcgggcagcggtgatgtcgctgccaaatcgcgaatggtcgcggaagaagtcccactgcgggccgttcagctcctcgttgagatcactggtggcattgaccaactcttgggagatgtccgacagactcttatcgctgccgcagccaagtgccgaattggccagactttcggcggatgtcagcacacgctgcgcatccgtggccattctcgagacggatgccgcgtagagcgtgcccacacaggtgacgctggccagcaacgtcagcagcagtacaaccaccactcgcacccatatcggtgtacggctgatcagcgaacggccgtcgccacccacgtgctggggagtcttcaggtttacgggacccgtctgctgatttgcaacgctattcgtagatgcggagcgattggatttcccgttaccggcatggcggcttctcctacgccccacagccttatggctcgaatgccctgaagtgaatcgcatacttatcctacccgaaaatctgctcagctcatactcttatccaacggcgcaaggccacgcttccggatgccggactccgggcgaatccggaatcgcagacatgccggagcacacgtgacgccacgcatatctcatgccagtgtaccgatgccaccgaaatagaccgagggtttatcccataccgggtgcaaatcccctcatgaccaccacatcgctgtcagaatgttctcagacttcattgaggagtataacagtattgcgcaagaaaacggtcactaaacgcaacaatagttaaagccgtattgatttgttcggcttaggagaacgggagaggcaattagatgttcgtcctcagcaacgcctggcgggccctgacacgttctaaaggacgtacggccctgaccgcgttcatcaccttggcggtcaccttcggcacagtcgccggactggccatcattcaagaagataccaacgcacacaccaccgcgtacgatcagcagaaggccacgttggccattcgcccgactgcggctacgtggaagaaggtctccgctacggactcggcttccaccaagcattacatgacgtggacctcatacaccgaatacgccacgctcgtccggtcggccaccaactcgttgaactttacggttaccgaaaccgtgccggcccgcgtgagcggtgatttgaaggccctggacggcggatcgctgggctcggcctccgatgatgagaccggcggccagctcatttggcgagccttctggaccgaggatgccgccaaggccagcgacctcggtaccttcgaaatcgtggacggcaaggacctgagctacgacaacaagtcctccaacccgaacaccaccggcgcactggtctctgaagcgtttgcctccgccaacaacctgaaggtgggcgatacgctcaaggtggcggccgcctcggacgcccagaccacggccgagctcaaggtgcgcggcatctacaagtacacatccgaatccgccgtcgccaatccggtgacggccgcccgcaaccgcgagaacgcgatcttcaccaactatcagaccttcgccaaggccggactcgacccacagtccaacgacaagaccgcctccggctgggcggtgccggatctggacgtggtgttcgacaccggtgatcccgctacatacaagtccttggtatccaccctcaagaagtccaagctgcccgccaagggatacgaggtgtcttccccttcgctggaatcctacaacgcttctctggagccgctggatacgctatcctcgcgcgcgaagaccggcaccattgcgttggttgccgtgggcggcgtgctgttgctcatcctcgtgctgtcaggcgtgtgggcgcccaagcgtgacgacgagatcggcatggcactggtgtccggcgtcactcgcgggcgtttgggatggcagttcatgctggaagtgttcatcgtcaccctgcccttctacgtaattggtctggtcggaggcgcgttcgccgccaagccgatcggacctgctctggcatccggccatgccatcccggtgacatcggacctgatttggaccatggtctggtatggactgggttcaatcctgatcctggcgattcttgccgccctgcgccttgcgttcttcagcgcgaacaagctgttcgccgccgatggcgactggggcaccgtgagcgaggctgaggcgattgaaacggccgaaaccactggcgctgccgagaccgatgaagctgctgaggccaccgctcatgatgccggcgaggccaataagacgaccaccacaaccgacgatgcggaggcacaggcatgagcgacaagaataacgatcaggaactcgagaagaccactgacgcaacggctgacgaagtgacttctgagactgagacgaacgacgccattgaatccgttccagctgactccgtgcagttcagcgtgaccttcgatgacgttgatgacgaaggcactgttgacgatggtatttacagcgcactggcatctgccgaaaccggagcaaccgacgagaccagcgaggccgaagcagacgccatcgcttcggccaacgcatccgccgaagtgaccgagcgcaatgccgcccgcgtcaacgaaacactccgactggccaaaaccgatcacaaagacgcattggccgagcatgcggagcctcagggcaaagcggccgaacccaccatgacgctggcctcgcgtatcgatcgcgtgttggtgggcggcggttccgacgacattctgctcaagacctacccgacctttgccctgaacaaggtgacggtcgccggtcccaagggcaaggtcaacatcctcgatggcgcgaatttcttctgctactccggacacgcatacgcgctgctgatcagcgacgaccccgattcgggcatcaccgccgacgccaaacgtcgcgcgctgatgggcgtgatgagcggtttggccacgccggtgtctggcacggtgatgaacaagagcgccaacattgttgagctcgagcccgtggaactgcgcggccaccgtctgggcatcgtaccgcagctgcacgccgtgcagccgaagctcgacgccgaacaaaacgtgctgtacgccatggatgcgtccaaccgcaacttcctgaagcccaagccggtgatcgcccgcgaactgctggccaaggtcggcttctccgaggccaccagcggcgtggccgtcggcacgttgcctttggtgcagcagcgtttggtggccatcgcccgtgcaatcagcaccgaggccgaagtgctgatcctcgacgagccgacacgagggctgaacgcggatgacgaggtgaccgtgttcgccgcgctggccaagctggcgcacaccggcgacccgaagcattgcgttatcgtgctcactgcatcgcgcgagctcgctgaagcagccgacacactcttcaagatctgatctgtccggcagcaatacacaccagacacaccagcacaggctcctgaagctcacgatgttcggatacataccaaacatcgtgagctttttcgatttcgaggggctgatttgcgtgttccgggaggtctacttccgtttcaaggggctggtcatccgccaaaccccgagtataaacggcttcatgccaacgtcattccgccgtttttacaccgcgtatacttgggcaccagccccttgaaacggaagtagacctcaggaggatgccgaatcagccccttgaaacggagataggcatgtcgagatgtccgaatcagctcctgacaatcctgatgcggctcattgccgcgctaatctgaagataaatctgaccgtacgaggcgaaacctgataatcatgaccggatatattcccacactggagcagatcgacgaattgcaccgcaaaatcgcgccgtccaaggcggcgtacgagctggtgcacacgcattgcgtgattgtggcgaccatcggctgccagatcgtgcgccggcagaacgcgctgttcacgcgccgctgcacattaccgaaggacgcggaggtaccgcccaccgcaggcgtcaccggcggtcatgtgccgccgcgtctgctcgacgagcatttagtactcatcggcggactgctgcatgacatcggcacctaccgcgtgttcaagcatgacggctctgacgacgaaccgctcaaattcagcaagaaacgctacattctgcacggtcttaagggctacgagtatctgctcgacgagggcgtggacgagtccatcgcccagttctgccgcaaccataccggcgtgggacttacgcgcgaggatgtggtgcgccaggagctgccattgccaccagccgactatgtgccgatgaatctcgagcaggaagtggtgatgtacgccgacaagttccatagcaagtcagtgccgccgaagttcctgcaggtcgaggcgtatacggcccgagccgagcgatttggcggagagaacaaacaacgatggctggatctggtggccaagtatggcgtgccggatattccggcgttggcggagaagtatgggatgcggatgatttgaggctcaaggcccctcgtcagagacggcttatgaagctatttcagatagaacggagacggtaggtgccgttgcggttggaggcgatgatcatctggtcgttctccagcacgttccagccttcctgctcatagccggaagaggagaccaccacaccggcggagtcgccgttgtcgtcgcgcagctcacggtagcgcatcacacggtagtcggcggcctgctcgccacggccatactcatcgtagatttccacgatgcgcgggctggtcttctcacgaccggcggcgcacagggcgatgagctggtcctcggactgaatcatgcagttgtagctggacttcgggtaggcttggcgcagttcgcgcacggcctgggccacggcctcgtcgagcgggaagccgaaaccgatgtattccagaatcaccgcgaagaagatagcggagtcggaacggccgccggtggagaggagcacgctgtggttcaccgggtatgagcggttggtgacgatgttgcggccattggcgtccgagatatcgccattgtggatgaagctcaggccgttcgcatagaacgggtgctggttctccatgatgagcggcagattggagcttgccaagcgcaggtgccagatggcaccgcgagacggttcgtcggccag

SEQ ID NO: 1636 - DNA, 2875 bp, Unknown
  R221_24m  MAG No. k141_94088
ggagtgcggtcaaacgcaatttgacgccgaagtgtcgcagacggggtaaatcacccacaccgctccgcatggataccgcggtggcacccggcaacgacatcatgcttccagcacatgcagcactttcttctcgttgtagaacgcgaatacgatgccgcccaagccgcacagcacggccgcgcacacggcggcgatgcgatagcccgcgccggacgccatgccgatggtggagacgccggtgaacagcagcatggccacggactgccccatcttcatcgcaaaggtgcgggccgcgtagaacaggccctgacggtcctggccggtggtcttggagctggcgtcggcgatattcgccacgatggcttgcggcagactgccgaacgcggccatcggaatcgcgccgaccaccgagagcgccaaaccctgggccatcgccggaatgaagccgagcgcggccgaaccaagggcgccggcaaatgcgaacgcacaggtgaagatcacgaaggcaaccagcagcaggcgcttcttgccgaccttattggccaagatattgaccggcagatagaacagcacagagacgccggtcatgagcacgaagtagatggtcgtggtggtttccggcagcttgagcaggctggtcacgaagaacggcagaccggtctggaaggtggtgatggccacccagtagaccacgtcggaacacacgaacttgcggaattcgtcgtcgccgaacgtctgcttcagggattcgatggccgattcggaggtgggctgggagttgacgtagtccttctcgcggatgcccagcggcggcaccagcatgcacacgaacgccacggcggccatgatggtgaaggtcacgcggatggcggtgatacggcccatcatcggcacgaacgcgccccaaatcaccggcgccacgtacgcgatggccgtgccggccacccaagtgaaggagatggcggtggagatggtgagttgctgcttggagtcgtggccgagttcggcgatgagcgcgttgtacggcgtgcagtagaacgtgaggacgatgtagtagccgatcacggtgacgaacaggaatgccgcgttgacccaactggtgccgttgatcggactccagaacacgagtacggtgaccaccgcgagcggcagggcggcgaatttcaggaacggcatacggcggccggatttggcgtcgcaacggtcggagagggacgccacggccgggtccacgaacgcgtcgaagaatcgggcgaaggcggtgatgccgcccaccacggtcacgatgccgagaacgaccaggccctgcggcacgaatacggtctgaccttgggagatggtctcctggtcaggttggtagaaatacacgagccagttggagatgatgccggaaagcagcgcccacccgaactggccgaccgcaaacgcccacactttggcgatggggagatctttgatggctgatttcgccggtgcaacttgcgcgcccgttacacttgctgtagtcgtattacccattccccataacctccgaatcaacattgacacagtgtcaaaaaccagtatacaccggggttttacactcaattccctgcagggcaaaaccgcacaccacaatccacaccccgagccgccttcccctcagccatccgcaggctctacgatgagagccatgactggtctggccgaacgactaccgcacgtcgccgctttccccgaagcgctgggcaccgggttgctgctgcataccgatgtcgcgctggatgacgggctcagtaactgcatcgatatgttcatcagcacctatgaagccgcattgtcccggttcaaggatgattcgacggtcggccggatgcgcacggccacgcatggcggcacgttcgattttcctgactgggcattgggtttatttggcctgtacgaccagctgtttgcgtcgactaatgggaccatcgacccatgcgtgggcgaggatttgattcggcttggctatgacgagtcgtattcgtttacgcctgcgccagatgccgctgaacatgcaggcgcgatccacgaacgagccatttggtcagccgacgttgagcggcatggcacaacactggtgacgcgcggaccggtcgcgctcgatttcggcgcgtgcggtaaggggtatttggtggatttgcttgcggggatgttgggtgatggcgcgggtcaccctcaacccattcaatacgtcatcgacgccgggggtgatttgctagtgcacacggacgaaccaatcaccatcgcccttgaagatcctgccgatccggccaacgccgtaggtacggtcgaaatcagccacggcgcattctgcgcgagctcccccagccgccgccactggtctgacgccgcaggtcaccaacttcaccatctgctcaacgccatcgacggactaccggttgacgatgtagccgccacatgggtggccgtcacgccgccatcgagcgccataaccacgaagacatcgacgcatggcagcaatgcctcgacaacggcaaaccgcgataccgacgattcgtcgaacaccgtcgcggcacacgtccctgtcacactggccgacggcctcgccaccgccctgttcaccaccccggccacccagctgcgcgctcacttccccttcgaatgcgccattctcaacgccaaccgcaccgccgcccaatcccccaattttcccggcggctttttcacacactaatgtacgaaatcatcagtatcacatccctcggatggaccgatgggttgctcccctcagtcagctacgctgacagctcccctcggagaggggagccgagtatcgctaatccgctaatccgctaacgcaggaaacaatccgtcagtcagcgagtgcgaa

SEQ ID NO: 1637 - DNA, 29965 bp, Unknown
  R221_24m  MAG No. k141_94133
gccttgccgccagtggccttgtcgacttcggcataagccttgagcacggcgatcacgtcatgcgccacctgatagacggtgtcctcgtacacttcgcgcacatcgagcaccgcattggccaacgcctcatcgtccgagagcctgtcgacattcggcatcagccgtttgaccgtggccagctgcaggtcttcgaccagatccttggtggacttgtacggagcagaagccagcatcaacgcctcggtacccagccagcgcgacgaaatgcgttcggccggcaaccgcagcgcatccaatgcgccacgccagagcatcgtggcccgggactcggtggtggcacccgccttatgcaacaggttcgcctgactgaccagcttgccctgttctccagcctgatcggcctgcttcttgaccatttgacgggccgacgcctccgcctgcgcggcgaacttgcgttgcagcgccttcagatccttggacacacccagcaccttgacggggccgcgcgcatgccggcgtccacgagggtgcttgccggccggcagttgctgctccaccgagaacgtgaccctgagatacggggaaagacgctcgaccagttccggccccaacacttcgggatgaatctgcgcacccttggtggcgatggccgccttggtgaacacatgtgccaaatcaggccagccaacggtcgtgccatcctcatccaccggcggcagatccggcttctgctgcgagcccgagcccggcagatccgggtaatgctcgtcgatccagtcacgaatcgcacgcgcggcatccggggccggcacgaactggacgcgcagctgcttgggcagcgccttgatcatcgacagaatcagctcatccaacaggcccggcacattccatgtgaactggtcgggcgtgatacgcgagagcgccttcaacggcacatgcacggtgacgccgtcggccgggtcggccggatcgtatacgtagctcaaacgcaggtcgatgggttggccgtccgatccggtcgtatgccaatggtcggggtaatcgtccagactcaccgaatcgctggatgccagacgctccaccttggccgggtcgaaatcaagcagattcggctgacggtcatgctcggacttccaccatttcgccagatcggccacgctggtcacatcgttgggaatgaccgcgttgtagaagtcgaacagatcctcgtcggacacggtgtccgccagctggcgggtgcggctcgcgtcatcggcggcatcctcgagaatgtcacggtttttgcccacaaagtcgtcgtaactgaagcgctgctgaatatcgccctcgaccagaccctggcgaatcaggaagtcgcgcgcctcaagcggattgatgcgtccccactgcacggcacggtcctgtacgatcggcagaccatacagcagcacgcgcgcggtggccacagccgagccacgcgaacccgaccagtgcggctccgcatacgtggtgcgggtcaattggccggccaacggttcggcccacgccgggtcgatggccgccgaatagcgggcccacaggcgagaggtctccaccagttcggtgctcatcacccatgacggggtcttcttggccacggcggaggcggggaacagggcgaaacgggtgccgcgcgcgccctgataatcgttcttcgactgcttctgggcgcgtttcatcgcacgggcgcgcgccgcaccggtcagccccgcgaaatcggaggccttgggctcacgcaccacctgcatgcccatcatcgacagcaatccggcgagcatcgacttgtggatgccatccgcatcccacgagcagcacagcgaatgcgcggcctgctgattcaacggcagctggcgaatctccaagcctgggcgggaggcgggcaacgggtcgccgaccttgaacttcagctccttgcacatctggcgtagctgggagacgagatctttccactggcgtatcctcagccagctgagatactcggttttgcagatacggcgcagcgcgttgttgctcgggtcgccgtccgcttggaacacgcgatcccagatgttcagggccgtcaggaaatcggaagtctcatccgcatatcggttgtggatacggtcggcatcctcacgcttgtcgtccgggcgttcacgtgggtcctgcaagctcaagaacgccacgaccacgagcacctgggccagaagattcggcgaaccggttttcgcggcctcgataaccatacgtcccagacgcacgtcgatggggatgcgcgccagctgacggccggtatgggtgagcgtcacctcgccgcgctttcggccgatggccttgagctcggtgagctcattgaaaccgtccgacacggccttcatatccggcggatcgatgaacccgaagttcgtgacgtcctcggccgtgcgggccacgcccaccgacagcatgtgaagcaccacggcacccagcgaggtacgcaggatttccggctcggtgaagcgcggtcgggtctcgtaatcctcacgcgaatacaggcggatcgcgatgccgtcggccacgcggccgcatcggccggacctctggtcggcactggcctggctgatcggctcgatcggcagacgctggacctttgcggtcttcgaataccgggagatacgggcggaaccggggtccaccacgtagcggataccgggcacggtcagcgaggtctcagccacattggtggcgatgacgatgcgctgatgcaaatgcgattcgaacaccttgtgctggtcggcggcggacaatcgcgcgaacagcggcatgatctcgatggcgtccggtcggcgcatgtcgtcggcgcgcggaccgtaatgatgccgcagtgcggcctcgaactcgtggatgtcgcgctcgccggaagcgaagaccagaatatcgcggggaccgcgctcatgggaggagtggatcaccagttcggcgcaggctcgagccacggccgtgggcatatcggtgatgccgtcatcggcataggagtcgccggaccggccgcggggccggtcggaatcggattccgcgatggcgctggccagctcgtcgtaatcggcgtcgccggggcgggcgcccaccgcgaatcccggcacttcgcgcatcaacgcgggcgcggtgccaagcggctcatagaccacctgcacggggaaggtgcggccggaaacctcgattaccggcaccttctcatgcaaggcgtgctcgaaatgctcctggaacttgaccgaatcgatggtcgcggaggtgatgatgagcttcagatcgcggcgctgaggcagcagtgccgtcagatagccgagcagaaagtcgatgttaagactacgctcatgcgcctcgtcgatgatgatcgtatcgtattgggtgagtttcggatcgcgctggatctgggcgagcagaataccgtcggtcacgactctcaatcgcgtgctgggcgagctttcgtcggtgaaacgcacctgatagccgacctcgtcaccgagcttcacgcccatctccgaggcgatacgttcggccaccgtgcgcgcggcgatacggcgaggctgggtgtgcacgatctgcttgccgtgcgtgccacggccaagctcaagcaggatcttcggcagctgtgtggttttgcccgaaccggtctggccggacacaataacgacttgggaacgtttgaccgcgctggctatctcatcacgcgcggcagatacgggaagttctgcaggatactcatatttcatgacgaacttcaatgatacggaagcccttggagctcgcgtatttgctcgcagtgaacccctcgccgagcgcatcgtccagccaggggatcagcgaatcggagccgagattcttctgcactacgagataggcggcgccgcccaccttgagcttcggcagccaagccataagcaatgtatgcagcgcttccttgccgactcgaatcggtggattcgaccaaatcgcatcaaacgtgaggtcgcccggcaccgtctcgcagaacgccggctggttctcggcgggcaggggagtgctggactcgtccacctgagccgcatgaatgttcgtgcggccgttcgcctgtgcgttggcatgggtcaggtccagcgcgcgctcgttgacatccaccgcccacacgttcgcttcgggcgactcaaacgccaatgtcagggcgatagggccccagccgcagcccaaatccaggaaatcgccggtaagcggcggctcgggcgcatgcttcagcaataccgatgtaccgaggtccacgcgcgagccggagaacacgccgttcgacacctgagcggtcgcctcatgaccgcgcaacgttacgttcaatgtgcggcgcacatctttcgacgcgggttccgcagagaaatactgttctgccatggtcgctccatttctgcgggattcgccgctctcgtatgccgacctgtatcagccggcctatgccggtacgtgccgatctatgccagcatgtcacctcatgtgatgataataagggaccatagaagaatcgtgaaccattccaaccaaacgaggcgcacttgaccgacaacacccagtacaccgacatcgaccgcggcaacaacgacgttacccctgaaggtgtgctggccgggcagtccgaagtgctgctcgacgacagccagcgcgcgaccggctggcacgaggacgccaaccaggaatgggaggagcgcgaggctcgcaacgagctcaagcatgtcgccggtctcggcgagctgcaggacgtcaccgaagtcgaataccgcaaggtgcgtctggaacgtgtggtgctcgtcggcgtctggtcgtccgccgtcaccacgcaagccaaggccgaggaatcgttgagggagttggcggcgctcgccgaaaccgccggtgcggtggtatgcgatggtttgctgcagcatcgctccaagccggatgcagccacgtacgttggttccggcaaagccaaggagattgccgacatcgtggcgcgtgaggaagccgatacgattatcgtggacgacgacctgccgccgtcacagcgccgtgcattggaggacgcagccaaagtcaaggtggtggatcgcaccgcggtgattctggacatcttcgcccagcacgccacctcgcgtgaaggtaaggcgcaggtggagttggcgcagctcgaatacatgctgccccgactgcgtggttggggtggttcgctgtcccgtcaggccggcggtcgcgcggcaggcgcggatgcgggcatcggatcgcgaggcccgggcgagaccaaaatcgaaatggaccgtcgtgtaattcgcacgcgtatcgccagactgcgccgtcagattcgtgagatggctccggcacgtgaggtcaagcgcggttcacgccgtcgcttcggcctgcccacagtggccgtggtcggctacacgaacgccggcaaatcctcgttgaccaaccgtctgaccggttcggccgaactggtggaaaacgcgctgttcgccacattggacacggccgtgcgccgcgccaaaacccgcgacggacgcgcttacgcctacgtggacacggtcggcttcgtgcgccgcctgcccacccagctgatcgaggcgttcaaatccaccctggaagaggtggccgaggccgacgtgatcctgcacgtggtcgatggctcccaccctgacccgttctctcaggtcgacgcggtcaatgacgtgttggcggacatcgaaggcacggcctcgattccgcgtattctcgtattcaacaaggccgatcaggcggacgaggcgacacgtgaacgactcgccgcactgcagccggatgcgttcatcgtctccgcctataccggtgagggattggacgagctgcgtaccgcggtcgaaagtctgctgccggtcccgcatgtgcatgtcaacgctctgctgccgtataccgttggctccctgatctctcgtgtacgcgaatacggcaaggtggacaaggtggagtaccgcgatgatggcatacagcttgaagcggacgttgacgcccatcttgccgctcaggtggtcgaacagtccattgactaacgtgataaacatcacagtttgtttgtgagcgctaacaaccgttggaaacattaccataccgttatcagacagggtggtgtgctggtagcaaaacgtcttagcgggtttatagagtgaaaaccgttagttacaaggcctgccattcatcagcaggccgcctttgaagagaggttcatccatcatggcggaaactaccgttaagcccacgaagcttgctgttattggtgccggtgccgttggctccaccctcgccttcgccgctgcccagcgtggcgtcgctcgcgagatcgtgcttgaagacatcgccaaggagcgcgtggaagccgaagtgctcgacatgcagcacggctccagcttctacccgaccgtgtccatcgacggttccgacgatcctgagatctgccgcgacgccgacatggtcgtcatcaccgctggtccgcgtcagaagccgggtcagtctcgtcttgagctcgttggcgctaccgtcaacatcctcaaggccatcatgccgaacttggtcaaggtggctccgaacgccatctacatgctcatcaccaacccggtcgacatcgctacccacgtggctcagaagctcaccggtctgcccgagaaccaggtcttcggttccggcaccaacctggactccgctcgtctgcgcttcctgattgcccagcagaccggcgtcaacgtcaagaacgtgcacgcctacatcgccggcgagcacggcgactccgaagtcccgctgtgggagtccgccaccatcggtggtgtccccatgtgcgactggaccccgctgcccggccacgatccgctcgacgccgccaagcgcgaggagatccaccaggaagtcaagaacgccgcttacaagatcatcaacggtaagggtgccaccaactacgccatcggcatgtccggcgtcgacatcatcgaagccgtcctgcacgacaccaaccgcatcctgcccgtgagctccatgctcaaggacttccacggcatctccgacatctgcatgtccgtgccgaccctcctcaaccgtcagggcgtcaacaacaccatcaacaccccggtctccgacaaggagctcgccgctctgaagcgctccgccgagacgctgaaggaaaccgccgcccagttcggcttctgataaaaaatcgctgtacggagcgcctttcacaccgcacaaggttcgaactacctttgtaggccttcaccttgtgcggcacgaaaaatcgcacacgtacagcgattttttataccctgctgaatgcttccagagggagcattttttattcgtggaattcgttggaggagggggagctatagccctcgggctcaagctggaaggtggtgtgggggaccgagaccgggaagtgctcgcgcaggcaatcctgcagttgggtgaggattgtggcggcatcttccatggtgaggtctttgtcgactaccacgtgggccataagaatcggcatgtcggtggacaccgtgctggcatggaggtcatgcacggcaagcacatgcggcacatcttccagatgctcgcgtaccttatcgagatcaagaccatccggtgtttcctccagcagcaccttgaccgcgttgtgcagcagcttgatggcgcgcggaatcatcatcagtgcgatgacggcaccggccacggcgtcgaagccattccatccggtggagatcattaccagggcagaggccaccacagacaccgagccaagtgcgtcgttcattacctcgaggaacgcggccttcatgttcatgttgtcttcgcgctgcgaggcaaggatgaagatcgagatgatatttgcgacaagacccagaatgcctacgaacagcagcaagccgatatcgtcgatttccgctttggagccgccgaacagacgcatgccggcctctaccaacgcatagatgccgacgataagcaatactacggcgcccgcggcagcggtgagcacctcaagcctggcccagccccaagtacgagtgttgttgggcttgcggcgcatcagtatggcggtgattgtggatgccaccagcacggacatgtcggtgagcatatgaccggcatccaccagcagggccagtgagccggttaagacggccgacaccacttcgatgaggaagaccgaaccagtgacggtcaacgtggcaatcagcctgcgctggtgcgcggcagggtttacggatgtggatggtgcgggtgtatgggtatgggccatgtgtactccttcgctctatcgagttgaaaccgcttctcaataccatttgcgatatggtctgaatacgacgaaaccccggcgcgaggccggggtttcgtaagcagtgtgcgactatagcacgaccagcgcgattcagcgcacgctgatcagctggtggcgaacaggctataatttgcgcagtacggtgaccaccttgcccataatcgtggcatgtgtgccgtcgatgggcgagtatgcggggttgtgcggcatcagccagacgtggccgttttccttgcggaaggtcttcaccgtggcctcgtcatccaacagagcggcgacgatatctccgttgacggcggaattctgttcgcgcaccaccacatagtcgccatcgcagatagcggcatccaccatggaatcaccgtggacttccagcatgaacagggtgccggagccggtcagccgttcaggcagacgcatgacgtcgtccacatgctgttcggcggtaatcggcacgccggcggcaatacggccaacgagcggtacgtcatgtgattcggcaatggcttcggcggggaattggtatatctccgccacattgctggcgctggttgcctcttcgctggcttgtgatggcttttcggcattcggggcggatcctgccatcacctcgatggcgcgacccttgttcgcgttcatgcgaatgaagcccttgtcttccaaaacttgtagctgatgcttgaccgaagacggacttttgagcccggcggcatttccgatctcccggaaagagggagcaaagccttgttcgtcgatatgcgtgcgaatggcgtccaacactttgcgctggcggtcggtcagggtggactcgtccggcttctgcttgggggagaggggaatggtgctcacgtcagggctcctttcgttatgtcaccagcataacgtgttgttcgtgtgaaatcaaacatctgttcgagtttcgacttgaccgtgtcgaacatttgtgccattataagaacagttgttcgatagaacatctgttcgagagaggtggtcgtgatgactggttcaatggtgatggccccggcccgtagcgcacgtgtagctatgcagcatgctggaacgtcccgccggaatgtgcgtgggcggattatcgcagtgatgatcgccttggcgctggcctggtgtggtttcggcgcgcttaccgctcagcgggcccaatcagatacgggtgccacgcaggtgaccagctatatcgtgcggccgggggatacgctctggtcatatgcttcggctattacacctgctggccatgatgtatcggaaacagtggatgagctgattacgctgaacaatctcgagtccggaacattgcaggccgggcagcgcattattgttccggttgagtaaatgaaacccgagcggcatggtttttccgcccgtacacgttattctggagagcatgcattgccctttttgccagaaccccgacaccaaagttattgatacgcgcattagcgatgacggtcattccatccgtcggcgtcgcgtatgcccgaaatgcaacaagcgttttaccacggtggaaaccagtatgctgctggtcactaaacgttcgggtggcgtggagccattcagcagagacaaagtgatttccggcgtacgtaaagcctgccaggggcggccggtcagagaagaggatctgaagctgctgggacagaaagtcgaagaggatcttcgctcccgaggccttgccgaagtcacctcagatgaagtgggcaaagccatcctgaaaccgttgcgtgacttggatgtggtggcgtaccttcgattcgcgagtgtgtaccagaactttgcaggtctggaggatttccaaagcgccattgatggtttgcgtgaataatatgcgaatgccatgcaccgtgatatgcgagtgattcgcaaaccatggtgcgaaccaatcatgaagccctgcacttatgaaagagacccgtcagcgacgggtctctttcatatcaatcgaggatgagctgcgtcagctgatgacacgcatgcgaacggtgccctcgatgttgcgtagtgcttcaagcgtggcggcgctgggcttctgagccacgtcggtgaccacatagccaagttcgccttcggtggccaacgactggaaggaaacgttgatgttctcttcgccgagcacgcgattgacatgagccagcacaccaggaagattgtcgtgcagatgggcgatacggcacacgcccttgcattcatctaggttgatctgcggtaggttcacggacaatgaggtagaacccttgaaccagtaatcctcaagacgctgagagacgaaatggccgatggattcctgagcctccaaggtggagccgccaatatgaggagtcagaatcatattgtcttcgttggccagtgaggtctcgaacggatctccgctcttcttcggctcaacggggaacacgtcgaccgccgcgccagacagatggccggaatcgaggtgctgcttcagagctcccagatcggcgacgaaaccgcgcgaaaggttaatgaaaatcgcgtcctgcttcatgtgggcgaattggtcttcgccgaagaagccggtgttcgacttgcggccatccacgtgcagggtcacggcatcggactgttccagcagttcgttgagagtatcgcaacggtgggcgttgcccagtgccagtttctcctcaatgtcgtagaacaccacgcgcatgccgagggcctcggccagtaccgacagctgggagccgatgttgccgtagccgatgatgccaagggtcttgccgcgcacttcatgcgagccggaagcggacttgtcccacaggccatgcttgatgtgatgcgtgtgtgcgggaatgcggcgcatcaagcagatgatgtcgcaaatcaccaattccaccacggaacgggtgttggagtagggggcgttgaacacggcgatgccacgcttgccggcatgtgccagatcgacctgattggtgccgatgcagaagcagccgatggcgcttagcgtaggacgcgcatccagcacgcgggctgtgacgttggtcttggagcgtacgcccaccaagtccacgccatccagcgcgtcgatgagttcgtcctcgctcagggctcccttcatggtctcgacttcgaaaccgtgatcacgcagcgatttggccgcgtcggggtgaatgttttccaataacagtgctttgggcatgcttcataccttagatgttcagggacttttcgtccgttcttgtccgaactataaccagtttctgggtcggcctggtcattgccacgtacaggtccgaggcggcgaccaggcggctcggcgcgtcatcctcgatgagaccgggctcgaccaccacgacggcatcgaactccagacccttgaccgtttcggtgccgcagacgctgatttgctcatcccattcgggctgctcgatgagccttgcgtattcggccgggtcaagaacggcggccagtttgcggcgcacggcgtcgcgcaccggggcgatgagatcatccggacagatgacggcgatgcggccggtgccgtctgccgaaacgaattgttcggcaagctgcgccgcctgctcggccgtcgtttccagcaaggacgacatgtcgggcaccacattgcgggacaccgaatcggggatggtgcgcaccgcattgaccgtggagatgtagaggccttccttctcggcaaatcgtgaggcgagttcggaaacttcctgcggattacggtagttgatggtcaactcgttcagatcccagtggctttcgccgaacaggcggttcatcgatttgctccagcgtcgggtgccacccagcgccgaggtctgcgccacatcgcccacgatggtgaacgagcgggaggggcaacggcggatcaacatacgccagtccatggcggtcagttcctgcgcttcgtcgaccacgatgtgcccgtaggtccattcacggtcggccgcggcccgctgcgcggtcagctcggcgtcgtccccgttcatctggtcgagcagcatctgactggagacgatgcctccacccagaccggtcgcggccagcgtgtctttggcatactgctcttcggcggcacgacgtgcgtcggcggcggactggcgggccaccgtcttgggatcggggcccagcatatccatcgcttcgtcgagcagcggaatatcggagcgggtcagcggggagcccttggggcgggcaagtgccgcgatgtcgttgtcggtcagccaaccagccagagacttcagacgttcgggatgggcgaacagctgatcgatgagccatggggcggtcatcggcagccagcacaggttcagggtcttgcgcacctgctcgttcatacgcagcaacgacatcgcgcggttcagctccgcctgatccggcgtgtaatcaagctgttcggcataacggttctgcatgctggtcagcatcgaacggataaaggtctcgcgggccttgttatgaggttgccgggtgcgcttcgcgtccgcctgcgcctgctcgatatcagtggccagcattggtacctgaatgccgctaatggttactgtcggcagaacagcgggaacacgcacgcgcgcggcgatggcattggccactacggaggtcatgcgtcgatcgcccttgagcttggctgcataaggggagtcgaccgccgtggcggtgatgccgggaatcagatcgctgatggtgcgtgagaccacgccggtctcgcccaaggagggcagcacctgatcgatgtagtgcaggaacgccgagctggggccaacaaccagcacgccggaacgttccagcgtgcgccggtgcgtgtacagcaggtaggcggcgcgatggagcgccacggccgtcttgccggtgccgggaccgccctgcaccaccacggcacgattcatgtcggagcggatgatgcggtcctgctcggcctgaatggtggccacgatatcggtcatcttgccggtgcggcgtgagctcagcgaagccagcagcgcaccctcgccggtcaacgtgccggcggaagacgcctggccgacttggtcggaatgcacgtcgagcacctcatcctcaacgcccacgacttcgcggaaactcaaggtgatatgcctgcgcatcacgatgtcgccgtgattggagggggtcgcctcatagaaaggacgtgcggcttcggcacgccagtcggtcagaatcggctcatggtccgggctcgacaggccgatgcggccgatgtaatgacggtcgccgttcttggcgtcgagacgaccaaacaccagccgatcctcaacgctgcgcaattgcgtgaggcggttttcgtacattgtggcaaaggagtctcgttcgctgcgttgcgtgggggatccgtgggagccggcggcgcgtacggtgtccaggcgttgccacatttcggctcgcagatcatccaatcgtccataggcgcgatcgacggcctgctgctcctcatgcagctgggaggcgtaactcgacatgctgttctcttcgttccatttccgtggggcagaaaaaacttaaggcattcaaatttaccgcacaccccctacgtcagtgatgcggacaacccggaataggtgaattcagcgtgaattcgccatgctgctcggtcggtggagtgcgcaacgtggattggatgtgcggagcgcccattcgtgcgacagtcgtggccgacacgcgcaatccatcggtaattgccctaaaagggtgagcaaatcgtgcatgagtggggagaaatggggaatcgtggggtagagtggtgaaccagttggccgaagtgtatcccacgtaacgatgaaggaggtggagccatggttgccgatcagacgattcgcgacgctgatgccaacgcacaaggctccaccactatggctgatctcatggctggtctgccgccgctgcttctcggcacatatacgccgaagatcgacgccaaaggccgtatggcgctcccggccaaattccgctctcagctggggcagggcctggtcatggcccgaggccaggaacggtgcgtgtacctgctgccgttcgatgaatttcgccgtatcgcctcgcagattcagcgtgtgtcggtgggaaacaaagccgcccgcgaatacctgcgtgtgttcctttccggtgccgtcgatcagcagccggacaagcagggccgcgtgctggtgccgcagatgctgcgcgattacgccaatctgggttccgacgtcgtggtgatcggcgttggcacccgtgccgaactgtggaataaggacacgtgggagtcctacctcgccgagaaggaagagggatattccgatattgctgacgatgtgttgccggaggtggaattctgatggttgatgtggcgaatattcatctgccggtattgctggacgattgcgtgaacctgatggcgcctgccctggaacatgagaacgccatcgcagcggattgcaccctgggccttgccggccattccatcgccttcctcaaagccgcgccgcaggctcggctcatcggcattgaccgtgacagtgaagcgctggggctggccaccgaacgcatggaacgggaggggctcgccgatcgattcatcccggtgcatgccgccttcgatcagctcgatcaggtgttgacggaccgaggcatagaacgtgtggacgccgtattcatggatctgggattatccagcctgcagatcgacgaaaccgatcgtggcttctcctattcgcttgatgcgccgctggatatgcgcatggacggcagccagccgttgacggccgaacggattcttgccacctatgatgcggcggaactggtccgtatattcaaggaatacggtgaagagcgtttctcgcgtcagatcgcccgcgccatcgtggcacgtcgagacaaggagccgtttaccaccaccgcacagctcaaccgtctggtcgatgaagtggtgccgcaagcccaccgcccggcgggcaatcccgccaaacgcgtcttccaggcgttgcgcattgaagtcaacggcgaattggacaagctcgcctccacattgccgcaagccgcgaaccgactgcatgtcgggggacgactggtggtggagtcctatcattcgctcgaagacaaaaccgtcaaatcgttcatggcacaagggctgcgagtggatgttccggctggtctgcctgtcataccgccggatgcccaaccgtttttcacggatctcacgcgaggtgccatcaaggccggcgaacatgaaatcgcagccaacccgagatcggcttcggtgcggttgcgggcggtggaagtcagccgtgatattccgtcacgatggaggaaacgctttacgcaaaccgcgcagggcctgaatgacgtcaagatacaaggctccgcgtctctgggcagagccaaaaacacagcgcgaattcgtacaaggaggggataacggcatatggcaaccgcacgtaacattcgatcgaacgcggctccggcctcgaaccgaccgcacaccaagcatcagtcctcctcccgacctgagctgcgggtggtctccaacccgcgtggagacgagcggggcaatgtcgtcggacgggtcatcgaatggaccagaacaagaagcgcaccgctggtgcacgtggccatcgcagtgatcttcctcgtcggcaccttgttcggtgcgctgatgttgcgtacccagatggtgcagaactcgtttgaggcggcacagatcgaaaccaatatcaacagacttacccaagatgtcgaagacgatcaggccaaactcgatcaattagtcgcgaacctgcccgacaaggccagcgacatgggcatggtcccgcaacagggatcagtgtccatcgacttaagcggataccagtccaacaaaggcggaacccagtgaacaccattcgtcgcatcgtagagttcgccaaggtcaagaccttcgcgttcaaatgcattgccatcggcgccgcattggcgttggtggcgtcggcatgcgtgattcagctggcctccacccagctcatcggcggccgtcaaaccgcacaagcggccacggctaaccgcaccctgaccgtgacgttgagcgccaagcgtgggcgtatcctcgacgccaacggctccgtgctcgctcaaagcgtggagcgttatactatcgtcgccaatccggaggctgcacaggagttcgagccgattacttgcaatgacagcacccgtgattactgccacgaaattgacggcaaacccgtgggtgctaccggagcggcggccgtgggccgactgctggccaaagtcctggatatgaacgccatggaactgggagctgatctgtccggtaccgggcagtatgtgattctgaagaaagacgtgaccccacaggtcaagcgcagcatcgaggcgttgcacctgggcggtattgtctggggtgagctgagcagtgaaagactgtatgcggatggcgatctcatgggcgcgctgcttggcggcgtgaacgacaacggcgatggcgtcgccggcatcgagcaggtcgagaacaagacgcttaccggaaccgatggccatgaaacctaccagcgtggtaatggcggcgaagagattcccggcaccatgaccgaatcggtggcggccaaaaatggcgacgatgtcaccctgaccattgaccgtgatgtgcaatggtatgtcaaaaaggccttgaaggaggccgaatccaagtatggcgcagcgtgggcgatcgccgtggtgcaggatgtccagagcggggagattctcgcactggccgatagcgatgaagtacaggctggtaccgatgcggcgaagatgagcccgtctcgggccgtgtccgaaaccttcgagcctggttcggtgggcaaggtcatctccatgtccggctatctgcagacgggactgcataagatgagcgatcaattgtcggtcccggaccacatcacacagaagggccagacctacaaggactcattcgaccatggcactgagcgctggacgctcgccggtattctgcagaactcatcgaacgtcggcatgattatggccggggagaactatccggatgagcaacgctacgagtacctgaccaaattcggcatcggacaaccgaccggactgaacctgcccggtgaatcgagcggtctgctcaccagcccttcggcatgggatctgcgtacgcgcaacaccatcctgtttggtcagggctacaccgtcaacgccctgcagctcaacaacgtggtggccaccatcgcgaacaagggcgtcaagcagcagcagtcgatcatcagatcaaccaccgatgccaatggcaagaccactgagaccaagaagggcgaagccacccgcgtggtggatgaaaaggtcgcatcggacatgatgaatgcgatggaatcagtggcggagagctacaacaagttcgtcaaggtcgatggttaccgcatggccgccaagtccggtaccgcagaggtgcagggttcggatggcgcgctctcgtccattctctccgattattccgtggtgattcccgcggacaacccgcgctatgcggtcaccgtggtgctgaaggatccgaatggtgtgttcggcggtctgacggccggccctgtttccgcacagatttgtgagttccttatgcagaaatacgaggtgcctgtctccagtccacgaaaaaatgctattccagtcacgtggtaaggatcaggggagaaaggcgatagcccatgagtgcagtgagcgaatccatcgcccagcgggtgaccttgggaatgctggtcgaacggtacggttttgaagtcgatccacccttcgccaccaatgtcaccattacctcactcagcgatgccgtggataccgttattcccggctcgctgttcatctgcacgcatgagcaggaacccgatgtactgcatgccgcacaggcaggtgcctatgcggcgttgctgccacgcgcgtccaaaggacagatcgccaatgccgatataccgttgctctacggcgattgcgacgatcgcgtactcggcgatctggccagcggcctggccggcggaccatccaacgccatggcggtgttcgcggtgaccggtgcggatgagcaggccgttgacgcaggcgtgtcccaactctccgaattcctgcacatgctgggcaatccggtggcggtaatcaccgcatccgggtccacgtcgatgacacgtaccatgaacctgaactatcctctgggcatcctcgatatgcagcgcgcgctgtccgtgtgcgccgaagacggtgtggcggccgtgatcatcgccatggatgaccgcacattggccgagcatgcgttggaatcggtgaacgtggatgtgctgggcacggaagatgtcaacgcaagcgcaagcttggacgaattgaagacacgctacgcattcgttgcggaacatgacatgtccatgacctcgtcgacacccgaatcggatgaaatggctgcggattcaccggcaatgtacgaccgcgtccgactcgggcacatgtccttggccatcgccatggtactggccgccggcgtgaggaaaaacaacatacgcagtgccctgcatgtggccaacaatctcaattaagtccgtggatgcgggacgaagcgtaatcgtaaaggagtttgaaacaccatggttccgatgagtgtggaggagatcgccaaggccgtcgatggtcgattgatcggagacgccgattccgagtctcgagccaccaatacggtcagcgactcgcggcaggccggccccggatcggtgtttgtggccatccgaggcgagcgtgtcgatgggcatgactttgtggcgaaaaccgctgaacagggagccacggtggccatcgtcgaccatgaggtggagtccgatggcctgccgcagatcgtagtgaaagacacggtcgacgcccttggcgagctcgcccgacacaacatcgttcgccgccgcgagctggacggcgacttcgacatcatcggattgaccggttcggtgggcaagaccaccaccaaggatctgctctcctccctgcttgccaccgtaggcccgaccgtggctccggtgggatcgttcaacaatgagatcggcctgccgctcactgcgttgcgggtcgatgagcacacccggttcttcgtggctgagatgggtgccagccatatcggcgaaatcgcgcgactgacccgtatcgcaccgccgaacacggcaatcgtattgaaggtcggcgtcgctcaccttggagaattcggctcccgcgaacgcatcgcacaggcgaaaagcgaaatcgtgcagggactgcttcccggaggcaccgcggtactgaacgccgatgacgaacacgtggttcccatggccggcctggccagcggcgatgtgctgtggttcggcttgggatcgtcgcaggagcccgaggtgcgggccattgatgtcactgccgaccggtccgatcatgctgaattcacgttggtcgatgcggacggcaaccatacgccggtgcatctgggcattcctggacgtcacaacgtgatgaacgcgttggccgccgcaaccgtggcgatgcgttacggtatggcacccgaaacggtggcgcggattctggcctcgcagcacaccatcagccctcatcgcatggcattgtccacggtgaatcgcgaggggacttccttcacactgatcgatgattccttcaatgccaatcccgactccatgaaagccggcctgaacgggttgaaggcttggaactcaaatgacggcaaggatccgttccgcgtggcgctgctgggtgccatgctggaactcggcgccgatgagacggcattgcacacctctatcggcacgtatgcggccgaattgggcatcgacgcgatcatcgcggtcggttccgcccaagaccaacatctcgatgcactggcacaggctctggcggacggtgcccgtcagagccaatccgcgtcggtggattgcgtacacgacatcgatgcggccgaacagctggtcatcgacttggcgcgcaaccattccgacgctgtggtactgctcaagggatcgcacgcgtcaggcctgagcgctttggctgaacgctgggcaaagaactgacccgataaccaccccaagaaaccgacaagaaagagaagctgcacgtgattgctctgatcattggaatgctggtgtcgctcatcgtcaccttagtcggcaccccgctgctgattcggctggtccacaagctgcactatggccagtacatccgccaggatgggccgcagtcgcatctggtcaagcgcggcacccccacgttgggcggcgtggtcatcaacttcgcgattctgctcggttgggcatcctccgcactgtaccgatacctgcgttcgggcgacgtgccctcctggtccgcggtgctcgtactgttcgccatgctgtcgatgggtctgctgggctttatcgacgacttcgccaaggtgcgtaagaagcagaacgaaggcctatcggtgggcggcaagttcatcggccagttcatcttcgccaccatctacgcggtacttgcgctgctgattcccaccaaatcgggattccccagtgcgcaggcgggcatcagcttcatcgaacagccgttcttcaacttcgacttcgccggccgtgccgtaaccatcatcctgttcgtcatctgggtgaacttcctgatgaccgcatggactaacgcagtgaatctgacggatgggcttgacggtctggcggcaggttcgtcgatgatcgccttcaccggttttggcatcatcgcattctgggaaagctaccacatcaagggcggcagccatggcggctattcctatgctgtgtccgatcctctcgatctgaccgtcatcgccgtatgcgcggccgtcgcctgcttcggcttcctgtggtacaactcgaaccccgcatcgattttcatgggtgataccgggtccctggccttgggcggcctgttcgcagccctgtccatcgccacgcacaccgaattcctggcggtggttctgggtggactgtacgtcatggaagccatgagcgacgtcatccaggtcgggtacttcaagatgacccacaaacgtgtattcaagatggcaccgatccaccatcatttcgaactgaagggttggaccgaaaccaaggtggtggtgcggttctggatgatcgaactcatcttcgtgctgctcgccctgacgattttctacggcgactgggtcacccgctccggcctgctgttcagctagcggaaatctgggtgggattatgctcacccacggaattcctatatcaggaggaacaatgcaagtagcggataagacagtggtgatcgctggactgggtgtgtccggcacctcgttggcggaggtattgagggaatgcggcgcccacgtgattggcgtcgacgagaggaagcccgaggccggtctccgctcctttgatgacgtggactgggaccatgtggactacgtcatgtcgtccccggtgttcagcccccgcaccccgttcgtgctggaagcccaacgccgtggcatccccgtgatgagcgaggtggaattcgcatggcagctgcgtatgaataacgagcgcaccggtactccggctccatggatcggcatcaccggcaccaacggcaaaacctccaccaccgagatgacctcggaaatgctcaccgcctgcggactcgatgcgccgaccgccggcaatatcgcctccggagacatgagcatgagcctgtctcgttgcgccaccaatcctcagcacgacgtactgtgcgtggaactgagctccttccaattgcacttcaccgattcgctggcacttgactgcgcggcgatcaccaatatcgccgacgatcacctcgactggcatggcgggcgcgagaattacgccgccgacaaatccaaggtgttccacaacgccaaacgcgccatcgtctacaatgcgcaggacgccaaagtcagcgaactggcggccgaggcccaaaccgccgaaggatgccgcaaggtgggattcacgctcgaggccccccaggccggtcagatcggcattgaagatggctggatcgtggacaggagcggcgtggccggcggcgcagtgggggagccggtcagactggccgccatcaccgatttcacgcatctggcagagccggacggctcactgtacccgcatctggtggccgatgcattgacggcattggcgttggtgctgggacttggcgctgatcgagataccgcgttggaggcgcttacctcgttcaagccgggcggccatcgcatcgaaaccgtggctgaggccgcagtcgagggcggctccgttcgtttcgtggacgattccaaagccaccaacggtcatgcggcacgcgcctcgctgtccagcttcccggccaagtctgtgatctggattgccggaggtctggccaagggcagtcgattcgaggacctggtcaaggaccaggcacataccatcaaagcggccgtcatcatcggcaaagaccagcagccgatggtcgaagcgtttgccagccaagctccggacatcccggtgaccatcatcgatcccgaagacaacgataccgtcatggatcgtgccgtcgaagcctgcggcacgtatgccgccgccggcgacatcgtgcttatggctccggcctgcgcctccatggaccagttcaagtcctatgcggatcgaggcaatcgattcgccgccgcagccaagacgtggagcgaggtgcatggcctccactgatacccataagcgtaaggcatacagagcccctgacaggcccgcactcgagatcaccgactacacgggttggcgaagcttgctcaacccgctatggtgctaccacggattccgcatggccgtggtggggctgacatgcttcggcctgatcatggtgttctccagctccacggtcaccatggccgcactgggcaagtcgccgttccttcagcttctgaaccagggcgcgttttgcctgatcggcttggtgctgggcttcgtggcattgacgatgccggtgacgttctggaaacggaccggcgtgttctttgtggtgggtgcctgcctgttgcaggcgctgacctttactccgctgggtatcgacgtctacggcaacaaaggttggctgaacctcggcttcaccactatccagccggccgaattcatgaagttcgcgatgtgcatatggctgccctcgtcgttgcatgcctgcagcaagatgtaccacaagaagggaatcaaagcatatgccgcgccgttggtgttgtatgcgataggcgtggcgctggtgatgggcggcaaggacctcggcacggccatgattctggtctccatcggaggcgtggccttcctgatcgtcggattccccggcaaatggatgggaatcggcgtattgggcgcggtggttatggtcggtgcattggcggtttccagcccgaaccgcatgcgtcgtattctggccacatatggtgattgctcggccgctgacgcgcagagcgtatgctaccagtccattcacgccaagtacgccatcgcctccggaggctttctgggattgggcatcggcaattcgcgtgagaaatggaattacctgccggccgcccataacgatttcattttcgcgatcatcggcgaggagaccggattcgtcggttgcgccatcgtattgctgttcttcgcgattctcgcctggtgcatgatcgtcatcgcattgcaggtcaccgatcgttatgttgccatggtgctgatgtgcgtcaccatttggatcgtgggccaggccatggtcaacatcggcgtggtcgtgggtgtgttcccggtattgggcgtgcctatgccgttcgtctccgcaggtggctcatcaatgatcatgtgcttgacggcggccggactggttgtgggacttatgcgttctcaaccgcagataaaacagtcgcgtcagagcgcgtaagtagactcggtaatcatgaatcaaggcacaccacatatcgttcttgctggcggcggtaccgccggacatgtcaatccgctgctcgcggtcgccggggcgattcgcgacatcgaacccacggcacaggtcaccgtcatcggcactgcggtgggtttggagaaggatttggtgcctgaggccggctacgagctcgacaccatcgaaaaagtgccgttcccgcgtcgccctgacctgtacatgcttcgcttcccggcaaaatggaagcgagaaaccgccaaggtgcgctccattcttgaaacgcggcatgcggatgtcgtggccggattcggcgggtatgcttccgcccccgtctacgccaccgcacacaagatgggcattccgattgccatccatgagcagaatgcgcgtgccggcatggccaataaactgggcgctcgttgggccgatttcatcggtaccgtgtacgaaggcaccggtctcaaaccgcgtgccggagccgacgtcgagcgtgtcggtctgccgttgcgcccgaccatcgcctccctgaccaaacgcatcggtgacgatcgtgccgccgtacgccgtgaatcggccgcgcagcttggcgtcgatccgaaccgtccgctggtgctggtcactggcggatcgctgggagcgcaaagcctgaaccgcgccatcgcctcctccgccgcagacctgttggcccacgcacaaatcatccacttgaccgggcgaggcaaaatcagcgaagtacgcgaactggtcacggcctcggccggcgcggacgtgcttaccggcatcggccccgaatcggccggacaaggtgactaccataccgccgaatatctggaacgaatcgatctggccttcgcctgtgccgacttggtgatttgccgcgccggagccggatcggtatccgagctggctgcactgggtctgccggccatttacgtgccgctgccaatcggcaacggcgagcagcgtttcaatgccgagccagtggtgaacgccggcggcggccttctggtcgcagacaaggacctgaccccgcagtgggtgcatgagcatgtgcccgatctgctcgccgatcacgaacgacttgccgaattcggccgcaaggcatgggaatacggcatcagaaacgctgccgaaatcatggcccggcacgttctgcaattagccgaaccatccaaatagtattcagatatcatcccgtgcgcgatacagaccaatcccgtcccgcaacacgagatacggtcataatatagggtgctggaatccccaaaggagttttgaattgtctcaagatcagcccatcgtgcttgaccccacgtatgcctcgttcgatgctgcggcccgccccgcggatctcggcgccacccatttcatcggtatcggcggcgccggtatgagcgttctggccgaaatgctgcacgccgaaggagtcgcggtggacggctccgatcgcgcacacagcgccaaaaccgaccgacttgaaacgctgggcatcaccgttgaattcgggcagcgagccgaaaatgtcgcccaggccgagaccgtggtctactccagcgccatcaaaccggacaatccggaaatcgtcgcagcgcacgcggcaggcaagcgcattgtgcatcgcagtgacatcctcgctctgctcatgaacggcaaacgagccgtcaccgtggccggagcgcatggcaaaaccaccaccagctccatgctgtcccacattctggtgaacgccggtgctgatccaagctacgccatcggcggctttatccaaggcccggacggcaccacgctggacggtggacacgcgggcaaaggcgatattctggtggccgaagccgacgaatcggacggcagcttcgccaaataccatccgaccatcgccattatcaccaactgtgaagccgatcatctcgaccattacggcgacgaagcccactaccgtgccgcgttcgttgcccacgccggccgggccaccggtcacgtgatcatcagtatcgacgaccccgacggacttgccgtgctggaggccatgcccgccgacgtgaaatcccataccgttgcctacggcactaccgcgcgtgaatccctgcccgatttgggcggtgccgcgtatgtctggatcgcttcggaaagcgagaccgcaggcagcggcgtcgaacagctcaccctgcatctgccggccgcggtgacggcgggggagccggtgtctcagagcgttgccctgaaggttcctggcgtgcacaatgcgcgcaatgcggccgccgccatcagcgctgccgtgctgctgggcgtgagccccgcagacgcggccaaggcggccggcacattcctcggtgcggcacgccgcttccaggtgcgcggcacggtcaagcaggtcactgtagtggacgattacgcccaccatcccaccgaaatcgcggccctgctggatgcggcccgacgccggtaccccgattcgaccattcgtgtgatcttccagccacacctgttctcccgcaccaagttcttcgcgcaccagttcgccgaatccttggccaaagccgatgacgtcattatcaccggcatcttcccggcccgtgaaaagcagaccgatttcccggacatcagcccctccaccatcgtggacgcggctgagggactcaaggacgcttccgcaggcacgtggattcagccggtcgaggatatgtgcctggccgccaagatgatggccatgcgtgcccaccacggcgacgtgatcttcaccgtgggcgcgggcgacatcactgacatggatcaggtgctgctcaccgcacttgaggcccatcgggaaagctgcgagtgatgtccgggcgcacggtcagatccgggggcaatgacaacggctcacgtcgttcgtccggaagtccccgcaagccgcgcaccatcggttcacgcggaaacacgggtcactcgtcgaagtctcgcgctccccggtccgtgtcttccgggcatgagatcaacgagccggagatcatcgacgatgtgacggtagccaagggccaggccggtgccttcgtcgatgcacgacggctgcacagcgaggattacgttgccgaaacgctgcaccagaccaccggctccctaggagtcgtatcacgcccgaaagtggtgaatttcaccgaacgcgccaaagaacgcaagcgtgcgaacgtacgtgtcgttgcgttacgcgtgttgattgctgtcgtcagcgtggctgtagtgacggggctaacgtggctgctgctcttctcgtcggtgtttcgtctggaaaccagcgagatcggcgtatccggtgccaacgaatgggtgagcgcgcagaccatccatgccatcgccgataagcaggctggaaagtcgttgttcctggtctccacccatgaggtcacagagcaactcaagtccattcccggcgtcagcgaggccaaggtctccaaacagttccccaagtcgatgagcgtggaagtcaaggcgcaacggcctgcggccatgctgaaaagaggcgataccctgaccgcggtggattcccaggcgcgcgtgttgaactcggtgaagaacgccaacgtggatggcatcccggtgatcgaggtcaaggatatagacgccagtctcaagaaccgttcggtgaaggaggcgctggcgattctgggcgcattgccggaatcgatgcgtaagtccattaccaaggtcaccgctgagacgcaggattcggtgaccaccacgcttaacgacggtgaccgcgtaatcatttggggagactcctcgcaactgaagctgaagctggcggaagtcgaggaaatcgacaagaacatcaccgctggcacggctggctttgccggcaaacatcagattgatgtttccgcatcccagaagcccatcatcaagtgacggcgattcagttggttccgttggttccggggcggcgttcgctccgttggccctgctgacaacgttggtcccgtcaatgccggggcgatgttcgctgccggcgatttgcgcgagtagcgccatagggtgtatgctgaaaagtccggctgaaaagccggaagcttgataactcaagattgggggcgatcggtttcgacggtgacctgttcgctgcagggaagcgtgccgagaacgccgggtccgctcgtggatgaccccggcaaaagaataagtgctaaatctaaccgcactgagttcgctctcgctgcctgattttagtcaggattaaccagtgagcagccgctccgttcactcctcctcgtctttgggaggatgctgagcgtcgtttagaagacttgctgatgcagttgagcctcagggctgcatcgggactttaactgcggatatgctcgccatcagttgtctgcgacatcgatgggggcagaaaaatcgccaacttggccagcagactacgcacgtagaagactgtgggctcggtcatcggaccggggttcaattccccgcgcctccaccaatccgcctcggcggaaacaagccgcttggctttacgaaagtaaggctgagcggcttttcttattcccgtcgattccctcgtattctctcggtttcacgggataatgtgggcaaaatgtgggcaaaaatcgagcccgcgaagccctctgccacaacgcgagaacggccccgaccggcaagtaggccgactcgggttgagtcgtctgcgatgccggacggggccgaactgtgcgtggtggtcatgcggcgaggtcgaggcgctgtttgatggcgctgacgccgatgagcgcgccggcgaggatgccgagcgcgttgagcgtggtcactatcgcgtccacgtgagtccagccccatgcggggccgaccgtactgacgaacagggcgagtgcgggcaggacgatgaggcccaaccatttgaggatgtcgtagacgcggctggggattgcgcggttggcttcgatccgacgacctgcggttttggagaccgccgctctaccagctgagctacgcgcataggcggtcatgccggttgattgccatggcacatgaccattgggtggatatgagtaaagcccctgaaccggttgattcagaggctttcacactaatcctgatacggagtatgccacggggtggattcaccctactcccgcttgtgttttgttttttcaggcggcttggatggtgaggcgtccgccgagggcgtggattaccttggcgatggtctggaagctggggttgccgtccttgctgaggctcttgtagaggctttcgcgccccacgcccgcgtccttggcgatctgggtcatgccccgggccttggcgacgttgccgagcgcggcctgcatgagtgcggggtcgtcgtattcggctatggcgttgaggtaggcgatgatgtcctgttcgttttcgaggtattcgctggtgtcgtagtcggtgaattcggtgctcattgtcgttgttccttgtagtcgttgaggatgtcgtgggcttgtctgatgtcggtctgctgggtgcttttgtcgccgcctgcgagcagcagcatgagcacgttgccctgcatggcgaagtagacgcggtatccggccccggtgtggaaccgcatctcgctgaccgggcctcccacgggtttgatgtcgccgaatggcctgcctgcgagcttgcaggcatcgagccgggcttggatggaggccttcgctttgtggtccctgagtttcttgaaccacttgcggtattcggcggattgcttgatttcca

SEQ ID NO: 1638 - DNA, 19615 bp, Unknown
  R221_24m  MAG No. k141_95289
ggtggcaccgagggcgcgctgcaggcccaggtcatcgaccttgacgacaatgccgtcgagcgcgtgctcgatgtcgccgcgatgctcgccgtagtactcgatcatgtccaggatctcctggaatgaggtcaccgcacgattatgcggggagaccggcacgccccacctggtgtatagatcgtaggcctgcgactggtcggcgaccacgtcatgggtgccgcgcggatggtccggcccccaggtgagctgccccagaccatgcgcatagaagctcaggcgacgggtggcggtgatgcgagggtctttttgacgcagcgagccggcggcggcgttgcgcgggttggcaaagggcgctcgtccggcgtcctcctgctcgttgttcagggtgtggaagtcatcccagcgcatgaacacttcgcctcggatttccacgaagtccggaacgtcttccttggggccgccgaggttggcgggaatggagccgatggttcgcacattcagggtgatgtcttcgccggtaacgccgtcgccgcgcgtcaggccctgttcaagcacgccgttgcgatagatgaggttcagggcgaggccgtcgattttgacctcgcagctcatgggcaggggcttggattcgggccaatcgaggtcgcgaatcaccgaatcgtaccaatccttgagctcttcgatggagaagacgtcatcaaggctcatcatgcggctggggtggcgcacggaggcgaagtcgttggagaaggagccgccgacgcgatgggtgggcgactgcggattgtccaatgaggggaacgccgcttcgagtcgttcgaggcaacgcatgcgcgcgtcgtaggcggcgtcggagctgacgggtgagtcgtcgatgtagtaggcgatctgatcggattccacccatgcggccacgcgagcccacaggcgggcggcggcctcagcggtcatcgtgttcacgtcgaaacggtcgaggcgtatcgcgtcgtcgtcagtgggctgcagtgcggctatccattgttcggagccaggggcaaaacgtgcaataccggtatcaggccggacctcggccacatccccatcgtcgaaatcccatgccagttgttcattcgtgctcatggttgtctatcctagcgggctcggctcccctcggccggctataccgtcaactcccctcaggcggctacgcggatagcgagcgcaggaactgggcttggatgatgtcgatgttgtcgccttcaccgtcattcatgcgggccacggccaccgagagcgtgcgggccggcacgaacatgccctcatccacgcacacgcgggcggcgtcacgcacgatgtcggccacttcgttatgcggccagaccggcagatcatgcgtggcaagcacatgggcggccgtctccaccgattcaggcaccggcatgcactgcgagtccgcacgggaaaccagttcctgcagttcgctttccaacgaaccaatggccccgggagcgatgtgatcgctcataatgtaggctgcggcggctgtgtcgaaccggtcaagcatccattcggcgtacgcgaaccggtagtaggcgaacgcggcatcgtcgcggtccaaggccacgcgcagagcattcaggcaggcggcgcgtgccgaatcccaatcctcattgcgggccagttggatggcgagcttcagatgtgagagcgggtaggcgggcgcgtacgccaccatacggttgaggtgcgggatggccgcctcggcacccttgatctggctcaacacgtcagccagctccatgtgtgcgtagaacagattgtccgggatgagcaccgtacgctcgtccaatgtggcgaacagtcggttgtagaccacgcgctcggcataggagttgaagtatcgaggtacgccatggcctgccgcatacacctgatccaaatgggccacagccgcttcggccgcttcgatggcctgatcggcttggcccgagaacagcatgtctcgggcgcgcagacgctccttgtcaagatcgtcggcaagcgtgaacgtgaagtccggggtgtccttgccatcgatcaacgcactggtgacctgagaggccaaaccggtcagttcgggatcgcatatcgattcgatgatatgcatggctcgctgggccttttccacggagccgagcgacgtgttcctggcgatatcgtggaattcgttgacgccatgctgcagtaagtccactcgctggatagccagtccggcactattctgtgcgcccagcacgtgagcggtcgccgggctgaattgacggtcggccagttcgggctcctcctgggatccggtgggagagaaccggctgtccgccaagtcgaagtcggcgctgatgggtttcaggccgccttcgccgtccacgtccatcatggcaccgaacatgcggtaggtttcctcgggattgtcaagcccatcggtgtccagtcgcttgaggaaggcatcacgggtgaaggtgacggtgaccatattgcgcacggtgggattgcggcgcagcacgctcatcggatcatcgtccatgccggcggccccatcagcatcgtcagtgccgacgccctcgccgccgataccgcccaggtcgtcgcctgcgccggtatcgtccggcatgccgaacgccatttcgtcgatatcgacgcccttcatcaggtcttcgaactgcgaatcgatggacgcggcgccatcggcgtcagcggattcggccgcggcctgatccgtagcatccgcagacggtccggtaccgttgcctgttcccccggccgtgccgcgttcgtcaccggacgtcgcctgcccgaacgtctcctcatgggtgatggggcgggtcgggtcgccatggaaatcaccatctttggggtcggctttggaacccacacgccccaaatcgccactgcgcagatgttcgaaggcgcttagggcctcgctcatcatcgcctcgatggcggaatcctgttcggcaatcgcctcttcaagaccaatggaatcgatgtgcaacgacacctggcgcacggattcgctggtgccgaaactcagcgctgccatcatcaggccgacacgcaggttgtaggcggcgctcatcgacgcgcgttcggcgctgctcagcgcacgccacgtacggcgagtggtgtcataccggctatcgggcatcatcgaggtgccggcagtggtgaagccaatggccacttcacccgaatccaagcgcgaccggaactccacatcaaaccgatacggcaaccgtaaccggcgcaacagtgaggagagggtctgacgatacacccattcgtcgctcctcgccggcgaatacgaaggccgagcggcttgagtgttggtgtcgctcttattggtccgctctacagcgccctcaacactctcagtactttcagcgcccgcagcattcgtcacacccgaatccggcacgttctgctgggtcagcacatctcgaggatcagggaattcactgcgaatctgcccagccgtgcgtgcggcgatatcgaccaggctcagcacggcccgacgctcctgctcgccatcatacgggtcaagcgccataatcgcagggttctcaatgagtttcatgtcgatttgcgcggcctcggcacgggtcaccgtatcttccgtagggttgcgccccaaggaagcgttgcgctccagccaagcgctcaccgcagcgaatcggttgaggttgccttcgatcttcaaggatttcagcgcctgcccgaatgccaaggacttatcccacgtaaagaaatagccgctcgaatacgtcgaggtgtacaggtgcaacggttcggcgccatgcaccgcttccagtcccggcgtggtgtcgagggcgccggcttcgcgcatcagatcggcgaagtgatcctccagaccggaggcccgcatgccgtgggctcgtgccgccaaagtgtcacgcaccgaacggcgaatcgcaccgattggcgcctcacggttgagacggcggaagatattgccggaaccgaatccgatgagcagaccattgatctgcggcaacatatacgtggcgaagaacgcgatggtaatggcatcgcggtattccaaatcatgacgcatcacaggcggcagattggcacgcatctgctcaagcgtgtaccggttgccggccttgagccatgaggcgagccacgtcatgcgtccggtgtcgtcacgccccaccacgccaccggtaatggccttcacgccgtcagcaccatgaccaaggccacgccccaaaccacgcccatgatgcagcgcacttcccaggccatggcctgcacgggagaaaccggaacgtgaacgcggctcgtcgctttcgcccagccgctcaccgtccggcagagtcacttccttttccttgccgaacatgaatcgcgcctgcatatcctgcacgtccatgttggggtcggtgcccacgaatacgcggccatgcgtatcggcgaacgccacctgcgcaaaatgatcgcggtcggggaaaatgccaagcgaaaagccacggcctctggtggagggcagctgcgcccatccaagcaccagcccttccggcacgttctccaattcggggaaggtgcgtcgcttgattacaggactcagcgccactgcatggcgagtcagttcgtcgataatgccgcctttacgctcactggtctcccgcaaggcatcgccgaacggattcgtatcgtgcttcttcggcttggacagtcccagatcggccgcgagcgcgttcatcgaatccttcagcccgcccagcagtggcgtgcggttgtgcttcccatggtccgatgtacgttttggcatgattcacattgtctcttgtttgcccgacatcaagcccgaataaagcctatagaataaatgcgtgcattccatagaccacactcgcgcagaccgtccgatgccgtcgaatcatgaacggcacctgcccagccgcccggatacccggcaccggctgcgtttggtgcgcctgctgatcgccttgctggccgccgtcgccgccatcgccgccatggagtgcatcgtgttcaacctgccgttctggcgtacgctcggagcgagcacggatacgaacgccgtgcataacacgctgggttcgggtctcacgcgccggaatgatggcatgttgaccgtcaccgatccgaccaaggcctatcttgaactgaccgcggacggcacgtcggattacctacgcatcgataccgagagcagcaaggtcatcgataaggcccgcgagcaggccgaggccgaatccaaagcgaacgacgataaggaagtcttcaaaccgctggcgaccattcatgtgcgcgcggatgtcgatggcatcaccggcaaggcccagtcgatgaatcccgacgctattcgcagccattatgtcaaggcgccgggtgccggcatcgtgcgtatttggattcaggaagagcgcggcgcgatcgtaccggtcaccgacgcccgcgccaacgtgcgcgtaccgttcgtcatcaattggatgcgcgtgctcgccatggccttggtgttgctgatgattgccgcctggaggccgggatcgcgcctgtggcgtatcacgcttgacccgtccagcactcggcaacgacttgctttcgtggggcttctggcgattcctaccctgcttatcggcgtatccatcatccacgaactgtggtacgcgtcttcgctcgtcttccacgtttccggcgattacacctatgatttcgaccagtatgggcatgtggccgatgcgctggtcgccggccggccctggctcgacttgccggttcccgaacaactggccgccaccgagcacccctatgacgtagccacacgtgcccagctactcgccaatggagccagtccgctctactgggattacgcgtattatgacggtcactggtattcctattttggcgtgttgcccgcagtgctgctgttcgtcccctatcgtctgctggccggtcataatctgccgacatccgccgccgagtatattctcgtgctgctgttcatcatcttcttctccttgctggtgctgcgcgtcatccatcgtgtgatgccgaagacttcggtggcggccgcgtcgttagtagtggtctcatcgttggtgagcgcgcaagtggggtatttgctgtatcgcacgaacttctatcagataccgttcgccgcatcgctgacgttgacgtcgctgggactatggctatggctcggcgcggacacgtcccgccgtccgctgagaccatcggaccgatggcaggcgggcgatgccaagcctctctccctgccacgactggccttgggcgccttgtgcattgcggcgaatttcggatgccgaccgacgttcaccttggccgcattgcttgcgttccccctgttctggccgcagattcgcgcgctgggcaccggtctgcgcacacgccgcatcaagccgttgcaggcgttgcgcgcgccgctggcggtaatcattcccgccattctcgtcgtgacgcctctgatggcgtggaacatggttcggttcgattccccgttcaatttcggcaatgcgtatcagttctccgtatccgatatgacccggtataccaccccgtccgcggatatgcccgccaacatctggtattacctgttcctgccgctgcgcttcatggatcgtttcccgtggctggcgggctctcccgccccgatgccgcaatggggttattacgaggtgatggtcggcgcgattttcacggccacgccactgaccttgatggctttggcgctgcccctgctgcgcagattggaaacacacggcatgcggccatggctgatgtcttgcttggccgtggcggcggtgctggtcgtattcgacagccgcgtcggcggtttgggatggcggtattccgccgatttcggctggctgatctcgctggcgtccataccggggctactgtggctggtcaatgggcgcgaaccgagccggtcattggcgggggccaacgacgccgcttcaggcgatggcatcgcccgcgtcactccgtggcgttggctgatgcgctgggtcgtggtgctggccgtattgtgggcgctgggcatagccatactgagctgcttcgtgcagtcgcgcagcgattcgatgatcgacaacaatccgacgctctggcatcaggttcaggcatggttcacgatgctctagtctcgtatcggcgtcggatcaggtcctcataaaacgccacagcctcagccggcgctccgtcaaacacgaccgcgtgctcgtccagcaccagtatgcggtcgatggcgtattcgggccggcggatcatatccgtgtcatgcgtggcgaaaatcacctgcttgttgtagctgaacaacgccttggccacatgcgcggtgccaatctcatccaatcccttgctcggctcatccgccacaatcgcactcggctcaaagctcagcgcggccgcaatagccagcaggtgccgtttctcggagtccaattcgccggccttggccttggagacctgcgccaaatcaaaatgcgcgaacagattaccgatgcgcgcatgacgttctgactcgggcaccttgtgctttttcaacgcttcggaaacagcctcggaaatattcgccgcttggtagaaactgttcggaatctcctcgcggcgaactttgccgaccagattatcgatgcgcttcgcgtccttcttcacagccgggtcaagacgttcctcaccgcccgcaatggtcaccgtgccggcgttggccttcaacgaaccgtccagcagacccagcaatgtggatttgcctgcgccgttcagtccgatcacggccacccgccgctcgctgatggtgatgtccgtgggagcaagtcccacgtgcccatcatcatacgtatgcccggcctgttccaaagtgaacgtcagcgatgccgggtgtggcagttctttcggtctaaacaagaatcccatgccgccattgtacgtggagtacaggtgtggtgccggcaaacaccggcctatcgcagcaaagcggcgacggtattgagcacggcgcggatgccacgctcgaattcgtccggttcgggcagcagggaaacggccaggtatccattggaggtcatgtcgaagaagtagccgggctgtccggtgagttggtgctcgtcaatcagccgcaacaccagttcgttctcatcgatgacggaaggcactcgtaacagcacgttccagccgccttcggcccgtagcacgctgaccagcccgttgggatcggcgtcaagcaactcgtgcaacttggccaggttattgcgcacgcgctcccccacccgtctggtctgtgcgggcgcggcgttcaataatgcgggaatccgttcggcgatgatgtcgcccatcggcagataatcgtcggcgatgacgtccagtcgacgctgggcctcggcaacgtcctcggcaggtccggacacctgaatccacccgactttggcgtgcggcgcggccagcattttggagaatccgtctagggcgaaggtgagcacgccgcgctcccccgcgagccgtgcgtcgccggggaaaggttcgagagagtaatcgaagaacacttcatcggcgataagggcgatgccgtgcccacggcacaatgtcacgatacgtgcacgctcggttggttttacgtacgaaccggtcggattgttcgggttgatgagtaccaatgctctgacgcgttcgccaccgggctcgctgagtagccgctcgagttcggcgatgtcgatgaaccaggagccgtcgaattgcaactggtattcgaccgtatcgacgcattcaagccgtgcaatcgactcaatcagcggatagccgggtttgggtgccagcaccgcgtcgccggcatcgcaaagtaacttaatcagccacgaatacgcctcggacgtggagctcagcaggtacagggcgtccgggtcggcgccctcgatggcggtattcacattggtgaaagcggcatggcgctcgttcctgccctcgccggcggcgggcgaagccaactgagggctgcttgcgtctaccacgtttgccgtattgaggaatgcggccaatgattctcgtgccgcacgcggtccacgcgggtcggccgtatacacgctcggcaccaattcgggtgccaacccgtggcgggtcggattggaatcgttgagtttgctgagtgcgatgccgtttgccttggctgccgcctcggccgccgcaatgggattcggcgcagaaatatccacacgagaagagaaatgcacgctcataccctccacgataaaaccacccctgccgagccaggtatatcgaggcctcatatccaccagcatccagcactacgacaatcgtgcggcacggcagcggagtcgtcagacatactatgacttcaatccacatcgaataacggcctagctacattcattaggtcattttcgcgctcattaggtcactactagtcgagcctcacaattgttgatgcttgaaacgccgccattccgagcccattgcaattcaggtttggaatgggagtgacctaatgaacacataatcgacctaatgaacgaattactcattaaaaaaaggccgcccgaaatacttggacggccttacatatggtcaatacggctcctgcgccagcagaaacaactcagctcactgctgcttggtgctggcgtagtaggcggcaccgacgatgccagcctggttacgcagcttggcgggcacaatcggggtcttgatatccacgtacggcaggaacttttcgctctgacggctcacgccgccgccgacggtgaacaggtccgggttgaagtacttttccataaggccgtagtacttggtcagacgcttggcccacttcttgtagcccagttcctcgttctcgcgaatcgcggaggaggcatacttctcggcgtccagatgcttggcgctcaggatgatgtgtccgagttcggtgttcgggatgagcacgccgttgtagatcaaggcggtgccgatgccggtgcccagtgtggtggcgatgaccagaccatcctggcccttggcggcaccgaactggacttcggccaggccggcggcgtcggcgtcgttcaccacgacgaccgggcggccgcaggcttcggagaacacttcagtaacgtccacgccaatccaagactggtcgaggttggccatgaagtcgagcttctggccgggcttgatcggcgcggggaaggcgatgccaacgggtgcggattcaggcacttcgaagtggtcgagctgctgcttgacgattttggccacggcctgaggcgtggagacctcgggagtgagaatcttcaatcgcggctcggcgaaatcgcccttggtcagatcgacaggtgcggccttgatgccggaaccgccaatgtcaacaccgaaagcctgtgcagtttcaatcatcgttgaccttcctttccatacgttttcatcagttcgtagggttgcgcccagtctaacgcgaccatcacgcggacgcgccggacgggccggggcatggccgtcactcaagcggcggcatgggcttccaggtggggtcgtgcatcagcttgcgcgagtcccaccagcccttggcaatctgcaccaaaccggtcttgaggtgttcgcgatccaccatcaccaggcgaatgacttccttggccgcggtgagcacggtgcccagtccaaacaccagcggacggaagtcgccgtaggtcatgaagtaccgggccatatagccgcggttgcgcatgatgtggtaccggttcatgtcggacgtggagttgagctggcgcacgccggcgatatcccagttgccgatttcgcgcgtacggcgcaaaatcacgtcgggcaccacaatcgggttggtgaccttgctggcgcggtagccatacatcgtgtcatcccagtagatgaagaagcgcgggtccggcagaccgatttccgtgaccacacggcggttgaacaggccgccttcgaagcacagcgtgtccatcactcggtatccggccgggccgaatgcggcgggcgcgatcgggttcggaatgcccagcggcacaatgaagtcgtactgccagtagaacgggccgccatcgtaatcgaatcgggatccctgaatcacctcgtgcttgtcggtccacttggacagcttggcaatggcgtccggcagcacggccacatcgtcatccatcacccagaaccatgcggcgcccagatcatacgccttggccacgccggcggagaaaccgcccgcaccacccaggttctcggtctgcggcgcatagaccacgcgctcttcgttgccggactggtcggccacggtggtgccccactggccggtcaccttgccggcaaacgcagcgaccatgtccgccgtctgatcggactgctcattgtccacgatgacaatgcgccacggtgcctgctcaagcgccagaatcgaatcgaacagtacctcgagcagctgctgacgtttgtaggtggtgacgatcagggcaagcttgtcaatggtgttgttgggtttcttcacttcagccatggctcccattgttgcacttgaccggcacaagacgaatttctgcacagtgaaacgcgggttgcgtacgtccggcgcatggcgtatgaataagcctgtcagtttcagggaaggtgcaattccttactggcggtaacctgtaccccgggtttcataacggggatggcgggaagcccgcgacccgcgcaagcggctgatccggtgagattccggagccaacggtatagtccggatggaagaaacgagggctcattatgagcgtatcttcgcgtatccgcatgcaagttgttcgttctgtggcgcccgaggccgagggttcggccagcgcgtccaccgccagcaccagcgccaaactcggctcgcacaccactggtgtggccgattccggccgctggtccacgcgccgtatcgccatgtatgcactgttcgtggcgctggcgatggtcaccagcttcattgaattcccgattacgccggtcacttggctgaagtacgacccgtccggcatcgtctgcctgatcgccggctttgcgtacggtccggccgccgccgcaatcgtgtctgtgctcggctttgtgccgcacatgttcgccgacccgtggggttcgctgatggctgtgctggtggcgctgttcctgtctgtgccggccgcgttcatctaccgtaagatccgtacgcgcaagggtgccgccatcggcattctggtgggtgcggtgctggccatcgtggtggcgctggtgggcaacctcatcgtcacgccgatttacgcgcacatgccctaccaggctgtggccgcgatgattctgccgattctgctgccgttcaacgtggctaagatggcgattcacgccgtgatcaccttcctgatctacaagccggtctccaacctgctgtccaagcagcagtgaccggcctgagacgggcctatgcccgccacgactaacgaccactcaacgaccactcaaagaacaagaacgcagaactccggcccttgccgggattctgcgttttcgcctatcagttacggattgctgtttcatgaccgttgcaccccattccttcgacgccgacgagttccacgattccgccgagcccgctccccccgccgccgtactcaaggacattcgtttcagctatgaccgcggcacttcatgggctttggatggcgtttcgctcacggtccatgccggcgagcgcctatgcttggtcggtccgaatggatcgggcaagtccacgttggcccgtctaattgcgggattgaccgcgccggacggtggcgaagtgacgctactggaacagcgcgtgtacgcagccggcccgaatgccgacgcctatcgcgctgcccgccgcggcatcggtatggtgtttcagaatcccgaggatcagctggtcaccaccgtgttggaggatgacgtggcttttggcccggagaatctcggtctggagcgcgggctcatcggcgagcgcatcgttgattcattgcaggccgtggggttggcgaacttgcgtcagtccgacccgacccgtatgagcggcggacagcagcagcgcgccgccatcgccggcatgctggccatgaacccggcgatgctggtattggacgaaccgaccgccatgctggacgaatccgcacgcgctgaagttatgcgcattttggatgatttgcaggcgcgcggcaccactattgtgcatgtcacgcatcatccggatgagaccgttcatgccgatcgcatcgtgcacatggaggccgggcgaatcgttggtgtcactgcagccgccgataatcgacccccgctagcggaggctgtctcgcaaagcgagaccgagggtggtatcggcacagaagccgcccccagtcgtcctacgaacgacagcccccgccagcggaagcgcgaagacggctccgaactgccgctgctctccgacggcatcggtgatatgacgaaccccattattcgcgtctcgcatctgacctatcgctatccttcggccaaacgggcggttatcgatgacctgtcgttcaccatcgcgcgcggtgaaaccgtggcactgatgggcgtgaacggttcgggcaagtcgacgctggtgcgcatgctgtgcgcgctggccgcgccgaccgccggcagcatcgaggtggccggcgttccggtggcctcgaccggcaaacgcggtcgcaacgcgcgtccgaagccggcgaatcgcaggcaattggcgcaattgcgccggcatgtgggttacgtgatgcagcatccggagcaccagttgttcgcggacacggtggccgaggacgtggcgtacggcccgcgcaaccaggggctcgccgaggccgaggtggccgaccgtgtgcgcgaatcactggacctgctgcatatcgggcatcttgccgaccgctcccctttcgacctgtccggcggacagcagcgattggtggccatcgccggcgtgctggcctgcaatcctgacgtgctcatcatggacgagccgaccgcgagcctggacgtccaggccaaggagcgcatccatgagctgttgcgcacgctcaaatcgcgcggcgtgaccgtgctcatcatcacccatgaccgagcggaggccaagcatatcgccgatcgcgtggtacgtatgccgattgccggcgcggctggtgctgagagcatctcggcaaccgagactgccttccccgccgagtccgtctcccctgacaaacccgcgcactcggtgatccaccgacttgacccgcgcgtgaagatggtgggtttcctggccgccatgttcacgatgttcgcggtgaacacgcccctccagcttgcgctgggcatcgccatcaccctggccgttatcgcggcggcacgcctgaacccgttacgggtgctcgaatccattcatccgattctgatcctgctggggctgatgggcgtggtcaatctgtttgtggtacgcaccggcacgccggtggtggcgctgggcccgctgagcatcaccgatcagggcgtgaccatagccgtgctgtacgcctgccgtttcgcattggtaatcattctgggcgcggtgttcctcactaccaccacgcctaccgccatgaccgacgccttcgacaccctgatcagcccgctcaaccgactcggcatccacgcccaagaaatcgcgctggtcatgagtctggcattgcgattcattccaacgctgaccgatgaaacccgcgccatcgtcgatgcccaatccgcgcgtggcggttccatcgaaaccggttcgctggcccagcgtatcaaggcgatgagcgcgattatcgtgccgattttcgccggcacgttgcgtcacgcggacaacctgagcctcgcacttgacgcccgctgctacgaggagagcatccgccgcacccactggcgtgccctgaccatcgccgcgcaagatctcgtgttcgccgtcgccgtcatcgcctacatcgccgccatcatcgcgctgtagggcggcaaacagcacagacagcaccggttgctatgctggtgtggttatacgaaagatgtaaggaaattcccatggcattgaccaagaagcaaatcaagcagctgcgcgcgatggcgaactcgctgaagcccctgttctatgtgggcaagaacgatttgaccgagtcggccgtcaatcaggccgatgaaaccattgagaagcacgagctcatcaagtgcgcggtacaggacggttcgggcctgaccgccaaggaagccgccgccgagcttgccgagcagctgaacgccgaagtggtgcagtccatcggcaatcgtttcgtgctgttccgtcgctcccggcgcgacgatgtggagcatatccgcttggtgcgcgagtaatgttcgccccgctcgatcccgtagcttgatatgagtaatggcggttggaatcagtccgattccaaccgccattactcatattcgcccagcgagcaccgtcactgatccaagatggacccgacgattcccgcaacaatggtcagaaccaaggaccccagtaccgaccaccagaaaccgtgtacgaagacgcccacgccgaacagactgaccgccagccagctggcgagtcgcatgaacagccaattgataatcaaggtgaccagcccgagagacagaatcgcaaacggcagtgcgatcagatgcacaatcggcttgattgacgcattaatcagcgccatgaacaaagcgaacgcggcgatgccgagaatcggaggctcccccaccggggtcatgccgggagtcaccgcgaccatgacggcggcggcgatagtcataatcaaccagctggtcaggaaacttttcatggcccaatcgtagcgcggcaggttttactattaggcaaaacgtgagatgatgttgtgcagaaacggtaagaaggtactgccgttcccgattgagaagggatagacccacatgactgataatcaacaacaaccgtacggttcggacagtgttccgcagccggcacaacctgcacagccggcacagccgtcgtacggccaagatgccgcacggcagccgcagggctatggcgccccacagcccgccgcatacgctcaacccgccgccggaagctacggccagcagcagccgcaatacggccagcccgccggcgcatacgctcagtctcagtacgctcagccgcagtatggccagcccgcacagcccgcagcgggctacggccagcagcccggctatggacaggcctaccagcagccgaatgcctacgcacagccgcaatacaccgccgctccgtatgccgccgccccggtgtggcaatcatccaagtccaagttggctgccggcctgttgggcatcttcctcggcggacttggtgtgcacaacttctatctcggcaacaccggcaaggccgtggcccagctgctgctgacgcttgtcggctggattctgctcggacttggcccaatcgcagccgccatctggggctttgttgaaggcatcatcattctgtgcagcaagcccggctcgccgtggcataaagacgccaacggctacgaactatcagactgagactgacctcgggccacgttcattgggcctctgatcaaccacgcctctgcaggtatcatctcgatgccgcagtcgtagcgggatgcgacacgccggccgtgtacatgagttcatgtacacccgatacaggcgaatcagtatcgcacgagattcaacagttcctgctgtttggcatagcgggaaacgttggtcagggcgatgcggatgatgtgttcggaagtcttttccaaatgattgccgccggccacatgcggggtgatcaggcaatgcggctcatcccacaacggactttccgccggcaacggctcaggctcagtgacgtccaatccggcaccgtggagccgtccattgtgcaaggcgtcggccaaggcctcgggatcgatggcgtcgccacgcccggcattgatcacgatggctgtggatttcagacgccccagacgatccgcattcagcagatgatgggtctgcggcgagcgcggcaccgccatcgccaccacatccgccaatggcaacagcgcttccagccgctcgaagccatacatcttttcaatgcccttggccggcacgtccgcatgacggcgcacgccgaaggtacgcatacctatggattgggcaagctgagcgaaatgcgacccgatgtcgccgacgccgataatcagtgcgatgccaccttccgggctcaataccgggccttcatcctgccactgatgatcacgctgattggaggcataccggttgaggttcttcatcaatgcccacatggtggcgaacatgtgttccgacacactttggccatacgcgccgctcgcattggtgaccatggtgccgcgaggcagcacacccgggcggatgtacgcatccacaccggcgctgaaggtctgcaaccattcaagacgggtgtattgagcagcctgcgagaccggaaagttgccgatgactgcggtagcttgggaacgaagctcctcgggaacagcggctgaccataccatgtcgccgcggtgcgcttcatcgcctacgaattcctgcggcacatcgcgagccgccttggcgaaagcccgccgttctccttcgttgagaggcaggcagttgacaatcagcttatgcgtgttctcaatacccatggctcaccaaactaggcggcagggcggatattatcgcgtgtttcctcatgctgaaccaatgccgaacccgccccgccggaccaatgccgaacccgccccatcaaaccccaccaaaccaagggacagcccattgcgcatcgaccgtagcgtccgccccgaaccgtacactcacaggtggttttgtgattccatagcgtgcagccaaggcagtacgattgccggtttatccgcacgcacaggtacctacgccggttggtaaaccttacattccatacattgcaaccgaacgtttaggagcatgtatgcctgagcagcatattgataacgagaagattcccacacgtcttatcggcgcgattgtggctgtcggctcacttgccttcattggcattctgaccgaaaccgtgatgaccgtgcttttccccgcactgatgcgcgaattccatgtcgacacggccactgtgcaatggattaccacgatttatctgttggcggtggccgctaccatgcccatcagctcgtttttgaagcgccgattcgcactgaaaaccatttttcttgcggctgtgattctggccatcgttggctcgctgattatgatcgtcgcccaagccttcccgctgctgattgtcgcccgcattattcagggcattggctcaggcgtggccacgccgttgatgatcaacatcattctggagcagtctcctcgttcgaagatcggccgattgatgggcgtaggatcgctggtcattaccgtggctccggccatcggcccgaccgtcggcggcgcggtgaccacagtgctgccgtggcgcgcgattttcgtcatcgccattccgctggtgctaatcgcagcatgcatcggcatgaagtgcattgagcagaagacaccgaccgaggctgcctatcttgacccgattcagcttgggtccattgttgtcgcgttggtcggtctggtgctggcgctcaaccaaggtggcgtggccatcagtgcggcggtgtccggcaagtcagccacacgctccggcattatcgccattgtcagtctgattgtgggcctcgccttgttgatcgtgttcgccatgagttccaagcgtgccttctccccgctgctgcgccttggcattctcaaggatcccgccgtactgttacacgcctgcgcatatctgctgctgccattggtcgccatcggctacggctatgtcatcaccaatgtggcacagctctcgctcggcaccacggcatttgtggccggctctctggtgctgcccggagcactggtcggcgctgtctgtgccccgcttggcggctggttctacgataagttcggcgcggtcaagccgattctgattccgatcggcatcgctattttgggcccagtgcttatgctggtgttctcgatgcagcttacgcccgtgctgctcgccggattctatttcattttcggtctgttctattccatcggcaatgcgaatgtgatgaccagtggcctgtcggaggtctctcccgagttcaagccggacggcaacgccattttcaacacgtgtcttcagtttggcggcgctgccggtaccgcactgttctccacgattctttccgtggctcaggccggcgcaggagaagaaggcaccgctgagtttgctcacgccactgccgtcggcggcacatggacgtttgccacgatgacggttatctgccttattggctggtgctgtctggccaccgcgttccgcattcgcgcctcacgccggcgcgcctaagaccgtcagtccgcggcccgcgacgcctcccgcccggattcgtcaccgtgcagtatcgggcgaatcttggcaagacgctggctgacttcgtgttcatagccgcgatcgttgggatggtagtactcggtgccacgcagctcttcgggcatatattcctgtggtgccacggcaccgggccaatcgtgcgca

SEQ ID NO: 1639 - DNA, 7896 bp, Unknown
  R221_24m  MAG No. k141_95493
cgtggcaatcgctgaggctatcaacgaatctcccgctgcgttacttcctccccaattcactgctcctgcaatcgctagaggtgcggaatgagttttgaatcgtctttgaatctgaagctcaggctactgctcgacggcctgcgggtcggggaactccaccgcttggacaacgcgatgcttgacccgcaggcgctcgccgacgtgctcggcgcggacgacttcgcccagctggaacaggatatgaaccatgaggcccgactgctccaactcgacgccgtagcccgcttctgcctacaaatccttgactcggccctcatccgtcaaggcgaggatggtctcctgcgccccgtagccgatgaagtgcacggccttggcaagttcccttacctccgcgctctgtgcgctttccttgagccggacggcgatattcgttccggtggcgatgttattcagcgcgttcctgagcaattccctctgggatgcgaccatgatgcttctcctttgaatgcgcgccatgccctttacacggcgcttaccagcattctaggagaaaacgggggcgacagcttctccgccgcccccaccaacactccaacgctcactgctgagaacacccttccggcgctcgccgaaggaggtgcgaaatgagaaaaatgagcaagggcgatgtccgggagtggctgcccggtgagtctcttgaacgggttgacttcggcaacggcgttacgggaatggataaacgctgcccgaaggacgattccgactggggattgaaacaactcatgtggaaatgcgctgcaatcgcggcagacggcgggcctcacgtgaaagtggcattctgcgattattggatcgacggacaaaaggtaccgggacagttccaagtgagctggacgggacatacttcatccaccggcggattcgactcgacatggtcgtatctcaccggactgcagaacggctacctcatggcggatcatcactgttccggcttgtatgccactctccgaagcttcttcagcggcatgttcggctcgtcgtcccaacgccatgagaacaccactggaaccgggccgttggtcacgtactcgatggtctcggacggctcgaacgaatccggaatcttcgttcgcaaccgaagcacatatgaatcatcatcaagcgtcaccgactccacgtacaccctgcgagaaccggtgattgtcacacgtcgtatggatccgcgaacccattccgcctctccgaacggcggcttgtcgaactccgcccgttgcatggcggtctgctcgttcagactgtcggcctggtcgcgcagggcagctatctggcttttcagtaaatcgatgtcatcacgccggtcgtcgtcgcgttccttggagcttctgtgctccatgacccatccggcaatcgtcacgaccagggtcagcacgaatccggcaagctcgacgccatgttccgcaatccaattcatgaaccacacactacatcaatccaacatccttgttctcgctggaggtgcgaaatgagtggccagaatctcgtcgacgttctgcagtttgtcttgattgtcataatcgcgggagtacagattatgcatttctcctatatcaggcgtctttcggacgtgctggaatcttgcctctcccatacacggccatctccgattcctccggacgatattcgaactgattgccgatctccttggacaagagatatttacgggaacagcgtggatcgtgccgatacacgggtgagggacgaaacacgacctttacccagcaagtctcccaggacgcaaaagaaggcttcatcgtgaaaacgacatgttccccggccttgatgcatcccgcctcgaatgtctcccaacactcccactccttgcctgtatccggattgacgccattgcatctgatcagcctcacgtcatacgcatcggcatcaccggtgttccacaactcgagattaagcaccatgtctttcttctcgccggcgaagtacgtgggatgcgcttctccgacgaccagccattcgaccgttctgcgatcccatacacgcagaatcaccgtcaccgcgaaagacacgactgcggagaccagcgcggtcacaagaatctgtcccaaatcaatctgtcccaaaaccatgcagaaaagcgtagtcgctttcctgggcgtctggaacatcgtccaataccttgcaaaggaaggtacgaaatgagtggatataaggcaacccctgcggtgcaagcgcaggggtgtggtcacggcccgttctcagatctgttcgaagctgatggggcatccgggcgtccagtacgcagttacgtcgttcccggaatccgcgagcttgccgctgaagacgacccctccttgcgtcctggtcgacgtggtgagcttctgggagatcgcctgcgtttcggcgtcgtcgaacggtccgatcagctcgtcgttaaaacggatattccattgcgccatgtaatcacctcccttctttgcgtgggtgccctcattgtctcgctcgaactcgccggcaaggaggtgaagtgatgggaaccgtcagcacccgcattgaagaaggggacggtttcaaagtcctgagatacgggctcggaagcatcgttctcatcatcggctatccccagtcggaaagcgacctgatcgacgcgcgagatgccatcgccaaacagttcgattacgaaatcagcatgaacgggcgacggcacggcggacatcgttccgtccgcgccgccgccatgccggagtcagtcgtcgatctcaaccagcgaccaccacagggcggcacgcggattgagatagataagagacccctcggggacaccgagagcccgacctcgaaccgaaaccacgccacccgacgcggcggcgctctccaattcatcgagaatcttcgacggatactcttctcccgctaaatcgacaaaccgtcgcttatcggcggtcgtctcaaacacgagtcgatacgtcattattcttcacctcctctcattgctggtagttaggcaatgtccagcttaggggaggtgggccaacgcataaaaaggaagaaaaccaatgagcgagaaactcaccatcgcgaaccccgaggacgggaaccgtcccctctcctatcaggctctcagccacggcatcgacgaaatccgtttgggtgacatgggcatcacggacgcggtgtggcgcgggccgcacagcgagctcgtggcgttggcccgtcgaatcctcgacgcggaggccggacgatgaacgcccgggattacggacagcacgcgagcggctaccgcaggcccgagctcgacgaattgcctcgcggcttcatggtccggttgattctctgggccgtggttttcgccttctgcatcggctgggtgatgtcgcacgccggttgcgcgcatcccatcggcaatggtttggcctcccttgtgggattcggttgcgcgccattgcggctcctgtgccttgtgctgagcgaggcgggagtcgaataacaggcttgccggggttcctgttctttccttccccggcaatcgacaaggacagtcgttaacaccatcgcgccgcgctcggagcagcgggtgtggcgcatggggccggcaggttcgcccccgctggagatcacggtgtcatgtacgtggcaaacagcgggaagccgttcgattcggcacggtccaccccccatatccaccgacatcgaaggcccctcatacgggccggaaaggagaaccatggccgacgaaacagaacccgcgatgttcgacgcgttggaaaaggcgctgatgccgttgaacagcgcacgccagctggccgagctcagcggcatcggcgaatccacgctggccgaatggcgcggaacgcacacgggacccgcctacgtgaaatccggccgccgcgtcctctacccgaaggaggccgtgctcggcttcatgcgcgccaacctgcgcgaatgcaagaaggccaacgcatgaccggccagccgaacgactacgagcatcgcgccgagggcgagtccacgttcgaatggccgttggattccgcggggatgcgcatgagcgcgggcgaactattggacagcctgctcgccaccatccagcatctcaaccgcacggacgcatggccgctgaccatactgccgccccggttcggcgatgtgctggtcgaccgggaacgccgccagatctcggcggtctgcctgtggaaacgcaaaccagtcaaaacccataaggagggatagatgtgcgagaaacccgaaaccgaaaccgtgacgccgcgggtggccttcgccaccatattgcagtcgctggtggccgattcgccgaacaagccaacgctgcccgtgatgctgtccatgcttgaccaggcgatggatcataccgggctgcgactggagcgcgatgccacgccgacggactatgaggacgatgtggcggaagcgcgccgcggcctctcgcgcaaggcgtatgacgtggcgagcctgctggccgacgtcgcgtccggtgacggcgactgggaactgttcgacctggccgacgaggcacgttccgccgccgttgccctgctgcgcgcgttggacggtgatgcgtgatggccggggagagcgctctcacgatcatcggcaacctgaccgccgacccggagctgcgcaccacgggcggcggcgcgaccgtggcgagcttcacgatcgcttcgaccccgcgcaactggaaccggcagaccaaccagttcgaggacgggcaggcattattcatgcgctgctccgcgtggggcgacatggccggccattgcgtccagtccctgaagaagggcatgcgagtgatcgcccagggccgactgagacagcactcgtaccaggcgcaggacggctcccagcgcacggtcatcgacatgaccgtcgacgagataggcccctcattgaggtatgcgaccgccgctgtcaaccgtgtccaatccggtcgcggctattccggtggctcgacctatggggatccggccaaacccgccaaccagcaacaaggctggcagaacggttccccggcccagaaccccggcatgccggaaggtgacccgtgggctcagccggcacccgcctctcctggcgccacgttcggcgcttccaacgatttttcatcagacagccaagaccccgaattctaaggagattcaatgtcacgaaagaaaaagaccgatggcgtgcaggacgcgctgatacccgacgagatcacgccgctcatgctgctcgccctgacagccaaggcatcacgcatgaaggacgccgcggccgcgttccgcatcgcggccagcaagatgctcgacctggccaccaaggatgaatacatcgaaaaatacaagaacatcgaccccatcaccgacgccttgtacgacgcctgcgatctctcgcagcacatcttcgacgccgccaacgcggtcaacgacctcatcaactatcccgtcgaggcccgcgagcgcgtggtgaaggcggatatcgagcgcagtttgttggatccgtggcgtgatctgcccacgtctggtgtggatccggataccggtgaaatcaaggaggactgaatcatgagcaaacgcaagcacggacgccagcaactggagcatgagcgccaacgccggcgcaggaagcgcatgccgcacctgcccgtacaccagaatctatcgatcaaggagcagtgacccgattcagtggctatcagcatcatcgatatcaacgtaaagagcctcatcccgaacccgaacaatccccgcaaagacgtgggcgatgtcaccgaactcgccgacagcatcaaggagcagggcctgcagcaggcgcttgtggtaacccccgaccatgaggagcacggcgagcgcatgtttcgtgtggtgattggtcatcgtcgtttggcggcgtgcaagctggctggcattgagcgggtgccgtgtgttgtgcgtgagttggatgcgaagaccgagcgtgagctgatgctggtggagaactgccagcgttccgatttgacgccgttggaggaggctgacgggtatcagggtttgcttgacctgggtgccggtgtgggtgagcttgcggcgaagacgggccgttcggagtcgttcgtgcgtggccggttgcggatcgcgcgtatccccgccgatgtgcgttccgggtcggaggcgttcgctcagttgtcgctttcccagttgggtgatcttgcggagttcgaggcttatcccgacatgatggctgagttggcttcgatggcgggcaccaagaactgggattggaagcgtggccagctgcggtcgcgggttcgcgtcgaggcgtggcagcagagcatgagaacagcgcttgaagctctgggcctgactgtggatgtctcggcttcgacgtggacgacgccggagggctaccggttctacgacgtgtggagcggcgagcccgacgagttcgagaaatggtatgggcagtggcgcgagaagaacccgtacggcgggccggtgatccgattctccgagcgcaccgtattgtgcttcccgcaattgtcgcctgaggagatcgccgaacgtgacgccaagagcgagcggagggaacgggagcaggcggcattccaggaggcgctggccgcccgcaaggaattcgacaggctggcgtacacgctgcgcacggactggatcaggaagcacgccaccggattcaacggcggccagttgcgcaaggccaacacccgtctgagcctgctcgcgctgaccggcaccaacctatgcgacggcctgatcgcaggggccgaatggaacaacctcgaccacgtgctcgacgcatacaacctgctcgccgccacgccgctgccatgcgacgacacgagcgataggggactgtggcgcgaaacgaacctcgcggaactgcaccgccgccagcacgtcgagggagccgcgaacagggaactcctgctcatcctgtgcgcccagatcgaagcactcatcaaacccggcacatgggccgacgagtgcgacatcaccatcgcccaagcctactaccacacgctcgcagacctcggataccccaccagcgacgaggaaaacaaggcactcaacgggtgtttcctgcccgaagacgacgaggcgtagtgagccatgacatggacccagatagacgacgggctcaacttcagcccgcagaccatgcccggcacggtatcaaacgccgcgttgggcctatgggtcagactctgcgtgcacaccgcgtaccagctgcgatttcccgcattcgacggcgcattcgacctcacggtcgtgcgctcgctgaaaggcaacgcacggcaggtgacggaactggaggccgcgggaatgctcgaaccggcgctcgccgccggccggtggatggtggtcgaggccgacaccctgatgaaattcggcggcacttccggcagcgaactcaaggagaaaagagccaaggccgggcatgccggcggcgtcgcttcgggcgagtctcggcgaagcaaacgcgaagcaaatgcttcgaagcaaaacgaagcaagtacttcaagcaaaccgcgaagcaagaccgaagcaaaccatgaagcaaaagacgaagcaaacggtgaagcaaaaccgaagcaaacgtccgaagcaaaacgaagcaattgcttcgaagcaaacgaagcaaccggtcctaacctaaccatacctagccttacctcccctgtagccccctccgcaccgaacgccgagccgagccaagccgtggccgaatccggccacgccaggccggtgccgagcctcgccgaagccgaggccttggccgaggccgacccgttcgcgttcgcctgggaccggtacccgagccataccggcagccgcgaccaagcccaaaacctgtggcaggccgtcaccagcggcagcgacccgacca

SEQ ID NO: 1640 - DNA, 2660 bp, Unknown
  R221_24m  MAG No. k141_96993
accatgcgaacaaatatccgtcgcagctttccggcggccagaagcagcgcgtcggcatcgccagggcattggccacgaatcctaagatcctgcttgccgacgaggcgaccagcgctctggatccggaaaccactacggaagtattgtcgctgcttaaacgagtcaataaggacatgggcatcaccatcgtgctcatcacccaccagatgaacgtcgtgcagcagatcgccaaccgtgtggcggtcataagctccggcaaagtagtggaatccggcagcgtttacgacgtgttcgcggccccgcgacagccggtgaccaaacgattcatctccaccgccatcagtggtattcctgaagagtcgcgcatcaacaccatgcatgaggaaaatctcggacacatcgtcacagtgcttattcgacagcatgatgtcgaagagcgtgaagacggtaccgtcatcgcggcatccgggcagaacatctcacaacttatcgccaaacacggcgtacgaagcagcctcctgtacggcggtatcgacactgtcaacggcgtggccatcggagcgatcacctacgaattcggcggagacaatgtcgaatcgttcctgaacgaactggcgcaaaacagcgatatcgtcgatttcggtaccgcggcacagccgacaccatatgaacaggcccttatcaaggccggacaggagcaggcatgacacagattgaaggcgtaaccctcgcaagccgtagcgactggacggtactacgaccgctcctgtttgaatccatcgggcaaaccttggaaatggtgctcgtcaccatgatcgtgggcggtattctcggactggtcctcggcgtggtactctacggaacgcgtcctggcaacctattcgaaaacgcggtcgtttaccgcatcctcgacgtgatcgtgaacatcatccgaccgataccgttcatcatcttcctcgcagccatgcaaccgttgaccatcaaagtcatcggcacctccatcggtacggccgccgcgatcttcccgatgatcatcatgtgcaccatggccacatccaggcttgtcgaacagaatctggttcccgtcgactccggtgtgatcgaagcggcacgagccatgggagcctcgaaattcaccatcgtgcgtaccgtgcttattccggaggcgctcgcgccgctgattctcgcctacgcgttcctgttcatcggcgtgctcgacatgtcggccatggccggatacatcggcggcggcggtcttggtaatttcgccatcgcctacggataccagaaattcgaccagactgtgacttggacggcggtaatcattatgattgtacttgttcaggtggtgcagggcgtcgccaatgccatcgcgaagcacctgctgaaacgctgacagcaacgatgaaagccgcttaatcttaatggagagaagcaaccaagggggattcacacaagatgactgaacatgtcgaaattacgccggaactcatcgaaatccgccattacctgcacgcccatccggagcgcagcttcaaggaattcaaaacaagcgcctacattgagcaactgctcagagcgcacgacatcgaaatcctgaacaatccgctcgaatcgggtgtggtcgggctgatccgtggagaacaacccggaccgcgcatcgcattgcgcgctgacatcgacggtcttcccattcaggaagacacgggattgccattctcctcggtcaacgatggagtcatgcacggctgcggccacgacctgcacatgtcatatctgctgggagcggcattctggcttgccaaacaccgcaaacaaatcaagggatccatcaaactgctgttccagccgtccgaagaaacaggcaccggcgcacgcgccatgatcgacgcgggactgctggccgacgtctccgccatcatcggcgcgcacaacaaccccaactatgcgcccgggcagattgccatcggccctgaccccatgatggccggatgcgtgaaattccatgtcacgctccacgctacgggcacgcatgccggctacccgcacaagggcaccggccctatcgaagcgctcgccacgatgattctcgcgttgcagaccatcgtgagccgtaatgtgtcgccattccatccattggtgctttccatcaccgaactgcatggcggtcatgtatggaatgtggtgccggccaaggcaagtttccaaggtaccgtgcgttacttccacaagtcagacggcatcatggtcggtgaacgcttcaaggaacaggtcaacgccatcgcagctggctacgggatcaccgccgacatcgactgggacgatttccaggatccgctggtctccgacgagggactgtcgaagatcgtggccgatgatgtgcgggaatatgcgcaacttgagccgatccacccgtcgatggcgggggaggacttctgcgaatacaccgaggttgcgttgcccgtgttcgccttcatcggctccaatggtgaggaaggatgccccgactggcacagcccgaacttcgtgggattggacgaatctttacaggcgggcgtggaattctatgccaacgcagcgtttaccgtgttgaacgaacttgcgtaagctggtcgatcttcggcccaattctcctgtgatcgaagatcgctgaagatata

SEQ ID NO: 1641 - DNA, 10533 bp, Unknown
  R221_24m  MAG No. k141_99563
cgatggcgaacagttcaccgagcgacgtggtcaaggcgattatgaccgtactggagcggcattcggccatgagcgtcaaggagatcatgcgcgaactacagttgacgccgctggccgccacatccggtatgcgcgagctgatgaaggaagggcgggtcgcccgagtcaagttcgccgatgacccggtgcagcggtatcggttgaaaggctgattttctcactcggccagctgcgtggtggcgggcgcggccagggtgggacgggatcggcggaaccggccggcggccaggccaatgcagatgaacatcacgccgaacagtgcgaccaatcccagcgagccggcccagccggcgacgcttatgccggtttcctccgccgtgccggagccgagcgcgttgtcgatcgcggtgcaataccaccagccgggcaggaacttggctatggtcaccatcacgccgggcatcatgtcaatcggcaatgcaactcccgacgtgaacatgatgagcaggccgaagatattggcgaatccgttggcagccgcctccgaaaacccgaattcgctgagcatgaatccacaggcgacggtcatcagcgcatatacgcaggttgcgcagaacgtcatcagcactccttcggcgctcaatgtcaacggatcaagtcctgccgcgaccatcagaccgaccgccagcaccagataaccgacgcatacgacgagcgcgaatccgctgagcgtcagcaaccgctggagtcccatcgacgacatgcgttgtggggatgcggtgagacgacggcgaacttccccggtggtgaatatgcccagaatcattgacccgcagacggtcatcgccaaaaacagcggatacagcgcggttttcatggtgttgccgaatccgctggccgccgtgtccgaagcactttccgcgtccgcgcttgccgtgtcgatcacagcgaccttatggttcgcgtccatgtcactcgccgatgcggcagccgctttcgatgcctcgaacagatcgccgacgctgggtttctcaatctgaccggccggcagcatatcaagcatgtcctgattcgagaattcaccaaacccgcccatgccatcttcagacgaatcacccgcagtgtctccaatgtcgataccggccatagctgcgagcgccgcactatcgaccgtcgtatgcgagccaatcagtgccgtacgcgtgagtgaaaggaacccgctgacgttcatccgggccatcgagcctgcgccggacgtatagctggtgaccgtgtccacgcttggtggattctcgcctgtcgccgcggcatcaatgaaatcgtcggcgaaaccatcggggatgatgacgatcagatccacccagttcgaggcgacggcttgttgcagagtttcactagcatcgtcaacgttcaccagttcgctggaatccgacaggtatgtgcgcatcgatgacgcgatgccgcccctgtccgagtctcgatcgatgacggcgacacgcattttggccggctcgaatgccgcggctgcggaatcggatgtgccagacagcatcgaccagctgatagacagcatcatgatgcccacgaacacgaggtaaatcaacaggtaggccctgtgcgagaacagtacacgcaatgtggctttacaggtgttcatagcgttgcctcctcagcattgcgatgccggccaagaggaataccgcgctcatcgccagcaaaatggcacaagtggtgatgaacggctggtagctgtcgtagtacaaaatgtcgtaaaacaggttcgtcacctgttgcgcggggttgatggtgccgaggatgggcgcgttgcgggctatccagtcactgatctgcatggcaaagccgccgtacagtccggtgaacagcgacaatgtgcaggcgattccgctcgacaaaccgtatttcgtgtcgtaggaaagcttcggtaccgcgccgagcaaagtaccggctgaactggtcatgaatgcggcgatgattaccgcgaccaccgtcaccggttctcgccctccaaacgaaatgtcgcaaatgaagcgaatataggccaatgcgataagcaatgcgaccgatgcgcacaaccagcaggcaaggaaaccggcaataagctgtctggcatggctcaatggcgccacggtgcggcgaatgcccaatgcggacaggttggcttgtgctgtggagaccgtgctgattgagtaccccatggcaatcatgcaggacatggccagcaacgcgtaatagtatctggcgatggcattgggctggaaatgcgtgagcgttgtttcgtgagtcacatcgacgctttgcccgatgctattccagaagttgcggctgagcgcagcctgtggattgtcggcgatggtttgtcgggtgacggcgtcggtgcggttgtacaggtcgatggcgctgcgcaatgccgatagactgatatccagtccgacgcttcctgtggtgtcattggccgcggtcaccgtttcccgactgatggttatcgccaaacgcccgttgccgtcagcagccaggtagccgcggactgtgccatcggcgagcagctgttcggctttccgcacggtgtcggctgcggtgatggtcagcaattgctgattgatatcggcgtatgccgtgccgtccaaagactccgacgatgaggccgtctctccagacaaggcatccacaaacgtacgcgctccgtccgcctgctgccagcggctatcttcgacgacggccattggtatcggtttgagctcgtatccctcggacagtccgccgaagaacccgttgaacatggttgccagcacgatcggaaacacaatcatccagaacagtgcctgacgattgcgcaggttcgctttcaatgcgaccaaaaatgtggtccacatgatgtctccttacctgctcccgctggcgggagctgtcggcgaagccgactgagggtggttgttgcaaggccacccccactcgcttcgcgggagccccgccagcaggggcaagatggtcagtccctcagtgccttgccagtgagttcgaggaacacgtcgttgagggtgggcgggcgactggtcaggtggccgatgttggcgccggagcgtttcaccgcgtcgagcacgtcggtcaggttgtgttcgccgcgacggcatcgcacgtcgagttccttgccgtcgtaggtggcttcgatcacgcacggcagcgcacggacctcagccatcgccgaatccgccagatcgagcgtttcgatggtgatgcgctcgcccgtgtcgatcatgttcttgagctcgtcggcggttccgagcgccaggtgccggccgtggtccatgatgaggatgcggtcgcagatctgctcgacctcctccatgtagtggctggtgtagatcaccgtgacgccggcctggttgagccgctggatgccttccagaatcgaattgcgactttgcgggtcgacggcgaccgtgggttcgtcgaagaagatcaggtcaggcttgtgcgcgatgccgcaggcgatgttcaggcgtcgcagcagaccgccggacagtttgccgggccggaacttgcggaagtcctggagaccgacgaattcgatggcctcctcgaccagcggcgcacggtcagttttcttcggcacgtacagcgagcagaagtagtcgatgttttcggtgacggtcagttcattgaacacggccacgttctgcggcacgatgccgatacggcgcttcagcgcgtaggaggtcggcgtcatcggctggccgaacacgcgaatcgtgcccgaatcgtaggtgagcagcgcgaggatgcagttgatcgcggtggttttgccggacccgttcggcccaagcaggccgaaaatctcgccctggttcacgtcaaggtcaaagtagtcgagcgccaccatgtcgccgtagcgtttgaccagttggctgacgtgcacggccagggccgggttggttgtcgagtcgtgttcggaagctctgttgtcggttgtcatagtcactcccttccttggcgattccatcatcccaagaaggggccggacgccgccacaggcaaacgtcacgacttggccgtacaggcgtgacatttgtcattacagtccttcggcgtcggtctgcatggccttgtacaccttatcgaccggcatcaggctaatctcgtccatcgaatagttggacgccctgtggctttgcgcaatcatcggtatcatccctttacggttgtgtcgacaacatccgacgcttgtgcctcatctattcgggaagtgtgacccgttgtcttggaccgtcatgcgaataattccgcacgcccgtcaagttcgtcgtgttccgcacaccgctagactggtggtggaagagcgtcgagccggggaggtgccatgcgcgtgttggccgagaagggcttgctgctcgtgttgggcctggctttggcctggcttgtcggggtgcggctcgatggcgtgttcatcgccggcctgctgttggccgtttccgtcgccggattggtggaatggctgcgtaccgcgcaatggtcttgggtcttgtgtacggcgtatctcgtcatcgccgtggcggtgccttcatggtgcgcgttcatgccgctcatcgcctacgatactgcacagctgccggccctcgcctcgaccggagcccgggctggggcacggactgcggcaagcggccgctcccccagtgtctcgcggaccgcggcctctcgccgttcccttgccgatgcaatacgttcggccccgtggctttcggtcgccgcgcgctggatatgggtgttgccgccgatcgcgctctggttcgcccgtggcaccgaccgtctccagacgctggtgatgacgatggtcgccctgcttggattcgttctgggccgggcccgcgcctcctcggacgaggcgcggcgcgcgttgctgcacgcgcaggacagggcgcgcgaatcctcgcgggccactcgttcgcgcatcgccgacatcgatgaggagcgcgcccaatccgttcgtatggcaacactcggcgagcgcacgcgtatcgcccgggagatccacgacaatgtgggccatctgctgacccgcgcgatcatgcaggcgcaggccggcaaaacggtggccaaggcgacgaacgatacggtcgctgcgcaagggttcgccacgttgggtgcgacgttggatgatgcgatgacgatggtgcgccgttcggtgcatgatcttgaggatgacggcactgatttcgccgcgcagatcgatgatgccgtcacgtcgttcgacggcatctcccccggtttcgccgtgacgctggccaacgacatcgccaaggcgcccgcgccggtctcgcgctgtttcgcgaccgtgattcgcgaggcattgtcgaacgtggtgcatcatagtgcggcgcgcgaggcgagcgtgacgttgcgagacttccccgcgttctggcagttggtcattcaggatccggggccggccgtgtccgagtccgatgggtcccggacggccgctgcccgcccgcgtgcgatgcgtgccacgctcgtcggctcgcgactcgccgccgacagtgttgccgatatgcgcggttcggccgatgagctgatgcgcggcatgggtttggcggatatcgaatcgcgcgtacgcgcccttggcggcaccgcggtctgcgggccgtatgagggcggctggcgtgtgttcgtatccgtgccgaagaagcgttggaccatggaatcgagggattgatgagaatcgtaatcgtggatgatgatccgatcgtctgccagtcgttggagacgattctgacggccaccggcacggccgaggtgctatggacggcaaatgacggcgacgccgccgtgcgccgttatttcgagacgccggcgagccgaccggacgtgctgctgatcgatattcagatgccctgcaccagcggtttggatgccgcgcgcgaggttctggccacggacccggccgcgcgcatactgttcctgaccacgtttgcggaccagtcgtatatcgcgcaggcgatggggcttggcgccaagggctatctcatcaaacaggatgtggcggcggtcgggcctgcgctgcaggcggtgatggccggtcaggtggtgctcggcgcggaagtgctcggcaagctcaccgaacggactccgaatcctgccgattccgacgattccggagataccgccgattccatcgagggcctgcttggcgagcgtgagcgtgagatcaccgcgctggtcgccgagggcctcgataaccgcgacatcgccgccagactgttcctgagcgaaggcacggtccgcaatcgcatcagcgcgatactggacaagctcggcctgaccaatcgcacccaactcgccatcctctggctcaacgcccatcggtgaggggcctttggtcaagtaggtctctccctccgtcatcgcttcgcgatgccacctcgaacgcgattcaggacagcttgcagctgacctcttattcgctcgttgttactcacccttgcctaaaaacacctccggcgttttcttcacggctcggctcatcagagggaggttgtgaaaaaccaacctcagctgtttttcatgacgatactgtcgatggtgttggccacgcgctcgcagtcgtcggagcactgttcgaggtgacggtacacgtcatgccaggcgaacacctgcagcggatcggtgcaggtggtgtgcagcgtgcgcatcgactcgatgaacaggtggtcggcgtccgtttcgatcgtgttgatggcgaacaccagttcgcgcaacgtcttggaatgccggaatcgcggcagttcgttgaccagctcacagatgctttccgtggcacgcactaccatatccgacatctggaccgcatcgtcgcgcatgtcggtcacattgtcgtagtacatgcggttgagcacaccttcgatgctgtcggtcacatcgtcgagcacgtggccaagctcgtcgatgtcctcacggtcgaacggcgtgatgaacgcggtcaccagttcgtccatcatgtcgtggcgcacctcgtccgccgacttctcaatcgcgtgcatgctgtccatgcgttcgcgcagctggtccggattgaagtcgtgcatgacctcggacagcagcttcgcggcctggcatgcgtagtccgcgctgcggcggaatccgtcgaagtagaacacgtctttttgtctcgccatgatgggtggattcctttctagaacacgaccatgaacagtttggccattacgaagctgatgagaccgcaaccggggaaggtgaacacccaggtgagcatcatgtcgcgcaccacgccgaagttgatggcggagaggcggcgtaccgcgcccacgcccatgatggcgctggtcttggtgtgcgttgtggagacggggatgccgagcacggtcatgacgagcaggcacagcgcgcttgacagatcggccgagaagccttggtatttctcgagtttcaccatgtcctggcccacggatttgatgatgcgttcaccgccgacggacgtgcctacgcccatgatggtgctgcacagaatcatgagccagaccggaatcatcacaccggtcacgctgggttggccgttgcagaacgccatgccgaggaacagcacgccgatgaacttctggccgtcctgcgcgccatgcatgaagctcatggccgccgcgcccacgatctgcgcgtaggtgaagaacccgttggtgcggcggcggtccatgccagcgcaaatcagggtcacggccttgcataccaaccagccgacggcgaagccgaacaggaggcttgcgaccagaccgtagagcaccttgacccattcgcccatgttgatgccgccgatgccgccttggatggcgatggccgctccggacaggccggcgatcaggctgtggctttcggaggtgggtatgccgagcagcgaggcgcccacgctgtatacgacgatggagaacagcgccgcgcatagggcgatgagcgccgcgttcgtgtcgccgccgaaatcgaccatgttgctgatggtggaggccacggaagcgttgagctgcgtcatgatgaagacgccgaggaagttgaagatggccgccatgatgacggcggagcgtacgcgcatgcatcgcgtggtcacgcaggtggcgatggcgttgggtgcgtcggtccagccgttgacgaagatgactcccagcgtcagcaacgttgtgacggtcagagccgggttggaaagcacttgttggaggaaatgcgccagtgagacgtccaaagggaatcaataccttcttcttcgggggcggaagccgtcacactgattgtaacggaagaatggctacgtagttcccatggcgcgcgggttttatggtgttgttatgctgcgcgccgcgcatcctttcgtgaaaacagagcgggacagtcgtatgcttcgattcggcgcctgcatcgacaactatcgtcatctaccgaggattcggtcatgcgtgtgcgaaaatggacacggtgtcaatcaggaggtgcacagtggttgtaagcacggattcgagccgcacaatgcccgattgggtgaagtacggggtgttctggcacgtgtatccgctgggcttctgcggtgccgatatcaggcccgccggcccgcgccagttccatggccgcggccttgacgcgatgatcccttggctggagtacgtgcgcgatctaggcgcgtccggcctgctgctgggtccggtgttcgagtcggcgacgcatggatacgacacgctcgaccatatgcacatcgatgtgcgattgggcggggatgccgcgttcgaccagctgattgcggcctgccgggacatgggattgcaggtggtgctggatggcgtgttcaatcatgtgagccgcgatcatccggccgtccgggcggcgcttgacgagaccaccggacgcttgaatccggccgacaacccgtggcatggtctggtccgcgcgcatgtcggtgataatgacgaacccgctttggatgtgttcgaggggcacggggatctggtggcgctggaccattcggctgacgagaccgttgactatgtggcccatgtgatgagccattggctggatcgcggagccgccggctggcgcctcgacgccgcgtatgccgtgccgagcccgttctgggcgcgcgtgttgccgcaggtcaaagccgcacacccgtattcgtggattttcggtgaggtgatccatggcgattacccgcgcatcatcgaggaatccacgatggattcgatcacgcaatacgagctatggaagtcgatccagcatgcgctggagacggagaacttcttcgagctggattggaatctcaagcggcacaacgcgttcctgaattccttcgtgccgcagacgttcatcggcaaccatgacgtgacgcgtatcgcatcgcagattggcccggccaaggcggcgttggcattggcggtgctcatgacggtcggcggcgtgccaagcatctattacggcgacgagcagggctatgtgggcgtcaagcaagagcgtttcggcggcgatgacgacgtacgtccgaagttccccgactcccctgccgaactgtccacgctgggagagccgacataccggctgcatcaggcgctgatcgcgctgcgccgtcgcaacccatggctgatggatgcgcgtaccgaggcactcgaactggaaaacaagcatttcgtctatcgctcagtgagcgccgacgcccaacactccctaaccgtggacctcaacatcgagcaatccctcaccttcaccatccacaacgccgacggctccgtagcgtaccaatattaaccagcgcttggccccctccctgaggggagccaaggaacgtcatcgacgtccgttgcgggtaccggacgagcggaatggcgagctgttcttcttggaatggtgacgcttcgggccttgtgtattgccgtatttggcgatcatacggcgctcgtgacgcttggccccctcggaacgctcatcacgcacgatgcggttctcgttcttgcggtggatacgcttgctgccttcatgcttacgcgagccgaactcatcgcttcgatcgtaatcgaatctgtctcgccgatcggacttgccgttcttggagtacttatcgccgcgacggtcatcataacggtcatcagatttcttaccgcgacggcgatcctcatatcgagtgtcggcacgatcctcgcgtcgattgccacgacgctcatcgccatgctcgaacagataatcgcgacgctcggcctcgggattgctcatgccggcgcgacgttccgcacggttgcggttcttcttcatggccttcttgttggctttgccgccgtgcttgtgctgcggctgatcatcgtaggactcgccgccgacattctcgtagcgagtttcggtctcggcaacgttctgctcgccacggttgcgattgcggctatgcttacgcttgctgccgcggccagactcatcgccagccatatttttggcgcccttgttcttgcccttgcgcgggttgccgacgggctgcgacttgtcgag

SEQ ID NO: 1642 - DNA, 4097 bp, Unknown
  R221_24m  MAG No. k141_105154
aagccgaccacgaaacaggacgcccagccctctacgacaacgctatcgacaccgactacacccactcaatcggcattcaaaaaggccaaatctaacccccgcgacacgccgagccagacacacattttgacccttaacccgccgaacatgatggagaagatcggcagatcacggccgcgcgacttataggcgctttcgaattcgtcctgatgatcggagttggagcggccgtcggtcatgagcacgatggcggtggtgtattgcgaggcttccgactcgctgggcagctcgtcgagcgcgctcagcaggccttcatagatatcggtgccgccgctggcatcggtggcatcggcctcatgcagcaggtcgctggtgcttgtgccagtggccttgaccgggcggtgggcctcggtttcaaacgggatgagaatgttcacgtcgccgctggcgggctcgatgtacgacttcttggcctggtccgggtcgagcgccgcgttcaggcctttgaccacgccgttcttgccctctccagacatcgaaccggagtaatcgaccacccaaatggtccagctgggtttcctgagcgcggtctggtagacgttgagcgcgctgtcgatcaccgtggcggaggtcatggagaacgtgagtttgccgtcgctgaccgcggcgaggatgtccgcggtggagacgggcttggtggcgccggtgtcgtcagcccagccgagtttgacggccttggatttggcgatgccgaacacgatcggcgtggtggaggtgctggccgcgtctttgacgatgtgcttggtgtctcccatcgaaatccacatcgaggaggcaggccagacggcgtcgtgatcctggccgccggccttgagcgcgttcataatctccagcgaacccatgtagtgcatcgtcacggctacgttggattggtcggccgctttctggatggcagtggcgacttccttgttctcggagccggaggcaatgctcagggtggcggtcggtttgccgccggacggctggaaggtctgcgtggtggcggacgtgccgttgccgtccgctgtgccgtcatcggaattattgaacgccgtgcaaccggtcaacgcgagcacgccggcacataccgcggccgcaaccgcggcggcggagagaagacattatgcccataattccatggctctcccgccatctaaagcgggccgggccacaaggtgaccgcacggtgaacaatgggtgaagagctacatcagtacgcggcgcaggcaatcatggggtcgtcgtagaagccgaggatcttttcgaggtagggcttgtaagtgctgttgggcatggagaagatttcgtggcgcgattcggggaagcgcacgatgttcgcctcgccgccgccgtccttgaccagttggacgaagtgattctgcggcttattgagtacccagatgtcgcgtccggactggaagagcagcaccggcgtctccacttcggcgcaggcggacggattcagtatggcccggttgagcttcaacgcctggcgcacccattcgaacgccgcgcagtaggtctggtattcgctattctcgcaacgcagcttgaagtaccagcgttcacgcgcctcggaagcgccctcgttgccttccatcgagaactccggcgtgaagtccgactgcccgaacacacgcttcttgccgaagccgagtccgcacagcgcgccgaccagcacacgggccacgcccagcggcatgccggtggcgggggcgaccatcggggcggagagcaccgctttgtcgaacagggtggggtatcgctccaacacggccgcgccgatgccgccgcccatcgaatggcagaacaggttcagcggcatgccggccgcgtactgctggccgatggtttcggcgaagccggccagatcggccacgtagcgctgccagtcatcaatccacaccatgcagcggttgtccacgtcgcgcgcggacttgccgtggccgcgatgctcgagtacacacaccgagtagccggcaagcaggaagtaccagacgagctcgtcgtacttttcggcgaactcggtgaagccgtggctgatgacgatggccccgcggaaggtggcggtggcgccttgctcgcgaatcgcgtcgaatttggcggagtcgtagcacaggtagtgcagctggcccgagcggccgccggtgtccataatgccggacagcggctcgatcccggccgaacgttcggcggcggacggatcgaaccagccctcctcgcagcattgttcgagcgcgggcagcaccacgtcggtcatcgtttcggcgtacttgttttcgtcgatcatcgtcacctgcatggctcccatcttaggacaagcctcacgcccacacctcgcacccacaccacgacacattcccgggaatgcgtcgcaagcctgcgcgccactgaccgcacaggcgcgtaggttgtgaggtatgagcgaaaccaatgatgtcaatgacgcaatcaagcatttcccacgcctccgggcgcgcacgctgcgcttcggctgcggcgcaccgcgctccgcacagaccgtgggcgacggctcgcgggccctgttcctgcgctccgacggccccgaggatctggtgaccgcactgtggctgagctggttcgacgagtccggcgaacaccatgagaccaagctggccgacccgcgcgaactgctgggcgcaaccgccgacagcgaggacgtgccggccgaggagaaggcccgccgcgagcgtgcgcgcgaaggcggcaccggcatcgtcggatactccgcagatgacgacggcaatcgcatcgtgttcaccatcaacggccgcctgttcctgaccgacatcgattggaatgacgagaccggcgcacccgagccgcacacccgtgaactggccggcgaatggctcgatgaggacccggcgatgtacacgccggtgctgaacccgcgcatcgccccggatggcgaacatgtgctgtacaccacgggcagctacctgatgctggtcgatatcggcggcgaactaggtgaccgcatcaccgccgtctacggcgtgagcgtggaggatgaggacggcaatccggccgaaaacacgtggaaaatcggtctggccgagttcgtggccggcgaagaaatggaccggtacgacggtttctggtgggccccggattcgcagcatgtgctgttcgagtctttcgacaccgccgacgagccgacctggtacatcagcgatccggccgaccccgagaagccggacgccggccgccgctacccgcgcgcgctgacccgcaacgccgacgtgtacctgaccgtgatcacgctggcgttcgatgagaacgaccggtacgcgggcatcaccggcaacgccgatgtggattgggatcgcgaggcgtacgagtatgtggccgccgtgaactggcgtcgcggccacgatccgctggtgctggtgcagaaccgccgccagacccgcgatcaggtgcttgaggtggcagtcgcggcggatggggccgcgctgggtgccacgcgtgtgcttgaggagcacgcgaacgagcagtggatcgacctggttcacggcacgcccgcctacacgccggatggtcgtctggtgtgctcgctcaacgatatggccacggacaccaaccgtctgacaatggacggccgcccgttcacgccggctggctggaacgtgcgcacggtgctcgccgtgaccgacgaggatgtgctggccgtggtgcagcgcgcgcccgaaatcgcgcctgaggtgccgcgcgcctgggccggctcgggtgccgcttcggatgccgagtctctgttcggcggccatgacgcccgcagcttcgatgtggtgagcatgggatatgacggctcggtcgcgccgatcacgaccgagcccggtcagtggacggcctcacgcggcgcacgcggcatggtggtgtctgggcgcgatatgcgttccgcccgcgcccggatgcggcacatcgtcacgcgacgcgccgtcggcggcgtcaccgatgccgtcatcgccgccaacaccagcgatgccgccaacaccaccgacatcaccgccgccgacatcaccagcaccgccgcg

SEQ ID NO: 1643 - DNA, 58975 bp, Unknown
  R221_24m  MAG No. k141_106601
cagccctcgtagcctgaaccgggccacacgggaaaggacgccggacgccaccggcagggcgaagcgcgcccacgacagccaaccggaatcccgacacgtcaactccccaaggagttgacaaaaacataggaacacccccccgaaactcctttatcaaggaatcatccataagggatgccgcagcagacggtctccaaggcgtactacaccgtgctcatccccatggacgacggcaactggcacgtcaccgtgtactgtcccgcctcgctggacggcccactgctcgacaaggattccaacgaattcgacacggacgacgtgaaacccggcgacaagtcgtacaccgttgccaatccattccacctggatcacgcacccggaacagacggtttcatcttcggccctgacaccctccgacgatagcgatggactaaccattcaaccgcacgcgtaggaggagcgcattccaaccatgaatgaatgacatatagacgtcaagggcttgcgggcatcgtgcccgcaagcccttgacgtctcaatccaacgaaatatcgacttttacccgtttgtcggattcaggctttcgcgcaagtccggcgatgaggagggccaccagcagggggatcgtcgtcagtgtaccccaggaaatcgagaacgtgtcggcgatgtagccgcacagcggggtgacgaccgcggtgaaggccatcaatacgagcgatcccacggagaacgcggtcgcgcggatcgaatcgtcaatgctctcgtgcaagctgctggagatcatgttcgccacgtacatctgcgcgcaggagaacacgaagaacgccaggatcctcaccgccggcatcggcgtggccgcaagcaccaccgccgacacgatgagcacgaggatcgcaatgtcgccggaacgtggatgcagccgcagcatacccagacgactgccgacgatctgcgcgatattagtgaacactaggccggcgaactgccaccagaccccggtctggtggcccatcagcagcagctgccagaacgtcagcaccgacaacgtacccagattgaacaccaccatattccatatctccggcttccgcagcagcacggccgcggccgccacggtctgcctgacatgatccaacaccgtcagcgaggtcccggactcgcccggctcggcggatccatcggattcgacggacgcctcggcctgccgttccgtcgtcccgctcccatccgtcgctgcggccttggtgcgcgacccggccctcatcagaccgagaagcgggatgatcgccaatacgtagaacaccgtcgcgcccagccagatcagctgggagtcaagcaggaacagcacggcaccgaccgcaccgccgcatatcgtgcacgcaccgatcatcgccgacagtcttgacaccaaggtcttcatacccagcgagggatcgtgcttgcgggcgtattcgatgtacagcgaggacgccgcgccgctttcgaccgcggccccgatgccggccagcacgttggccaggcacagcacggcgaagttcgcggaccagaacagcatcaatatgaatcccgcgacgcggcacaacacgccgatgatcagcgtccgttcccgggaccaccggtcgaacagcacggacgtgggcagctcgctggccgattcgctgacgtcgaacaccacattgacgatggagatcagcagcaccgacaggcccacatcatgataggccaccatatagtagaccgaaaaacatccggcaccaagataaataagcgcattatacaaacaggcaaaccgaaccatcaatcattcccttacataaacaaagaaccggtatacgtgggactgtctctcgaagtgtgtaactggccttaactggccggtcgtgtggccggtcggaaaggctggtggacgatgtgtgctgggacaatgggaaacatgacaccgacgaagaagccggacgcggaaaaacgcaacgccgagcgggagacggcgctcacattcgtgcgcatggccaaggaaaaaggactggacctgacagggcccgacggactgctcaaacagttcaccaaaagcgtgctggagacggccctggacgaggagatgaccgagcacctgggccgcgccaagcacaagaaatccaaggacggcagggccgcgaacacgcgcaacggcaccaccgccaagaccgtggtcaccgattcggtaggtccggtcgggatcgaggtgccgcgagaccgcgatggctcgttcgagccggtcgtcgtcaggaaacggcagcggcggctgcccggggtgggcgaggtggtgctgtccctgtatgccaggggcctgaccaccggcgagatcagcgcccacttccaggagatctacggggcggacgtgtccagggagaccgtcagtcgcatcaccgagcgggtcgtagccgagaaggacgaatggtgctcgcgtcccctggatcgtgtgtacgcggccgtgttcatcgacgcgaccgtcgtcaaggtgcgcgacgggcaggtcgccaaccgcgcgttctacgtggccgttggcgtggatctggagggcgaccgcgacgtgctgggcatctgggcgtcgcccgccgccgcggcggcggcccgcgacgcgatgctggacaagtgggaggcgagatatcccgcgatccgcaggctgtggatggacgcgtgggaacggttcataccgttcctggactatgacgtggagatccggcgcgtgatctgcacgaccaacgccatcgaatcgctcaacgcgagattcaagcgctccatccgcgcccgcggccacttccccgacgagcaggccgcgctcaagtgcatgtacctgaccgtccgctcgctggaccccaccggcaagggacggatacgatggagcgcgcgccggaagcccgcgctcaacgcctttgccatcaccttcgccgaccgctggccaagcgagggaacacaacaatgaaaacgccagttacacacttaacgagacaggcccgcgtctgggccggtggccggcgatccgctggtgccgctggtgccggtgctggttgaagtcgattccgacggatctttttgcgtcgagccggtgccggtgccgttcgaaccggtctggctgccgccgacgccttggctggtcgggtcttcggtggtcggattctttgaggtgccggtgccgttcgaaccgttggcggtgccgtcggttttcgactccgaggcgccggcgccggtcgaacccgaggtgccgttggcgtcgaggtcggtggagggggcgtcggttttcgaatccttgctggttcccttcgaatcatcgccggtgcccgtctggggcagagcgttgttctgatcgggggtgcccgttcgcgtgccggtgtcgttgcgcgcgggcgtggtcgtggtgggggatacgagattgtccgtgccgcgtccctgcgtggccagcatcacgacgccggccgtcaccgccacggcgagcaggccggacaccaaggtgacgatcatggcggtgtgcttcgaagcgcggaagcgggacttgcgcagctcatcgaccgagtacgtcctgccgttcgcccgactgaacacgatttcacgcggtctgcgtgtggaggaagcatcatcggcggtcacgcccgtcgccgtatcgggctcgtcccgaacgtcggtccggctgccggccgttcggggggtgccgccatcggcatcgccgttctcggcgtccttcgtgatcccgttgccggaggacgaggccgattggagtttttcgccggaggcggtgagcacgttctggtagatcttggtggccacggcggagacgacataactggccgccgctccgatcaccgaaccgccgatgccgatcttcgatgcgagcaggaacgaggtgacggcggcaagggtgcccgccacgatggatgagagggagattccttcaaaaaacttcttcacaatgcacgaccgtagggtgtcgggctgacaggttgcctgagactcgatggaagcggggcgaggcctacacgagaccttcaaaatcggccttcgtacaggtcggacacgccctgcggcgcacacacgtgcgtttcgcgtcgccgcaggccgcgggacatcgtcaattacgatgcagcgactgcccggtcggtctgattaccgacatcagcacggcgacgaagatcagcgcaaagcccaccagcgaagtccacatgattgtctcgccccagaacagcgcggagaacgtgacggcgaacagactctccgtgcacatgatgatcgaggcctgcgaggcgggcacgtgggccagaccgatgttctgcatgatctgggcgctcatcgtggcgccgaggaacaggtagagcacgctggccaccaccgagggcgccagccaaccggcgttcggcgcgggttcggtgaacgccgctcctgcgatgaacaatacgccggcgacgccgaactgcacgaaggtgacggcgatcgggtcgaaccgtttggtatagatgcccaggaaagtcaggttgaacgagaagatgacggcggttgcgatggtcagccagtcgccggcgctcagagacagcgaaccgcccggcttcagcgagacgaagccgacgccgatcagacagatcacgccggcgaccagattgatggccttcgggcgggttttcgaaatgatccacgtggcgaatggggtgagtacgcagtaggcggccgtcaggaacgcgctgcggcccggttcaatggtctgcaggccgatggtctgggtgaccatcgtgccccagtaggtcagacccaccacgagcgccggcacaatgatcttcggcgtcagatacggcacgatgtgcttatggaacaaggccagcatgcacaggcaggcgcctatcatgcgcagacccatcagccattggggcggaatcgcctccatggcgaatttggcgagcagataactgccaccccataatgcggcgcagcccagcaacatgagtcgggcgagattcgggggaaagctgcgggaccagcggctgcgcagcttgctgaaacgttcgaccaaacccatggtgcacctcaggacagttaggaaaacttgtggctctctcggctcacagattacgggaactaccggccaaaatcgaccggtcgatgggcgtcgggtgtgtgacaggtgtgtggctggtgcgcggccggggcgcggcatcgccaagcaggtaagaaccggatgaaagctgtgcgaaggtgaggttactcacagcgaacatccgggctagtcgcgctcgaaaccggtactctggaaagagtaaaaatacgttgtccatagcaatcatgaaaggattcgacatggcagtcattactccggaaatcaaggaattcatcaagaacaacctcggttggatcaccaccgtctccaaggacggcgaactggacctcggcccgaagatgtccctgttcgtgctggacgacacgcacatcgcctaccacgagcgcaccgccggccagcactacgagaacctcaagaacggctctccgctggtcatcgccttcgccaacctcgagaagaagcagggctaccgcttccgcggcaacgtggtgctgcacgttgacgacgacatctacaacgagcaggtcaagatcgccgaggaaaagggcaccaagaagccggccgtgattccggttctcgaagtcaccgaaatccagaaccttgcctccggtccgaccgccggcaagaccatcgccaaggactgattagctgacgtattggtggcttcctcgtcagagggagccactttttcgcttttcagtgcgcagtactaggtgatggcctttgaggtcggtggtggcgaagaggtaggtgttgccgccgtccttgagtttgagttttttgcgcagctgggccacggatagggggaaattgcgtacggcgatgttggcgtgcgtgagatcggccaatagctgcttcagttctctcttgttcatggtggcgatggattcgatgacgaatgatctgcctgggaaatcggcaataggttcggccgccacgaacaggtggctattcgggctgatgtgatgcacgacgaagcgctgttcgagaacatcaaagcacccggccttcatgattgaggcgttgggttcgtaaaggtacttccaatgcgaggaatcgaagccgttcgcgctttcctcagccgggaaatcctcggtattacaggtattgcgtgcaaccaaggcagaatcgctgataggggtgtgattgttgctgttatcgccggccttgtacgacagcacctgcccgtcattgacgcataccacgagcggtgaggcgcaacggccgcgccccaacaccaacaacaattccttgcattcattcccggtggagacgatatgcacctcatgcaccgcgccggcgaaatcggcgacggtcttatgccagtcgagcataggggagagcttgaccatgaccgtcggtgccttggccagcagcgtatccttcagggtcagcacatccggcgtgcaatcggcaatcgcgtaggtacgcgagccatgatcgtcacggcgggccggatcgaggaagatcatggagactcggccaagcgtatcaagcactgctgttgaatcatcattgatgatttcggcgtggccaaggccgagtatcgggaaattatggcgagcgatatcacataaagtggattgttgttccacatatatggcacgattgaacactcgggacatgtaagaaaagtcgacgccgaaaccgccggtcagatcgactagggatgtcggggaatcgtcggcgtcgtcgactgcttccccgtccaacaatcgctgtgctaaccgggctttgtattgagccgtgaactggctggaacattgttccattgggacttgcggcgggaaaatcagcccatcatgggacgcccagtcaggtagcttgagcgaagcgcgctgccagccggcaatctgctccagcgcgaacggcacatccacgtcgccatcatgtttggcgtgcaaggccacatcacgcacatcttcacggcggtgtttggcgatgaacgcccagatcgactcagaaatctccatgccgccattctaggggttgtgctgagatgagtatgaaaaaaccgcaagagaacgaggtggcgaaaaccgatgatcgatgaagtgatgatgctgcgtcatggccgtacgcaatacaatctcgaacatcgcttgcaaggccagatcgatgtgccgctcgacatcgtaggccaatggcaggtcgaccagaccggattcgcgctcgcttcacggtattactgggccaaggtgaaccgacttgccgagcatcccgaagccatcgcccagcccggtcctgacgccgccgaacgcactgatacgcgccagttcgaggaggcccccgccgccggccggcgcatggtggtgatggcctccgacctgttccgtgcccaacagaccgcacacgccttcgccgatattttgggattgccggtcacctgtgaccaacgactgcgtgaacgcagcttcggcgagtgggaaggcatgacccgcgccgaaatcaaagccgtggcagccgacgactacgcctcttggaaacagcacaccgggggcgaaaccaagcatggtgtggaaagccgtgccgccgtgggccagcgaggtgccgatgccgtgcgcgcactggtcaccgactccgcctattcagacagcatgcccaccacgctgatgctcgtcacccatggctcatggattaccgccaccatctccaacctgctcgaactcgacccggacggcatgaacgcactcggcggcatgcgcaacgcctgctggtgccggctcaaagtgcgccacagcgtcaacggcacccccaccgaacagcccctgtgggagttggaggaatacaacaaggctcccgccatcgccgacagcgccgactgggagaacgggccgaccgatctgcgaggaccgcacatgccgagttggcagccaatcgtctggtgacggtcgctatgcgaaaccccgctcgcaaattcgaacggtgggtctagactaatctcggtttggaaccgtacagcgatagaacagtaagaaagcgcggaaggcgggtgaggcgacatgctgagaatcttcagctcaatcaatggccaagtggagcagatcgagaaaccggaaaacggctcctggttatgtttgagcgaacccactgatgtggagctcgccaccgtcgcatcacagaccggcatcgacttggccgacctgcgcgcccctttggatgacgaggaacgttcacgtgtggacgtcgaagacgattacacgatgatcatcgtcgacatccccaccgtggaggagcgtggcggacgcgactggtacgagaccatcccgctgtcgatcatcgtcaccgaaaacctcatcatcaccgtctgcatgcaggacacgcccgtgctccacccattcatggaaggcacgatccgaggcttcaacaccttcatgcgttcgcgcttcatcctgcagatcctgtaccgcaacgccacgatgtacctgcgttacctgcgcatcatcgaccgcgaaagcgacaagcttgaactgaagctgcgccactccatgcagaaccgcgagatcgtgatgctcatggaactgagcaagaccttggtgtacttcaccacatcgctgaaatcgaacgagatcgtgatggagaaactcaccaccctgcagcgcatcaagcagtatccggacgatgaggatctgctcgacgacgtcatcaccgaaaacaagcaggccatcgagatggccaacatctacagcggcgttcttgcgaacatgaccgacgccttcgcctcgatcgtgtccaacaacctgaacaacgtgatgcgcatcttcaccatcatctccatcaccctgtccatcccgacgctgattttctcgatgtacggcatgaacttcgacggcggcatgatgggcatgccgttcaccgacaagccttggggcttcctgctcatcatcgtgatctccatggtgctttccggtgtggttgcctggttcctcacacgttcgcgcatgttcaagtaaggcgtttgacggttatgcaccactggtcatcgttcgtcagccgtagcatgctccgcgcccgccgcccgatgcggcgcggatttcgctcccggctgatggcaggattcgccgcggcctttggcgtgatattgccattatctggtctggccggttgcggccaaattcaagtcaccaccgtctccggagcgccggagggacccaccatcgccattggggtcgcagccgacgaaccatcggtgggagcatggcatgacggcacataccagggcttcgacatcaccatcgccaaatacgtggccgccaaactcggctatgcgaacaagcagatcgtcttcaagcaggttcgccccgaaaaccggcgctccatgctggacaatggacaggtcgacatggtcgtcgcctcttggcctatcaccgatgggtccagcgcgatcgttgattttgccggaccatacctcacgaccagcgtcggtttgctggtcaggtcggatgagcgtggccgattcaccaatgacgcaggttcggtgggcgacgtaggcgacggcacggtgtgcgcagtgaaaggtgacgagacagtcggcatcttccgcggcaaccacccgcaggctcggattcaggagcgtagcagttatgcgcagtgcgtcacggctgtgcaagtagggtcggcggatgccatagcctccgatatggcggtgctttccggtcttcaagcggccaacgggccccagtatatggacgtgattgcggacaagggcgaggtcagttatggcatcgccgtgagtcaaggcaccagccaattggcgcagaaaatcgcggaagcattggaagacatggttgaggatggcagctggacggccgccaaggatacgttcacaagccaaacaaagctcatggtttcgctgaacggtgaccccaaagccatcgtctcggatgctgaataacgattgacgacgtgtccagttgcgaggctaccttgctgatttatgagtgacaacgagaagagcacgcaaaccgaagagcccaacttccgctacaacgccgcactggcgcaggacatcgaaaacaagtggcagaagatctgggatgagcaaggcaccttctgggccgccaacgtcaacggcgatttgaaggacggcaagggccgcaacgccgaggggcgcaccgcctacttcgccatggacatgttcccgtacccctccggcaagggtctgcatgtgggccacccgctgggttatctggcctccgatgtgacgagccgctaccaccgcatgaagggcgagaacgtcctgcacgccatgggctatgacgccttcggcctgcccgcggaacagtacgcagtccagaccggccagcatcctcgcgtgaccaccgaggcgaacatcgccaacatgagccgccagctgcaccgcatgggcctgagcttcgacaaccgccgcacgttcgccaccatcgaccccggctacgtgcgttggacccaatggatcttctcgcgcatctacgattcctggtacgacgaggaggccaccaacccgtccggctccaagggatccgcgcgcccgatcgccgagctcgtcgccaaattcgagtccggcgaaaaggccattccgggccacgagtccgatggcaagcagtggtccgacctcactgacgccgagcagcaggatatcttgaacgacttccgcctggcctacatctccaagtccccggtcaactggtgcccgggtctgggcaccgtgctggccaacgaggaggtcaccgccgaaggcaagtccgagcgtggcaacttcccggtcttccagcgtgagctacgccagtggtccatgcgcatcaccaagtacggccaccgcctcatcgccgacctcgacggcatcgattggcctgagaaggtcaagctcatgcagcgcaactggatcggtgaatcccatggtgcctccgtgcacttcaccgtggccactgccgacggtgacaaggacatggaaatctacaccacccgtcccgacacgctgttcggcaccacgttcgccgttgtttccccggaacatcacctgctggagaacgtgcccgccgaatggccggccgatgtacccgaagactggaagggcggctatgccaacccggtcgaggcggtgaaggcctacaggctcgccgccgaagccaagaccgccaaggaccgcgtggacgagggcggtgagaagacaggtctgttcaccggcctgtacgccaccaacccgatcaccggcgcgaagctcccgctgttcactgctgactacgtgctgatggactacggcaccggtgccattatggccgtgcctggtggcgaccagcgcgattacgactttgccgtgaagttcggtctgccggtcatctacaccgtcaagcctctgccggattccggcgacgacttggccaactacgaaggcaaggcgccgttcgtctcccatgacggcatcgtgatcaactcctccgtcgaatccacgtacgccaagggcgatgtgctgtcgctcgacggcctgcgcgtggatgatgccatcgccaaggtcaacgcctggctggaggacgccggcgtcggcaagggcaccgtaagctaccgtctgcgcgactggctgttctcccgccagcgctactggggcgagcccttcccgatcgtgtacggcgaagacggcaccccgcacctgctgccggattccgcattgccaatcaacctgcccgacgtgcccgactacgagccgcgcaccttcgatccgatggacgccgagtccaatcccgaggcaccgttgagccgcaacgaggactgggtcaaggtcgagctcgacttgggcgacggcaagaagacctactaccgcgacaccaacaccatgccgaactgggccggctcctgctggtactacatgcgttacatcgacccgaccgacaccaagcacatggtggagaaggacgagttcgactactggatgggcccgaaccacaacaagtactcgggtgacgaaggcggtgtggacctgtacatcggcggcgtcgaacacgccgtgctccacctgctctactcccgtttctggcacaaggtgctcttcgacctcggctacgtggcttcggccgaaccgttccacaagctgttcaaccagggcatgatccaggcctacgcctacaccgacgaccgcggccagtacgtgccggccgacgaggtcgtggaaggcccggccgacgcctccggcgagccgacgttcacctggaacggcgaacatgccaaccgtgaattcggcaagatgggcaagtccctcaagaacatcgtgaccccggactacatgtacgagaactacggtgccgacaccttccgcctgtatgagatgagcatgggaccgctggacgagtctcgcccgtggaacacccgcaacgtggtcggcggcatgcgcttcctgcagcgcctgtggcgcaacgtggtggacgagaccaccggcgaggcccacgtgaccgaggacgcgcccgatgagaagacactgaaactgctcaacaacacgatcgccgaagtgaccgcggagatggagggcatgcgtccgaacaccgccatcgccaagctcatcgtgctcaacaaccatctgaccggtctgaaggccgtgccgcgtgccgcagtggagccgttggtcctgatgctcgccccgatcgccccgcacatctgcgaggagatgtggagcaagctgggccaccccgagtccctgtccgccgagccgtggccggtggccgacgagcgttacgtgggccacgataccgtgaccgccgtggtgcagatcaagggtaaggtgcgcgccaagctcgaagtgccggtcgacatcgacccggccgacctcgaacggcaggcgctggccgccgtcgccgaccgtcttggcggcaaggagccgcgcaaggtgatcgtcaaggccccgaagatcgtctccatcgttcccgcggagtgacttgttgcgagccagctcccctctttgaggggagctggctcgcgtagcgagactggggggagcgtcaaccgcccacctcaattgtggataacttcataagctagaaccacataccccgtttcagctggacaaacgcccatgaatccatcagcgtggatgcatgggcgtttctcataaccatcgcgcaggccatgccgccaaccgtttgcgcgcattcagcaggcagagcgaagccatgccccaaccgcgagcggaacggcccacgacgcctccgccgcctcccggccatgcacggattcgtccggccggccacccgccccaaacggagcagagcggcctgcggcaggcgacccgtgacaaacgtgcgttatcggatctgatcggcgtacgttccgccgatgccgtcggcgaatcagccagactcacccgggatcagccgcgattgtcgttcaccattgggcatgccttggccgtgatattgctgctgatcgtcgcccttggcatcagcttggcattgctggtccagcagtcgatgaatatggccatgctgtctcaaccgaccgccatgcagaccacgggcggctccgctggagatcagacgatgccatcgcagaacaccacggatgagaaacgcacggatccgcagcagtcggagcattccgatgccacagcgaaccccgaatcggataccacgcaatctccgcacatgcagacggacggcagcgatgccggcgctgccacgcatggtctcatcaacctcaacacggccaccgttgaggaattgcaatccatcaaaggtattgggccggttaccgctcagcggatcatcgatcatcgcacggcgattggcgggtatgcatcagtcgatcagctgctggatgtcaaaggcatcggctccaagacgctggagaccatgcgagggcaggtgacggtcggatgagcagggatcggatactgcgcgagcaggggagccgcgattggaggatgctgccgatcgccatagtgatgtgggcggcgagcctgggagcgcacgcattattcgcatggaggatgtctgatggactcggcaccggtcaggcaaaggccgatgccggagctggcattgacgtcaccataatcggcatggaatggcctgtcacacgaatattacctataacagtggcgtcatgtgccgctgtggcggcgacgatcgtggtgtctttccgcctgcggatcaggtggacgggaacattgaccgtatgcgtcgcggtggcgtgcatcggcagtatgacggcaatcgcgtcggacaccattgcctggcatgatcctgcctccgcacaagctcgccaatccagttcataccacgaagtcatggccacggtgacgacgcccgtgatcgcttcggaccaacgcacatacgattgtcagacggacatacggctgagcggcatcactgtggatggcgcggacgtacgttccacggtcgccgtgcgcgtatacgccgatgaatcgtattgtgggcagttgcgtcgaggcgcggtctatctgttgacgggcgtattgcagcaagcgcgatatggacgcataccgctatggctgctcttggaaggaaaacagccggtagcgcaggtgcgggctccgccgtggcatctcgccgcgatcgcacatatgcaggagtcgtttttcaccgtgaccgaacaattgtccgatcaggggcgtgtgttggtgccgggattgacgatgggtgtgcttggccaggattatatcggcggcgatgccggtccgatgccggtcaacagcacgtatgcgcaaacgttggaaaatcagttccgccggtccggcatcatgcacctcatggccgtatccggcggccacttcgtactggtggcgggactggtgcgtcggttatgcatgtggatgctgcttgatcggcggctgacggcgttgctggtctctggagtatatgcgctgctggcattggcgatgttccccagtgattcggtcacccgcgcgttcatcatgggattgataggtgcgttggcgtatgcgatgggacggcgtacgcaagcgttgagcgccctatgctggacgataatcggtgtattggcggtgaacccggatatgtcggccagctacggattcgccttgtcttcggccgccgtactgggtatcgtgctgtttgcggggcggctggccggtgtctttgagcgagcgatgccgcacagcatcgccgagatgatggcgatgaccgtggccgcgcaattgttcaccctgccgattcaggtgttgatggaaccggaattgccgttgctgtccgtgccggcgaacctgctggtgtcaccgttcgtgggattggccacgatggcgggattgatggcactgacgtgcgcatggtgcacgccatggctggccggcgtattcgcgtggatatcgtcatggggcacgctggtgatggaacgggtggcgttgtggctgggcggcagcacgatggccgtcatcccatggaaagacggcgttacgggcgccgtgctgattgtggcggcggaaatcggtatcggcatgctactggtgttcgtcagccgttgcctccagcatgtccgtcgttatgaggccggaatgtctggcgtgcgcttcggttccgcttggcgcgtccgcctcagtctctggtgtgaggagacgagacgcctctttacgcggcggcaagccgaatagccaatgcggtattcggtgcagcaaccatcgcaatcccagccgaataccactatcttgacggcaccggcaaaatcgtgatgccggcaggtcattgtccaacctgtgtggcgagatgggggcatgacgaaaacagcagcgaatgcaccggtaaccgtggtgcccggaggcgactcgtatttgaacgacgcgcgcaccaaggcactgtgcgcgcaggcgttgaaggcgcggcccgacgccgacctcatcgaactcgacgccacatcggccgaccagtatgccttcgatgaagccgtcagcccatcgttgctttccgacgttgccgtggtcaaactcgtcaacctgcagaatgccgacgacaagctcgccgaagctctggtggcgtacaccaagcaggccgccaaggatccgaacggctccagcgtggtgatctgccagcacgagggcggcgtcaaagggcgcaaaatcatcgaccaactggtgaaagccggcgctcgcaaagaggacgtgccggatttgaagaaaccggatgcacagctcaatttcgtgctcggagaattcgagaaacgtggtcgtagagtcgaaccgatggccgcacagcagctggtatccgtactcggcggcaaaaccggcgaacttgccgccatgtgcgagcaactgtgtttcgactttgacgataatccgatgggcctcgaccgtgtcaaccagtatttgaccgccaatccgcaggtcaccggttttgccgtggcagacaaggccgtggaaggcaaaaccgcagaagccatcgtcatgatgcgtgcagctgtggaacaagggaccgatcccatcgcgctgatcggcgcgttggccatgaagctccgtaccattgccaaagcctcggcggtacgggccggcacgatttcccaggccgaagcgaaaaccaatccgtgggtgctgaagaatgcgatgcgccaacttggcggctggacttcggcaggactcgcgcattgcatccgtatgctcgcctgggcggatgagcaaagcaaaacaaacggtggcgacccggtatatgcgctggaacgctgcattgaagacatcagtcataaaggtcggtaaaagtcgataaaggggtatttatgagcgaacacactattgcggctcccaccagcgaggccatgcaggagctcggccgtcgtgtggccggaatggtacacggcggcgatgtattgctgctctcaggccctcttggtgccggtaaaaccacattcgcccagggcttcggggcggggctgggcattaccgaacccatcgtgtctcctacattcaccattgcccgcgaactcgacgggcatttcgccgacggcactccgtctcatctggtgcatgtggatgcctaccgtctgggcggctcagcctatgcgccggggcaggacgccatcgggcgtttgttggacgagctggaatcgctgggattggacgaagaacttgaagaccccggcgagaacacggtggtgcttatggagtggggcgaacaaatggccaccgccttggcgccagaacgacttgaaatccatatcgatcgacctctcgattcctccgatgccgcatccgctggatcagacggcgaactcaccagcaacggcactcgtaccgtcgcattcgtcccagtcggcaagcgatgggccgcgttcgatctgcagtaagccatgcgcctatagactcctcgatgtacactctctagaggctttacgactaggaggattcatgggttgcacgttggtgattgacacctcattcggctcgacggtcggcattgtggggcgcgatcccattgtagagaccgattcgcgcacccatgtggagaaactgcaggtcaatatcgcgcgcgcggtcgaggaggccgggttcccagcatctgacattgcaacagtcattgtgggtaccggtccagccccctttactggtctgcgtgccggtatcgttacggccaaggcactggctttcgcaacgggagcgacgcttatcggccataatgttcttgagcctcaggtgcaatggaatctcattcgccgtggcaaagccggcactctcggcgatactcataaatgccatgtgctcactcttgccgtaaacgacgcacgccgcaagcaactctattttgcgttgtactcggacccgctcgttggcgatcccgatggcgaaaccgtggcgacggctctgattgacatggatatcgattaccctgcatccatcgcgcagcgcgtgaatgatgccgttcatacgtaccgcgacggacttatgccagaagacagcaatgtggatgtggtcgtggatgttgtgggtcatggggcccgcaaatatgcggatgcgctgggtgcaatcgagcagcttggcgacatcaccgatgaatccgtattggaccaaggggagcaaggtctcgctatctttgccactgatgcggaactggttgccaaccgtaatcacgatacgccggtcgaaccgttgtacctgcgccggccggacgccgaagtgccgaacccgctgaagcacgtgctcggccatgccggtgccgataaggcgtgagacgggttgattcgatgattgttgacatcactgccgtaagtcgtgatcttgcggtttgctccatcgcacagttggaaggcgaactgttcggcctcggcgcatggaatgcgaacatggtgcgagaggaactggacgcaccggcccgcacgtatctgctggatgtgctgggagaggtggaacaggcggttgtccgcggctacgccggcttctggtatgacggcgaggacgccgagctcatgaccatcggcgtgggcaaggcataccagcggcaaggcatcgccgctgcgttgcttcaggcactggtcgacgaggcgaagcgtcagggcgcctcgcgcatgctgctcgaagtgcgtgtggataacgaccctgcgctggccctgtatcaccggttcggattcgaacgcattggattgcgcaaacgctactaccagcctgaaggcatcgacgcatacaccatgagcttggacctgaaacctagggtcgtgggctttgccgccccgcagacggcatcggcggacactgaagacatcactggcaagcaaacggagaagaacggagaagcacgatgagcgaaccggttgtactgggcattgaatccacctgcgacgaaaccgcggctgccatcgtacgcggccgcgaactgctctccaacgtcgtggcctcatccatggaggaacacgcgcgatacggcggcgtgatccccgaaatcgcctcccgtgcgcacgctgaggccttcgtgccatgcgtgtccaaggcgctcgccgacgcgaacatgacgttggcggatgtggacgccatcgccgtgtccgccggtcctggactggccggttgcctggccgtgggcgtgtccggcgccaaggcgctggcctgggctgcgaacaagccgatttacggcatcaaccatgtgatcgggcacatcgccgtcactcagctgcagttcggcccgttccccaaggacacgctggctctgattgtctccggcggccacacctcgctgctgcatgtggaggacatgccgtgcaagatcgatgtggtgggcaccacgctggatgacgcggcgggggagtgcttcgacaaagtcgcccgtctgctcggcttcccgtatccgggcggcccgcacatcgaccgccacggacagaacggcgacccgcacgccatcaaggtgccgatgggtctgacccaaggcaaggccggtgccgcgcacccgtatgatttcagtttctccggtgtcaagaccgccgtggcccgttgggtggaaagcgagcaggccgccggccatgagattccggtggacgacgtgtgcgcatccctggccgactccgtggccaccgtgctagcccgtaagtccatgcgcggctgccggcagtacgattccaacacgctgatcgtgggcggcggcttctccgccaactcgcagctgcgcgccaaactgctcgaattcggcgagaactacggcgtcgacgtccgtatcccgcaaatcaagctctgcaccgacaacggtgccatggtcgccatgctcggcgtgaacctggtcgaagccggcgtggcccccagcgcccccgacttcccgatcgactccgccatgcccctgaccaaggtctcgatgtaagatttgcacggtattcccagactgatactgggaataccgtgcctctcatcggtgaattgacagtgacctgtctgcctgatgtgagtagtggtgaggtcttcgccatggatttcccggttgatgatggggtgtcgtgtctggtcaccaatgcgatgaaaataaaaaagcctcggagaaccgaggctttcgatggctcctgcgactgggcttgaaccagtgaccgtccgattaacagtcggatgctctgccaactgagctacgcaggaatattcaattttcatcccgtccggagttacccgttcaggtgagctcctgcgactgggcttgaaccagtgaccgtccgattaacagtcggatgctctgccaactgagctacgcaggaatgtctgctgtgtttgagatttctctcgcgcacaagtcacatatcttacatgcttgccacgaaaaagcaaattacatgcgtgtagggcatgtcgcgccgaattccgcagaatcggactcatcgaatacccactcatacaacatgatgacgatgcggcgatactgtcacgcgaaatttcattgtggataacttcggaagctggaaccacataggtcgttctggctggacatcctgtttcggacccctcaaggtgggtatcaccggcaaagaagccggaatcgcatcacactcacactatggggaggaatctcatgaatgcaccactgttgtttgattggcgtcgcgacgaagcccgacgtgccagcagacggcgtcagcaggcgcgtcagcgggctcaggaacggcaacggcgtatggatgccataatcgcgttggccgccgttatcggcctgctgcttgccttgggagtgggactggcatccacgcctcagcatgttgcgcatgcggatactgcggtgaccggagatgcggcatacacggtggaggatttcaccgatatgtctgatctggcgtggcgcaatggcaatcagtgcgaatcccggttcgactggccggtcgacgatccacaggtcgaacaacagttcgagcggccgatcaacccgtgggcaccaggtcatcgtggcgtggatcttgctgcggagcaaggtaccgtgattctgtcaccacaggcagggaccgtgagttttgctggcaaagtagctggcaaagatgcggtgagtgtacggcatcgtggaggtgtcacgtcgacattcgaaccggctgttaccgagctctcggtgggggatacgatctcccgcagacagcccgtaggcattgttgagggcaactcggaccattgcgaagaccgttgcctgcattggggcctcaagcgaggaacggccgactatcttgacccacagcaatatgcggggagtcgaaaaatcgtactgaagccgtcatgattcagcaatgtttgtcggccggaacagggccgtacggaagaggcatcgcaggcggctagcggcgtgacgagtatgaatcacagaccggcatcggccaaggagatatatccgggggcgatcagcgcggacttgagattgctggcgctgacagccagcaacggttcgttgatggtcgggatcttcttcacgccgcctacctcggagttcctgattgaaggcatggaattcagcgcttcgttcttgttgagcttggcgcaggcctgagcgatatccgtggcgatggtctgtctgtcttccatgccggtcatccattgcttgccattgacgatggatgggatgttcgagacgtacgcgccgtatccggtcaccagaggccattgcgagtcacggtccttgtcggaagcggaggtgtccttatccgcatcgtcatcggaactggatgagtcgtttgcgttgtcgttttcaggggatttgatcgggtccggcactgcgtcgcggctgagatccctcttgccggtgatattgccgacaatgcccgagatggtgatctgcggattgatatcggcggcagagccggtgtatctcagatcgtccaattccttgacgacctcggaggcgatatagtcgttcatcgtgatgataccgtcaatacgggtgagtgtggactgcccgtcggtttttgccagacgcttgtcaagcactttcgcagtggagccttccttggcggcatcgtaggccacggcttgccaatcgttttccgtggatttgccgtccaaggtgcctgaagggctttccacaacgcccttctgatagtaggagcccagtacctgccagataccacggaacgcctcttgggcgaacgtggaatcgttggcgttgcctttttcgtccacggcggtgtatggcagcagcacctcaatgtatttggggttgtctttactggccttatccaacttgagtttggacaccatcttttccgcctgtagcttgccgatggtctgggcgtccgagaacttgacgaaggcgtccggcctatacccctcgatgctgttgccgagcaataccacatgcatgccggattccttggccagcttgagcgatgagaccagccggtccacggcctgcgcctgctcgtccgatgcagtgccgtcgctctcagtgttggacgagtcatctttggaagagctgtcttcggaagaatcaccgtcagaagtggctccctcatccgtggcatcgttggtgctcaggttctggctgacgtaatcgccgtattgacgagtggaagcgtcggcctcgactactggagccacgagcaatgtcatgttgtcgggcgcgatggcaatgccggaatcgtccgtggtgttattcgaaagatgatcgaccacaaagtcttggatggcgcggctttgcttgtccaacgagtcggacgtcgtatgatcgatatcgcctttcttgaaaccggcgtcgaccagggccttggttaggtcgggcaccagcttcgcccatttgttcagtggcgtctgctgattcagcgtaatgccgtccgaaggcgtgaacacggccacgccgccggcagaattggacgtcaccgtggtttgaccatctacaacggtcttattgtctgaggtgcacgcggtcagtgacagcaccatcgcgcaggatgcgacaatggcggcgagcagggtggttgagcggcgtgcgaacaccataagcggcgaaacctcctcaagcgggcgtgaaaacaaactgaatcacgattctagtaggccgtatacgaaaaagtcccggaccagtggacaaatcgccacatatccgggaacaattaggggtatttcgcgcgtgtatcgaacaactgtcatgattgtcgtgctgaggaacattccagatgaagcacgacaatcatgacagttggcgacatgacatgacccatgtaggtccgcacgatgtgttcgatgatttactcggccagagccttggccaggttctcgtccagcgcgttcatgaagccgtcggtgtcgagccacggttcgtccgggccgatgagcatggccagatccttggtcatctgaccaccttcaacggtgtcgacgatgaccttttccagcgtctcggcgaagtgacgggcttcgggcgtgccgtccagatcggcgcggtgcttgaggccgccggtccacgcgaagatggaggcgatcgggttggtggaggtcttctcgcccttcttccagcggcggtagtgacgggtcacggtgccgtgcgccgcttcggcctcgacggtctggccgtccggggtcatgagcacggaggtcatgaggcccagcgaaccgaagccctgggccacggagtcggactgcacatcgccatcgtagttcttgcaggcccagatgtaaccgccgtgccacttcagggagctggccaccatgtcgtcgatcaggcggtgctcgtaagtcaggccggcctcggcgtacttgtccttgtattcggtctcgaacacctcagcgaagatgtccttgaattggccgtcgtaggccttcaaaatcgtgttcttggtggacaggtacaccgggtaatgacgcatcaggccgtagttgaagcaggcacgagcgaaaccgcggatcgaatcgttgacgttgtactgcacctgggccacgccgccgtcttcgccgtagttgtagaccacgtgctgaatcggctcggagccatcgtccggagtgaaggtgacggtcagctggccggcgcccggaaccttgaaatcggtggccttgtactggtcgccgaatgcgtgacgggccacgacgatcggcttggtccagccgggcaccagacgaggcacgttgctcatcacgataggctcgcggaagatcgtgccgcccaggatgttgcgaatggtgccgttgggggacttccacatcttcttgagaccgaattccttgactcgggcctcatcgggggtgatggtggcgcactttacgccgacatggtgcttctggatggcgtgggcggcgtcgatggtcacctggtcatcggtctcgtcgcggtgctcgatgcccagatcgtagtagtcgaggttcacgtcgaggtacggcaggatcaggcgatccttgatgtccttccagatcacgcgggtcatctcgtcgccgtcgagttcgacgacagtgccttcgaccttgattttggccatgcttcctcctgatagatggtgtgaagatgatttagtcatagcgcatgtttgtaacgacttgaagcaatcgtccggtccgtgggaaacgaccttgttggcgtcccacccgggcaataggcttacaaccatgtctcaggaaattgaaatcggtttgggcaaaaagggccgtctcggctacgcactcgacgatgtggcgatcgtcccctcccgtcgcacccgcgaccccgaggacgtctccacctcttggcagatcgacgcctatgagttcgatgtgccggtgatcggcgcccctatggattcggtgaccagcccggccaccgccatcgccatgggtaagatgggcgcgctcggcgtgctcgatttggaaggtctgtggacccgttacgaggacccgaccccgctgctggacgaaatcgccgggctgccggccgatcaggccaccgagcgtatccagcagatctatgccgagccggtcaagccggagctcatcacgcaacgtctgcacgagattcgcgccgccggtgtcaccgtggccggcgcgctctccccgcagcgcacccagcagttctactccaccgtggtggacgcgggcgtggacctgttcgtgatccgcggcactgtggtctccgccgagcacgtctcctccggtcaggaaccgctgaacctcaagaagttcatctacgaccttgacgtgcccgtcatcgtcggcggcgcatccaactacaccgctgccctgcacctgatgcgcaccggcgcggccggcgtgctcgtcggcttcggcggcggcgcggtctccgccacccgccagaccatcggcgtgcaggccccgatggccaccgccatcgccgacgtggccgaggcccgccgcgactacatggacgaatccggcggccgctacgtgcaggtcatcgccgacggcggcatgggcgactccggcagcttcgtcaaggccctggccctcggcgccgacgcggtcatgctcggcgcgccgctggcccgcgccaccgaggcccccggcaagggcacccactggggttccgaagcccgccaccagacgctgccgcgcggctaccgcaccacggtcggcacggtcggcccgctcgaacaggtgctgttcggaccgagccaccaggcggacggcaagaccaacttcatcggcgccctcaagcgcgctatggcctccaccggctacgtcgacgtgaagaacttccagcgttgcggcatggtggtcaacccgtattccgcacgataatcccgattaccccccctgaaaatgggggtttgccctccatgcaggaggcttagcttgccctaaggcgcgctcaagtcgtttgacttggcgcgcctttcgtgatgttgtagtacaaacgctcgccgatgatggtgagttgcaagggggcttgaaggggtcatcatggagtattcgggatttttccacggcacatatcagtacgggccgttgccgagttatgacggattcatcgttgtggagctgtcggatcgcccggtgcggtatcatatccaacccacattcataggcgggctgaatgcgaaggaatgtcattccatggccatggctgcatgccgcatcgcctgcacatcggcggacgcgatacgtggcagactcagcgtcgcacatctcaacagagccatgacaaaaccatgcctggaacggctgcaaaccatgcaatacctgctcggcacccacatggtcactcatccggagctcaaagcgaaattctgctatctgcccactgtccccacattgatcgacggcatgatcaccggcaaggacacgctggaaatggcggtattcatgaccatcggccaggaaaatctgcgagtcaacctcaaactgaagttcatcggttctcgatggatgtgcatctatgccgatctgggctgaccagacggccccgccctcacaccgattcctacgctggcagcggaagacggttctgccgtgtcataggctggttcgcctatagtagtgaccatgcgtgaacatgtagaagaacccagatatgtcaccaccgatgacgacaccgtctactcgctgctggccaaacgagcagctcgcacgccggatgacgtcatcgcggaatggcaggatgacaacacccaccaatggcgcggcgccacagctactgaaatgctgtcccgcgtacgcgaggtggccaagggcctgttgggacttggcgtcaaagccggcaccatggtgctgatttactcgcctacctgctatgagtggggtgtggctgatttcgcttgcgcggcaatcggcgctgtggttgtgcccgtctatgagaccgattccgcccgtcagaccgcgggcatcgtcgaggaagtcgatcccgccatcgcctttgccggcgacttccagcgcgcacagacgcttgagcagatccgtgtcaatcatccgggcatgaaatacgtgttcaatttcaaggccgatggccttgacgctgtcgctgacttcgggcatggcgtatccgatgagacgttggatgcggctatcgctcgtatcaaagccgatgatctgcttaccgtggtctacacctccggttccaccggcaagcccaagggcgcgatgctctccaaccgcaattacacgcacatcgtgcttaacggctacgagattctgcgtggcatgctgtacgacgacaaccgtctgctgctgttcctgccactggcgcactgcttcgcccgctacatccagtacgtgtgcatcggtggctgcggcgtggtcggatacattcccgacgccaagcgactgctcgccgatatccgcagcttcaagcccacctacctgctgggcgtgccacgtgtgttcgagaaggtgtataacgcggcctcgcagaaggctggtgccggcatccaggggcatatcttcgcccagtcggtcaagcacttcgtcaagtggagcaaggatgagcaggccggccgcggccattcgttcatcgagcgcatgcgccattcgttctacatggccacggtgggcaaatccattcgttccgctctcggaccgaacctcaaatggctggcctgcggtggtgcgccgctcaacgtggatttggcccacttcttcaacggcatggatgacatcaccttcatccagggttatggcatgaccgaaaccgccgctccgatgctcgtcaattgggaggacaacaacgaggtcggttcggtcggcaagcctgggcctggcatgggcgtgcgtcttggcgaagacgatgaaattgagctgaccggcccgaacgtgttccttggctactacaagcagcccgaactcaccgcacagacgatgactgccgacggctggatcaaaaccggcgatctgggtcgtatcgacgaccgcggcttcaccttcattaccggacgcaagaaggacatcatcatcaccgccggcggcaagaacatcagccccaccccgatggaggatgtcatcgacacctgcccgatcgtggctcatgcagtagtagtcggcgacggcaagccgttcgtgtccgcacttatcgagctcgaccctgaaatgctgcattcctggctggaaggtcagggcctcaatgccgacatgacactcgccgaggccagcgacaacgacgcggtgcgtgcctttatccagcagtacatcgaccaggccaacgccaatgtctcccgcgctgagtccgtgcgcaaattcgcggtgctggatgaggaattcagtcaggagcacggcacgctcaccccgagcatgaaagtggtgcgtcccaaggtattgcagcgctacgccaccgtcatcgaagaggatctgtatgcgcccaagccatccaacaaaccgctgcctgccacagccaagatcatcgacagcacgctggagaccgtcaagaaatcctccgaatcggtcaagcaggcgtccgaacaggtcaaacaggcctcggaacagatgaaaaccagcgtgtctgattcgattgctagcgtgtcggagaagatcaagaagtcgaaggccgaacccgaagagggcgagaccggcgattccgccgacaatgccgacaatgccgctgacaccggcagcaagccggaccggccggctgacgagaagaacgaggagtaacgagaagtggccatccgtgagatcagggtcgtgcccgacccagtcctgcgcaccccctgcgatgagatcaaggaaatcaccccggccgtgcgccgcctggttgacgacctgctggaaaccgtggacgatccgggccgagcgggcctgtccgccaaccagatcggcgtgagcctgagggccttctcctacaacatcgacggcaaggtcggctacgttctgaaccccgtactcgaggagaagtccggcgagcagtatggcgatgaaggttgtctgtccgtgcccggcttgtggtacaagacccgtcgggccgactacgctcgcgtgcgtggcatcgacctggacggcaacgaggtcgtgctcgagggctccgggctgatgggccgtatgcttcagcacgaatgcgaccatctcgacggccacgtgtatttggatcgcctggaaaaggaagaacgccgcgaagccctgcgctacatgcgcaatcgtcaggcgaagtagtccatactcggctcccgctggcgggagccgtcgaacgtagtgagactgagggtggttctgccggtaccgcccgtaactcccctcagtcgcctatggcgacaggttcccctcaaggaggggaacctgtcttcttagtactggctccgtgctattctcgaaacttgtgtgccacccggcaacggacgcagtcgctggcgtccggaaccacccaatattgtcaaccggcacacaacaaattcgcgtcatgctcgcgacggcctgtgtcggtcggctgcacaactcgtgaaaccgggggagcagctgcacgcaggtgcgcatggccaggcaagaaccgacaatgaaaggtagtaataccatggctcagatcactatgagcgatatgctgaaggctggcctgcacttcggccaccagacccgtcgttggaacccgaagatgaagcagttcatcctcacccagcgcaacggcatccacatcatcaacctgttcaagtcgctcgacatgatcgacaaggcgtacgacttcatcaagaccaccgtggcccacaacggcaccgtgctcttcgtcggcaccaagaagcaggctcaggaagctatcgccaaccaggccacccgcgtgaacatgccttacgtctccgagcgttggctcggcggcatgctgaccaacttccagaccgtctccaagcgcgtcaaccgcctcaaggaacttgaggaaatggacttcaccgacgtgcacggctccggcctgaccaagaaggagctcctcctgctcgagcgcgagaaggacaagctcaacaggcagctgggcggtatccgcaacatgaaccgcaccccgtccgcgatgttcgtcgtcgacatcaccaaggaggccctggctgttgaggaagctcacaagctgggtatcccggttgtcgccatcgtcgacaccaacgccgacccggacaccgttgagtacccgatcccggccaacgatgacgccatccgcggcatcgaactgctgaccagcctgatggctgacgccgtcgccgaaggtctgctggagcgctccggcgccaacaaggccgagggcgaagccgccgagcagccgatggccgcttgggagaaggaactcctgaccaacgaggctcctgccgaggcttccgctgaagccgccgctccggctgccgccgagggcgaaaccgccgaggcccccaaggccgagtgatgctctacgatgggaagtgcctgaataagcgcttcccatcgttcatgggtaagcaaaatttctcaaggagaataatcaatggcagcaattaccgccgcactgatcaagcaggttcgtgaagacaccggcgccggcatgctcgacgtcaagaaggctctgaccgaagccgaaggcgacgtcgcccgcgccaaggaaatcatccgagccaagggtatcgccgcagccggcaagcgtgaaggccgcaaggctcaggaaggcaccatcgcctccaaggtcgtcgagaccgccaatggcgagaccggctacgccgtcgagctgaactccgagaccgacttcgtggccaagaccccgaagttcgtcgagttcaccgaggaagttctcggctacgccgtggacgccgacgccaactccgctgacgagctgctcgaggccaaggctggcgacaccaccgtcaagctggctgtcgaggaggccgccgccctgttcggtgagcacgtcaaggtcggccagttcgccaagatctccggcgagcacgtcgaagtctacgctcacaagaagtccgccgagatgccgccgagcatcgtcgccatgatcgccaccgacaaggccggcgccgccgtggctcacgaagctgctctgcagatctccgccatgggcgccaagtggctgacccgcgaggacgttccggccgatgtggtcgagtccgagcgtcgcgtggccaccgagaagtccctggccgagggcaagccggagaagatcgttccgaagatcgtcgaaggccgtctcaacgctttcttcaaggaagtcgtgctgctcgagcagccgttcgtcaaggacccgtccaagaccgtcggcgacctgttcaaggaagtcggtggcaacgccaccgcattcgcccgtgtcgaggtcggcaagggcgaagaggagtgagcctaaggcttactccacgcgcttagcgtaatttcaacgaaacgccatccggttattcaataatcggatggcgtttcgctattccaagggtgtcgttgctagggggtgtcgtcgtaaaccgatacgcttgtctacggataatttcgcactttcggttttgagaaaggcatgatatgactgatagcgacaagccgcgcagagttctgctcaagttgtccggcgaagcattcggtggtggcaaggtcggcatcgatacccatgtgattcgtcgcattgccgaggaaatcgttccggccgtacaacagggtgtgcaggtggccatcgtggtcggcggcggcaacttcttccgcggtgccgaactgcagcaggccggtatcgatcgttcccgcggcgactacatgggtatgctcggcacggtgatgaactgcctcgccctgcaggacttcctggagcaggagggtcaggccacccgcgtgcagaccgccatcaccatgggacaggtcgccgagccgtatattccgctcaaggccatccgtcaccttgaaaagggtcgcgtggtgattttcggcgccggtgccggcatgccgtacttctccaccgacacggtttccatccagcgttccctcgaaatccactgcgacgaagtgcttatgggtaagaacggcgtcgacggcgtctacaccgccgacccgcgcagggacgagaacgccaagcgttttgaaaccctgagctacaatcgcgccctcgtggacaatctggcagtcatggacgcctccgcactgtccatggcccgcgacaacaagaagcgcatccgcgtcttcggcctcgaagagccgggcaacgtgacccgcgccctcgtcggcgatgaaatcggtacgctggtctccaccgccgaatcgcgcgtggccgagtaagccgcaaacgcctacaatcgaatcaaacgttcatagacgaacaacacagacgaacaccaacacacaaggagtgaatatgtctcttatcgaccaggccaaggaacagatggccaggaccgtggaaaacaccaaggaaaacttctccggcatccgcaccggtcgcgcaaacccggccctgctcaacggcatcaccgtggactactatggtgcccccaccccgattaaggccgtcgcctccatcggcgttcccgaaccgcgcaccctgtccgtcaccccgtttgacgcttcccaggccggtgccgtcgaaaaggccctgcgtaactccgacctcggcatcagcccgaaccgtgatggcaacgtcatccgcctgaccatgccggaactcaccgaggaccgtcgtaaggagtatgtcaagctcgccaagggcaaggccgaggacggcaaggtcgccgtgcgcaacattcgccgtaagaccaaggaaaccatcgacaaggccgtcaaggacggcgagatgggtgaggacgaaggcgatcgcctgctgaaggatcttgacaaggtcaccaagtccgttaccgacgagatcgatactctgctggagaccaagcagaaggagatcatggaggtctgattcagaccaggtccggagaattatggaacgcaacgaacaactccatgaagaggccgaggagacgctcgaccggatcaacaagaagaccggccgcaacatgccgcaggccatcgccacaggcgcggcactggtcatccttattgtcgcgtgcctgctgctcagcgtcgacctcttcgtgctgctggtagtcgtgttcatgattctggcgctgtgggagctcagggtggacttcgccaccgtaggcctgcacatcccggtgttcatgctgtggctgtgcgcgtccttcaccctcatcgccacctattattccccgtaccatctcatcacgatgtcgctgagtatcatcgtgtcgattattctggtcgccatcgcggccagcgcaaaaatcagcgtcggcaaccgcctatctctggcggttgccggcaaactgtccaacacggatgccagcgcgcgcctcgaatcctcgttcaatcatgagggcggggaacagcatcattcccggctcagccatgtggctgtgtccgtgcttaccgtgttgtacattccgttgctggccagctgcatcatcatctcgctgactttcaatgggcatccgattgcacacgccatcatgctggtgttcctgcccgccctctccgatacgggtggtttgtttgccggtgcctggctcggcaagcacaagctcagcccgcgtatctcgccgaagaagtccgttgagggcctgatcggctcgatgctcttcgccatggctggcgcattcgccgtattcgcatgcacgtatgatgcctcgaaatgggccactcgttggtgggtgccgatcgtggcgggtattctcatcggcgccgtgggcacgttcggtgatttgtgtgcttccatgctcaagcgcgatatcggcatcaaagacatgggccatctgctcaagggacacggcggtgtgatggatcgtgtggattccattttgatgagtgcaccgttcacctgcgccttgctgtgggtcaccggactgtgattcgcatgcctcgtgcatgaacaatgtggcatcgtgtgtatatcgcacggtgccacatgtcatatatgggggcaatcatcgttcaatatgcgttcgccatgggctaagacatgggccatctgattcgtatgcggcacgccgtatggtggattctgatatttctattgcatgtttgactattttctgatattgagagcgaagcgaacccatcatgaccacacagcatcctgacactccggaaaccggcattactcccggcggcacatcaggtgccttccgtgacgtgctatccaaggaccatgcccgccgtggcaagccgccgctgcactttgtggatatgacgcccgagcagcgcatcgagaaagcggccgaactcggattgccgaagttccgagtcaagcagctcgccaaccattactttggccatttcgatgtgaatgccgctgaattcactgattttccggcagccaagcgcagcgaggccgccgccgcgttcttcccgcagctcatcaccgaggtgacccgccaagtggcggacgaaggcaccaccatcaagaccttgtggaagctgttcgacggctccctcatcgaatcggtgcttatgcgatacccgacccgcaccacgctgtgcatttcctcgcaggtcggctgcggcatgggctgcccgttctgcgccaccggcaagcttggcctgacccgtaacatgtccaccggtgaaataatcgaacaggtgcgtgtggccgccaaaatgatgcgtgacggcgaagtggccgggggagagggccgcctgagcaacatcgtgttcatgggcatgggcgagccgatgggcaactacaactccgtgctgtccgccgtacgacagatttccgccatgcctcccgaaggcttcggcatttccgcgcgcaacatcaccgtatccacggtgggcgtggtgcccggcatcaagaagctcactgccgaaggcattcccgtgcgtctggccgtttccctgcatgcccccagcgacgaactgcgtgacgagctggtgccgatgaacaagcgtttcaacaccacgcaggtgttggatgccgcgcacgattattggctggcctccaagcgccgcgtcagtatcgaatacgcgctgatgcgcggcatcaacgaccaggccgagcatgcgcagttgctggccaagaggcttaaccattacggcgacaactgggcccacgtcaacccgattccgctcaaccccatcgagggctcgaagtggaccgcctccaagccgggagacgaacagcggttcctggagatcctgcaccgcgcgggcatcaccgccacactgcgtgacacccgcggccaggacattgacggtgcctgcgggcagttggccgctaaggagcggtagttacttcagcgcatccttgattgcgtccacgaagtagtccaaatcagcgggcttgcgggacgtgatgagcttgaaaccgttggcgtcgtccacgtgcagctgctcgtcgacgtaatggccgcccgcgttctcgatatcggcggcgatataacggcagggcgcggcggccttgagatcgcgcagcgggcgcgtcagctcggattctcatattccagaaacgggtgcggcgcatgtaacgggcggtaggtagtctgaaggactgtaatgcaaagccgaacaggggagtgaagcatgtcgttggcggtacgagtcatcccgtgcctggacgttgacgccggtcgcgtggtgaagggtgtgcatttcgaaaacctcaaggatgcgggcgacccggtggagctggcggccgaatactatcgtcagggcgccgacgagatcaccttcctggatgtgaccgcatccagctcccaccgcaacacgatgattgacgtggtctcccgcaccgccgaacaggtgttcattccgatgactgtgggcggcggcgtacgcacgcccgaggacgtcgactcgctgctgcgctgcggtgcagacaaggtcggtgtcaacacggcggccatcaatgacccgtcgcttatcagccgcgtggccgaccgtttcggcaaccaggtgctggtgctctccgtggacgcccgccgcgaaaagggcgagcaacacacgcaatccggcttcgaggtcaccacgatgggcggccgcaaatccaccggcattgatgccatctggtgggtcaagcgcgccgagcagcttggcgccggcgagattctgcttaactcgatggacgccgacggtaccaaggaaggctttgatctcgagatgattcgcgccgtgcgcaaggaagtcaagattccgatcatcgcctccggcggtgccggcaaggtcgaggacttcccgcccgccatcgaagcaggtgccgacgcggtgctggccgcatccgtattccattacggcatcctgaccatcgccgatgtcaaggcggaactcaagaagcacggctacaccgttcgctaaacgaatacaccttgctcccgctggacgaacaatccagtggattgttcgtagcagtgcgctatgcacatgtcgcacataatccgggagctgtcagcgaagctgactgagggtggtccacataaggaagataggtatgacagacactacatacgacaattccactgaactcgatccccgtattgccgcacgcctgaagcgtgacgccaagggcctggtcgctgccgtcatccagcagtacgacacacacgaggtgctgatggtcggctacatgaacgacgaggcattacgccgcacgctgaccaccggccgcgtgaccttctggtcccggtcccgtcaggaatactggcgcaagggtgatacctccggccatgtgcaatacgtcaagggcgtgtccctggattgcgacggagacgcactgctcgtcgaagtagaccaagtcggtgccgcctgccacaccggcaagcgcagctgcttcctcgaaggcggccccctgtccgtggtcgaaggccatcgcccggccgagcagtagaacgggcttccctgactgggggaagccgaacgaccgcgtactacgaaacaagacatcgagttgtaagtaaaggagcgaatatgagcgaatgcagcgtcaaacacctgaagtggggcgccacctggcccagtcgcggccacttccaccaacaggccgacgccggctaccgtgtgattccgatcgtgcgccgtctactcgccgactcgctcaccccggtcggcttctacgagcgtctcgccggcggccgatccggcaccttcatcctcgaatcggcggaatacggcggcacgtggagccgttacagcttcatcggcgtcaactcgatggcccagctgcgctccaacaacggtcaggccgactggctgggcaaggtcccggttggtgtgccagtcaccggtgacgtggtcgaagtcgctcacgccacgttgaagactctgaaggccccgcatgtggaaggcctgccgaacctgaccagcggtctggtcggcacggtcggctgggatgccatccgccactgggaaccgaccctgcgcgccgaagctccggacgagaccggccagcctgagaccgtgctcgccctggccaccgatatcgccgtggtcgaccacgtatccggttcggtgtggctcatcgccaacgcggtgaacgtggatgataaatccacccgcgccgacgtcgcctacaacgaggccgtcgctcgactcgaccagatgcagcacgatgccgccaccccggctccgggcgagtcccgcgtcaacatcttggacgaaacggtcgcccagcctgagctgcgcttccgcaccgagaaaagccactacgagcaggccgtcgaacgcgccaagcagcacatcgtcgacggcgacgtgtttcaggtggtcatctcccagcgtctcgacatcgattcgcctgccgacccgttcgacgtgtaccgtgtgttgcgcacgctgaacccgagcccgtacatgtatttcatggcgttgaccgatgctcagggccgcgacttcaacgtgatcggctccagcccggaaaccctcatcaaggtggacaacggccacgcgatgaccttcccgattgccggatcccgccctcgcggcgccacccctgaggaagacgaaaaattcgccaaggaattgcttgccgatccgaaggaacgcagcgagcacatcatgctcgtcgacctgtcccgcaacgacctgagcaaggtgtgcgtgccgcagtccgtggaagtcgtgcagctcatggacatcaagcgtttcagccacatcatgcacatctgctcgacggtcaccggcaaggtcgacccctcgctgaccgcattcgatgtgttcaagtccgcgttcccggccggcacgctttccggcgcgccaaagccgcgcgcagtcgaaatcatcgacgagttggaaccggccgaccgcggcatctacggcggcaccgtcggctacttcgatctctctggcaacatggacatggccatcgccatccgcaccgcgttcctgcgcgaccatgaggcgagcgtgcaggccggtgccggcattgtgctcgactccgtgcccgctaccgaatggcaggagacgcgcaacaaggccgaggccagcgtcgaatccatccagatcgccgcccagctgcgcgaactgtaacgttcaacgcatagcgatgcccctgctgacaactgctgtcagcaggggcataacaatatgcgtatcagtgggtttcgcccatgatgtcggtggcgtcggttccggtgctcacagcggcttcgatggcggcttcgatgccgcgcgccatggtcgcgatttccatggtcggcgtgccgttcggcttgcccacgccctgcgcggtcgcatacggcacatgaatgaagccgcccttgacgccggggaatttgcggtcaatcagatacaacacgttatacatgatgctgttgcacacatacgtgcctgccgtatacgacatgaatgcgggaatcccgtggtcattgatgttcctgaccatggccttgaccggcaacgtggcgaaatacgcggtgtcgccgtcctcacgcaacggcgtatcgaacggctgctcgccatcattatcgggaatacgcgcctcggccaaattaatggccactttctccacggtcagagccgaacggccaccagcctgaccaatgcacagcacatagtcaggctgctcgcgcaccatggcttcctcaaccacggtcgcactgcgcgtgaacaccgtcggaatctccagtttcaccactgtcgcaccggcgatttcatccggcaacagcttgactgcctcgaatgcggggttaaccggctcgccgccgaacggatcgaatccggtcaccagaatcttgctcatcattagctccttatttcacggattgttgtggtatttggacaacgaggttattgcgcgatcagcatatagacgatctgcaccacaatcatcaccaatgcgggcagcacctgcttcttaatcacgcccatgcggtccttcatatcgagcatcgcgacgggcacgatgttgaagttggcggccatcggcgtgcacagcgtgccgcagtagccacaggtcagcgccagaatgccaatcaccgccgggtccgcaccgaaggcgagcacgaatggcgcgccaatgcccacggtcattacggtaatcgcggcgaaggcattgcccatgatcatcgtgaacagcatcatgcccacaccgaatacgatgatgcccagcgtgacgttgcccttcggaataatgccgccgaccagcgtggcgatcacgtcgccgacacctgcggctgtgaaaatcgcgccgagactggccagcagcatcggcagcatgcagagcgcacccatggcagacaacaggcgttccgaatcgttgaggaatacgaccggcttgttgtcatgcgagaacgcgaacagaatcacggcggcaatcatcacaccgatgcagcagccggtcagggcgctgacgctgggaatcagggcgccgataatggcgaacacgcccagacacagggagggaataaagatgcgcatgccgatgcgctggaagttcgcggccacttcggcggtgctgggagcgctcgaatcggacgccgatcccttacgcacttggcggaagatggcgggaatgaccatgatgataatgagcacaccgtccgcaatggccggaatccaacggccgaacgcgatgacgataccgagcgccgtccagaacacgaaagtgccgtagcgggccttgttggttttatcgagtaggttgcgtacgcccgcatacacggacatgaaacccatgaaaatatagaagagctcgaggatcttggtgccaacggtcacgctggggtccatgaagaacgacatatcaggcctccttgccggtggtggtagcggtggcggcctgagcggcggcttcggcaccgtagtacttcttgcacagtcgtgtgtccttgatgatgtaatagacggctgtgaccgccacggcaatcaccgcgacaggaatctcgataatggccatgcgcaacagttcgacgtcataacccagcggcttcaacgtggactgcacgagcagcgcaccggccgtacccacgaacagcacctggccaaagaaccatgcgacgttctccataccggaagccatgcccttgagctcttccacatactcgtcgttcggctcgtgaccggacgcttcaatcgcacccaccgccatcggcatgatgaccggacgcacgaacccggccacgccaccaaaactcacgttgaacgcggcgaacacgagacgcatcacaccatacagggcgatcaccataccgggcgtcgcattcttcactttgccgatcagctgcgcggctgcggttttcagaccgttgcgctccaatgtaccggtgaccagcaacacgatgatgaaaatcgccatgctgcggttcgagacgaacgacgtacccaacgtggtcaggaagccgtcgacgccaatgccgccgaccagcgcagtcaccacagccgccacgataatgatcagaatcgcatcaagtttgagggcgaaacccacaatcacgatcacgattcccaataacacgagataatttggttccatgtgggaaatccttcctatactgcacacgcattgcgccgcaagcgtgcccggatatggatagtgtacgacggaaatcacgattcaactgtcttatcgcgcacattgcaggtattacatgagcctacgggcatataagcgtatggacgcatgagcgtcggctgagcccggtcggcatagtgttcgctatgatggacagtcggactttggtaagagacagtattcgtaacagacaagtaggttattcatggctattgaggtgcagggacttgaaattcagatcggcgcgcgcacgctgcttcaccccaccaacttccatgtggccaagggagacaagatcggtctggtgggccgcaacggcgccggcaagaccacgctgacccgcgtgatcaccggcgacatgttgcccaccgccggcaaggtgcgcgtctccggcaagctcggctacctgccgcaggacacgcacgcctctgatcccacgcagaccgctctcgaccgcatgatgagcgcgcgtgacatcgccaccatcatcaaccgcatccgcaaggccgaaaaggatatgaccgacccggatccggacgtgatgagcaaggccatgacccggtacgacaaggccatgcaggacttcgacaaggctggcggctacgcggcccagtccgaggcgatttccatggccgcctcgctcggcctgccgcaggaggtcatggagcagcagctcggcacgctctccggtggccagcgccgccgcatcgagctggcgcgcatcctgttctccaacgccgacacccttattctcgacgagccgaccaaccacttggatgccgattccatcgaatggctgcgcggctacttgaagaagtacgagggtggcttcctggtcatctcccactccaccgaactgctggacgaagtggtgaacaaggtctggcatctggatgcgcagctcggccagatcgacatgtattcgctcggctggaaggcctacctgcaccagcgcgtggtggacgaggagcgccgccgccgcgaacgcgaagtggccgagaagaaggccgaccgtctcatgaagcaaggcattcggctgcacgccaaggccaccaaggccgtggcagcgcagaacatgatgcgccgcgccgaaaagctgctggaaaacacctccgaggcgcagaaggccgagaaggtggcggacatccgtttccccgagcccgcgccctgcggccgcacgccgatcatggccaaggacatctccaaggcctacggttccaacatcgtgttcgccggcgtgaacctggccatcgacaagggctcgcgtgtggtgatcctcggttacaacggtgccggcaagaccaccacgctgcgcctgctggcccacatcgaggagccggacaccggttccgtggaatacggtcacggctgcaagatcggctacttcgcgcaggagcacgacaccttggatctgaacgccaccgtgttggagaacctgcagcatgtggcgcccgagctcgacaacacgcaggcccgttccattcttggctcgttcctgttctccggcgatgacgcgatgaaaccggcccatgtgctttccggcggtgagaagacccgtctggccttggccacgctggtcacctcgcgggccaatgtgctgctgctcgacgagcccaccaacaacctcgatcccgcctcccgtgaggagattctgaaggccattgccaagtatgagggcgccatcgtgctcgtcacccacgatgagggcgccgtcgaggcgctcaaccccgagcgcgtgctcctcatgcccgacggcgacgaagacctctggaatgattcgtacctcgaactcgtagccgaagaatagtcctaccgtggccccctaccgggagctgtcagcaaagaacgggttaaccctaggctcccctcgctgaggggagctggccgccgtaggcggtctgaggggagtctcgcaagcatgcaaaggaatcaaccatgccaaccacaacaggccagaagatcgccatcgtcaccggcagcgcgctgggtttgggctacgagctcgccagccaactcatcgccaagggctggctggtggccggcatcgacttcaacgccgaacgtcaggccgagctgagcgcgcagtggccagccgaatcctaccgcgccttcgtaggcgacatcaccgacgaagcgtttgtcaaggaatccgtggcgagcatcgccgcgctcggccacatcgacctgctcatcaacaacgccggccagccttcgttcaaggtgcccaccgcctatgaagccgctgacattgacaaatgcctcaaggggctcaaaggcatgattctgtggacggtggaaatcctcaaggcctgtggcgagcgcgacgtgaaaatcgcccagatcatgagcaccgccgccacgcgcggcaacgcgaacgaaagcgtgtactgcgccaccaagtggggcgagaagggctacaccaagagcctgcaggccgcatacaagggcaccagcgtcaaggtggtcgccgtctatccgggcggcatcgacaccgccttctaccgtgatagccacgattacgtgtccgaagccaagcagcacaccttcatgcagcccggtccgctggccgaggtcatcctcttcaacctgatcaacgaggccaacctcaccgtcaccgacatcgagatcaaccgcaacagctgagctggcaggttatacacatatccaccgattcggccgagctggttgcgcgcagaagttggttatgccatcgtgagttgtatccgtgaataacgcggttcacggatacaaccattggggggatggcatggagtcctatgcatacaacacgttcttcacacttgatgaggcgcgagacctcgcccagaaaacactggaacaatgccgtgccagatcgatgcgcacttcacaggagctttgcttcagccatggcaccaggctacagcttgctggcatgacggccacgctgaattacaagcccaactatgaccccaacaaactgcacgttacggtgtccggggctgaaagattgtcgaatcttaccgaaacgcaatgccattattggggtcatggcattgaccagacgatgattgatgatcttatcgccgtggtttcagtggaacaggcgctgtgtcagatcgcacagttcgtcgatgtggaaagtatggtcattgccttggattgggccacctgccgtaatgagcatttgaaacagacaacaaaagacaagatatcgttgttcctcaccgatataggtaggttccccggtatcagattatttcgcaaagcgctctcgttgtgcagagagaacaccgattcgccgcaggaaagcatccttcgccttgaatcggtaaaacgtggattacccgaattggaggtgaatgctccgatatacctcccgttgcagaacaaagaggtggttgtggacatggtgtatccgaatgatcatgtgattctggaatacgacggacggtaccactatgaccgaaaccgatgggaaggagatatcgagaaaaggaacaacctctccttcgcgggctataagacttttcccgccacaagaagaacgttcgctaccacgcagaatctggatgaatacttcagaatcgttggaagtgcaattgcggaataccgcaataccgggtcattttcacaatgagatatgaccggacgcattcattaggtcgattcttcattcattaggtcggtgagctctgacagtcaccactggaatggtgccattccaacaccgacaatcgcagcctcatgacctaatgaatgaagaatcgacctaatgaatgattggaagcgttccgcgcaacgttatggcacccgcaagaagccggaacccggaatatgtctgttatcgtgggagccaagcaacaggtgaaggattgagtatgcacatcggtgacgatgagtttgaacgggccattgaacaggtgttggatgatttgcctgaacggtttgcgcgggtgctggagaatgtcggcatcgtcgttgcggacgaacccaatgagcgcgaactggccacaatgagcaatccgtgcggtgagctgctcggactgtatgagggcatacccatcacaaagcgaaccacgggctacagcggcgtgatgccggacgtcatcaccctgttcaaggggtcgcatgaacgcgtatgctcaacacgggccgagctgcgccaacagattcgcaaaaccgtgttgcacgagatcggccattatttcggcttcgatgacgagtatctgcactcgcacggctactgaagcgctgctgtttcactagcggggagccgtcataccgccgtatgttgccagatctactgcaagtggtgcaacgcacggatgatggcgcaacggtcctcggtggttccctcgttggagcacatggtgtgcgtaccaacgcggattgcgcaaggtctcggcgccggtggcctcatccgtggcgacgagcgtgtgcagatcgttggcgtactggaaatgcaggtggctgagcagcccgccctcggcgaacgccttgcgcgaaggcagagggttgatggccagcagccagcggaacgggctgtcttcggcggccggatcagcggtgcggagcacgaaggtgggggagctttcgagcccgtgctcgatgacatggtcgatggcgtattcgtaagtgtcgaggctggtgtcgtcctcggcgaaccattcgatggcgagcgaggcattgtccgtggagccggattcggcggccgggcttgaagccagggccgcaatccggtgccgatacggttccaagtcaaacgcccgcaatcccatggcggccacgcagccgggggagagggacaggaattcatcggcctcgtaatcctgcacgatatgtccgccgtcgaataccacgtaccggtcggccacgccgttgagccatgcgagtcggtgatgaaacagggcagcatcatcgtgacgcccacggccagcgcggagacacatgcagccacggcagtcccagggcatcggggtcgagcattcccagcgcggtgagtacggcataggtcacgccgaagttcaacgcggttcgccatcgggcggccgccagcaggggcaacaggaacagcacgaccatgacgatttgcgtggcgagccctacatggaagaacagcatgaggttcgccaccagcagaaggaagagtctcgcgcgcggatcgagcgtccggcgggcaggaagatggagccgaagccgctggtgaacagggtgctcaccagtgtggcgatgcacaccatcacgaagtacagggccgcaaacacgccgatggtgatgaggtcggagacctccagtttgccggatttggcgggcttgttgagctggtcagaggtttcggcgggcgtgttcggtgcggtcacgatgttttccgtttcgtatgcattgacaatattcctctcgccaatctaacgatgatttcccgcaaggcaatagtctgtctgtgatttttgcgtgcgaaacaatagagctcccctctttgaaggggagcctgagtgttccatcaaaaccgaatgctcgcccggaactcgccttcggccggttggccgagttccagcctggctcccatcgcctcgcatgccgcactggcgatggacaggccgagccccacgccgggcacggcgctgatacgcgagttctcgccgcgatggaacggttgggtcagctcgttcagatcgtccggcagcatctcatccgtggtgttcgtgacggtcagacggggtccgcttccatcctcatccgatacgacggtcacgtcgatcgacccatcatccgtgttgtgcacgacggcattgcgcagcaggttgccgaccgccagttccagcaacgccgggtcggcggcgatgagaaacatgtccgcgtcgccgccggccttgttcacggttatggtgatgcgacgcttggtggcggcatcgtcgatatccgcaagggagttgccgacgcatccgtacaaatctgtggatgtgcgtgccgttgatgcgggactcatctgtgtcacatcgcccgcctgcttgccgccgatggtcccgctttggatacgggacaaggtcagcagcgcctgcaccagttgcgcgccgcgccgattggcatccagtgcgcgctgtaccgacggtcgcacatcctcggggaaccgcccctgggccaacggcgcgtccagattggtctccaccgcggcaatcggcgtgcgcagctcgtgcgaggcattggacacgaaccgccgctccgcttcggatgcggcctgaatccggtcgagcatgccgttgatggcgtcaccgagctgcgtgacttcggaggattggccggcagctcgaccgtccgtgcggctgtccgtgctatgatcccaatcctcggtcccgcgtctgcccgcacgccggaactggggcctacggcgagatggcggcccattcacgtcgatgcgcgtatcaagtttggccggatccaatgccgccgcctgcgcgctgatggaggtcagttgccgggacatgcgcgaggtgaccagccagatgatcagaatgctggtgatcccgaagaacacgaagatgatggccgcgctgatgcgcaatccggtggcgatgttgtcctggttccacacggagacgccatacggggtgttgatggtatacgacccgtccttgccccattccacctgatagtcaccgtcgcccatatcgccgccgacgctggatgttccagtgatatcgttcagacctgtgccgcttccccgggaaaacattcgcgggtcggaatccgggcgtttgccggtgccggaaccgctgtgctggctttcgacctgcatctcagggtttttggcggtgaccgtcgtggcgtacgtgaacatgctgttgaccacaatggtctgcacgagggtcgccgatcccatggcgatgaggaacacgagactgatggccaacgtcagtttggcgcggaatgatttgggccgcagtttgccggcaagcgcctgtatacgacctgatgctttcgccgtgttcgtcgccttcattgcagccggtatccttccccgcgtgtcgagacgatggcctcgcgatcggtgagtttgcgccgtagcgaatagatggtggttttgatcacgtcggtcgggtcggcggcggtcggctcatcccaaaccgcatcgtagagttcgtgcgcggtcacgtatccgccttccgcacgcatgagctccagcaatatgccgtactccttgggtgtgagtttgacgagcgtgcgcccgtggtcgcggaacacgagccggcgtgtggaatcgagggtgatgtcgccgcgcgtgagcacggctgcggtcgcgttgctggtcccgctgcgccgttgcagggcgcggatacgggccagcagttcgggataggcgaacggtttggtcaggtaatcgtcggcccctaggtccagcccgctcacgcggtcgctgacctcggcggcggccgtcagcatgattacggccacgggaatgcggttcgcggcgacggtggccatcaccgcgtcaccggacaataccggcagatcacggtcgagcagcatgatgtccacgttcgtgccggcaaggatcttcaacgcttcgacgccggtggttgccagactggtcgcgtacccctcgtagcgcagcgcgtcgtccaacgcggcggccagttcgcggtcgtcctcgacgatcagaatccgcatcatgtccccttccgagccttcccgaaccaatggcatcacccaacattttcccgattctacggtaaggcgaaagtaatccgtccgcttaccgacgctccacggtgagggcgattggatggaagtcgtcacaatcgactcacggaatggagacggtaatgtccactactcatacgcgcctggtacggcgaatcgcaatgcttacgtccgcactctcgctggcttcgatgctgggcgcctgctcgtcaccgctggcggcagtcggaacaggctcaggtgccgacgatcggtccgatgcgacgaccaccaccgacgccacggcgaagcgattcgccgcctgcctgaccggcaaaggattcgacgcgcgtacggctgctggcgtgtcgtccggctccggctcgggcaaacaagccccgaccaaaaacgcggtcgcactgcgcatgatcggcaccgacggcaagccggtcgcctcccaaggcaacagcctcagcgcatccgacgacggcccgcaactctacccgaacgctgcctacacgtcgatggaagacgacagcacctgggtggtgttcaaggacgccaaggcgctcgccggctcaccctacgaatccaaacagcgggaatacgccgactgcgaggccaagaaccccgacttcacccagcccattccggacatggggccgcaacaccagtattccggggaagacaagcaggcggcgctcgcctacgcccaggccgcgcgtaagaagggcttcgactgggtcaaggacccggacgccgatacgcccacctcaatcacgattcccggcaccgtaagcgaatccgaactgcgccgattcctcaaggaatgcccgaccgatggcgcgaacatctcctatgccttcgccggcaccaccgaggaattcggctatgactacaacaaagtcctctccgaattcacctccggcagcgcgtccaccgaagccgcgccccagcaatgagacggccatccgataacggacaaaggagcaatcatgacacggacggaagcgcgcagattcgggaaacaccgcagaatcgtgacgatgattatcgcggcgatcgccgtgatcggactggccgcggtgtgcgtggcggtgaggccgtggacgttggccgggcacgtcaccgcgaccgggcagactggccgatcgcagcaggtggatgtgtccacgctgcgcacgcaggaggtgaccaagggcgtactcaacgccgagacccggctcggcgcgagtctgcaatacgatgacgactccgatttcgcggccgcttccggcacaatcacccaactgccggtggccggcaaacagatcaacaccggcgaacaggtgtacgagatggacggcgcgcccgtgccgctgttccatggcgaccgcccgttctggcggacgatcggcgatggcgtctccgacggcccggacgtcacgcaactggagcagaacctgcaggaactcggattctacggcggcgaggtcggaccgcatttcaactggctgacccgcgaggcgatccggcaatggcagcgctcgctcggcctgaccggcgacgcggtcaccggcacattcgacccgaatacggtggccctggccgcggccgcaccaatccgcatcacggcggtgaacgcgaaactcggccaatcacaggtcagcccggcaagctatacgggcgtcaccctgcatgcgcaggccacgttgaccgccacgcaggcggcgatgttcaaagccggagacaaggcgcaggtcgtgctgccggacaacaccaccgtcgaaacgacgctcgcctcggtcgatcagggcgggcagaagaccggcgacaacgggcaagccacacagccatcggcgcgcatcgacttcccggaccagtcgcaggtggcggctttcgggccgacggccgtgcaagtcatcatcccgaacgccgatgcctcgaccggggaggcgctgatcgtgccggtgaccgcactgatcgccagcgccggcagcgcgtatgcggtcgaagcggtacgcggcggcaagttggtgcgtgtgccggtgtcaatcgggctggtgtccgacgcgcaagtgcaaatcaccaagtccgacggcctcaaggcgggagacaaggtggtggtctcatgaacgacatcgagtttgcccccgctggcccagagcatggggcattgctgacgttggagcatgtgacgaaggcgtttccaggcaaggacgggagcttgctggagatattgcatgatacatcgctggccatcgatcgcggcgagctcgtggccatcgtcgggccgtccggctcgggcaaaagcacgctgttgtcgttactgggcacgctggacatgccgacctcgggaataatgcgatacgacggcggggatgtgaatgcgatgggtgagcggcagcgcagcgtcctgcgggccgcgcgcatcggcttcgtgttccagcagttccatctgatcgccaccgtatccgccttggagaacgtgatgacaggcctgcaatacacaaccctgccgcgcggcgaacgtcggcaacgggccgccgaggcgttggaacaggtcggattggggaaccgcctgcatcaccggccggcccagttgtcgggcggcgaacagcagcgtgtggccatcgcccgcgccctggccaaacggccggacatcatcttcgccgacgagccgaccggcgcgctggactgcgaaaccggccacaccatcgtcgacctgctgcttacggcggccgattccggcgcaagcctggtcatggtcacccacgaccagaccatcgccgcacgtttccccaggcgtctgcacatccaagacggcctagtcaccgaactcgacaagccgaatcaagccccctctgacgaggggctgtcagccaaaggctgactgggggagagatatgagtgaacgtactcctatgagtaaaccaatacgcacgcgaattgcggatttgatgcatgcggcttgggttggggccgccgggcgggcgtcccgcacgatgttggcatcgctgggcatcgcgcttggcgtggccgcatatgtggcgttgtccggcatcgccgcatcgaaccaggcagcgctcctcgcccaactcgacgcgcttggcgcgaatctgtcggtggtcgcccccggcgtggacgccgcccagcagaaggttccgctgccggattacgcgcccacaaccatcgcccgtcagccgcaggtcgaacgggtcggtgtcttcgacaccgcgccagagaaggtgcagatcttcaagaacgggctgtgccccaaaaccaacggcaacgcgctggccctcgccatcatgcggcccggcgcactcgacgccgtcggagcaagcctcgcccaaggtcatggcatcgacgcgaacaacgagcacctgcccgtcgccgtgctcggctcggacgccgcctaccggctcggcgtcaacgagcccggcgaccgcatcctcatcgacaacgcatggtacggcgtcatcggcatcctgaaccccacgccgcaggctgaaaacctgaacgccgccgtcatcatcggcgagcaatgggcgctcggccggtaccccgaccagaccgacaccatcggacggatcagcgccatctacgtgcgcaccacgcccggcgacgccgaaggcacccgccgcacgctcgcccacgccgccaacccggccggcggcaacgtgtccgtcaccgcgtccgccgacctatccaaagcgcgcaacaccaccaacgattcactgaccacgctcggcctgatgatcggcgtgatcgcgctggccgtgggcggcatgagcatcgccaacatgatgattgtcaccgtgatggaacgtcgcggcgaaatcggcctgagacgcgcgcttggcgccacgcccggcaacatccgcatgcaattcgtcaccgaagcggccctcctgtccacactcggcggattcgccggcatcgcgctcggcgccggcgctgccatcggcgtcgccgccagtgccggccagccgatcgccctcgactggacctccctgccgctcgcctgggccgccgccatcctggtcggcatcctcgccggcctctacccggcctcccgcgccgcccgtctcaccccgaccgaggccctgcgcggcgaataggggcgacggctggagtgaacgatcaccatgagtgcgcagcctcaatgtcacttttactgcacatgatgacatgtgcagtaaaagtgacatattggtgctgggcgggagagagcacgcgtggcgcgggtgggacgcggattcgcggctatcggctagtatggtgcggtcacgacagagggaggcatgctgtggccgatgtgatgcgggagctggaacggctgcgaccggtgtatgagacgggcgtcctgcggttgctgttgcgccagaacgcgatgctgtacgtgtcgctgctgcgttccacgttcgacccgctcaccggcgagctgccgcgcgagaccgtggaggagcggttcgcgcaaagtctgaacgctctggccgacgccggcgaatatgcgccgcgcgaggaccagaccttcgccgaggccgcccatcagatcctcgccgacctgacccgtgaaggcgaaggcgactacgcctggctcgccaactcgcatgatgcggccacacaccgattcctctaccgtttgacggcccgcgcccaccgcgccatcgaggcgctgagcaggctcgaagacgaatcacgcgccctgtccggcgcgcaggccaacagcatcatcatggaaatcgaacacgcgcgcatgcagctgaccgccgaccccggcgagcgcatcaaacttctcaaccgtgaaatcaaggaacgcaagcacgagatcaaacgcatccaacagggcaagcagcacgccacgctgagcgaagcccaagtggaggacgtgatcgccgtgatccacaacacgctgcgcggcgtgcccatcgacctgcgcgaactcgtgctcgacgagcgggacaacggcgacgccttgcgccggcgcatgcagaccggcgacatcagcgtggacgagaacctgacccgctaccacgacgaataccgccgctcgttcagcgaatcggacagcggccgccgcttcgaggacgccttccaggtgatcatcaccgacgagggccgccagcaaatcgacgaagccctgcgcgccatcgccaaaaccccgtatctggccggcgaatccggcgtgctgctcggccagatccgcgacgaactggcccgcatctacgacggcatcgaagccgtgcgccgccagatgcgcgtctccgacgaggcgatcagccggctcgtgcgccagcaaaccgacactcgctaccgtacgatgctcacccgcttgaaccgactgtacgcgcgcctcaacgcggatgcgaaaacccatatgggagacgcctcgcgcccgtacgacacggccaccgcggacgcgctgttcgcgccattgccgatgcgcccggccaaatccatgacccgcgccaccgcacccggcctgagcgacctcgccgccgaagccccgcaggcgactccggtggccgatctgcgggatatggtcaacagcggcggcccccgattcctgcgcatggtcagcctcatccggcgcaacccggtgaccgttgacaggtccgatgacaggtccaacgcaaccctcgtggacatcgccgccagcttcaaccggctgcccgaaagcgaacgccgcgaaagcgagatcgtcggcttcctgggcgggctgggagccgtaagcggcagcgccatcgccgacgagccgtccactgacggcgtcggcatcgacagcgacatcgccaccgagccggccccggcgcagcgcggcgataccgcgacttggcattgcgtatcgatcgacggcgagccccggcactggatcactagaccggtgctggccgacatggacgagctgaacatcattgtggaggaaggatgaccgtggccgaggaacacgaggagcacatggacaacgccaacccgtacgccctgttcgaaggcgacaccggcgacatgccggccgaggcacgcatggccgccatcgccctcaaacgcgaccgctatatcagcgggcccacctacgacaccgtgctcgacaaccgcgacgccgtcgtacgctccctgaacaacgacctgctcgacttggtgatcaacgaacgctaccgcatcatgtacgccacgcccgtggccggcgacgacgtgaccctgcgctcgctcaaaacccgtgtcagcctcaaacgcgaggaggccgcgctgctcgccttcctgcgcatccgcgtcctcgaatacgagaacgtgcacgccgaccccgccgactggctcgtcagctttgaggagatccgcgccgcgctcgccaccggcgccggttacctggcagcccgcaatgacgaggaaggcgtggcaaagcagatcggcgccatcgtctccgcgatgatcacctacgggtatttggcgcgcctggacgacgaagccatgtaccagatcacgccgctcgtgcccgtggtgctcgaccgcgaactggccgacacctggctcgacgtcgcggaacacggcgacggcgacacggaagatggcgatgacgacgagaagggagccgaatgatgcaggcgacagacgtgcagatgatcgcggaccggtggatgctggaatcccgccgactcatcaactggggctcctatgagggctaccacgaattccgcccctccacggaccacaagctgccggtgaccctgctcgccggcgccagcgaatccggcaaatccacgctggtcgacgcgcagatctccctgctgtacccgaccggcacgccgttcaacaaggcctcgaactccggccgctccgaacgcagcgactacacctacctgcgcggcatggtcggcgtgggcagcaccgaaaccggcgacgagccgctctacctgcgcggtcgcgacgagaacggcgcgccgcaacccgtgtggggcgccatcgtggacacctatcgcaaccagaccaccggccaggtgctttcctgcgccaaattcctctacctgatgcccggcgacggccgcggcgacgtgcgccgccagtacgtggtctggggcaagcccgtggaccccaggcgcatggaccaataccgtgacgccccgttcacgccagcccagctcaaagccacctaccccgactgcctcacattccccagcgccgaagcgttccacacacacatctggagcgcaatgggcctgagcgaggccgcctgccgactgctgcacaagatccagtccgccgacgcgccctcccggctcgacgacatcttcaaacaaggcgtgctcggcgtgcccgaagccctggacctggcccgcaccacggtcgaggactacgaacgttacgacgagaacttccacgccatggacgagaagacccgccgcatggacacgctgcgcggcatccaacaggcctacggcgaatacgccgccgcacgcggcaaggcccgcgccttcgaaccggtcaagccggccgtcgacggcacggtgccggccgtgctgcgcgactgggcattggcccgcatgcgcggcgaagtcgccgtccaactgcccgccgaccgcgccgaacaacagaacagcgaggcggaagccaagctgctgcgccgccgaaccgaagacctgcgcacccgcctcgacatgatccgaggccagatgcagggtctggacggcggcaacctgacccgactcgaactcgaactcgaccaggcccgccgcaccctcgaagacatgcaagccaaccgaacacgaatcgaacaaacgttcgcatccatcggtgagacgctgcccggcaacgaacagtcctggaacgaacgccgcatcaacgccgtgaacttcaaacgcgaatacaacaaacgagacggcgaatgcgaggaagccctcaccgccgccatcaacgcacgggccggcgcacgcggcgacctcgaacgactgcaacgcgacttcgaccggcaacgctcccagcgcacccgcatctcccagcagatggacgaaacccgcgccatgctctgccgcgccaccggactcgcccccgccgaactgccgtacgtggccgaactcatggacgtgaacgaacacgaggaagactggcgtctcgccatgaacgtcgcctacgcgcccatcgcccagaccatcctcgtcgacaagcgccacgaacagggcttcgccgcaaaagtcagcaccatcgacccgcgcaccatgccccgacgcacctggcagttcgtggacaccgcacgccactacgacgacaccggcgcgcacgcgaacatactcaccggagaacaggacggcgactggctgtccggcaaactgcgctaccgcgacgactcgcccttcgccgactggctgcgctcgcagacccaggacgaacgattcgacgccctatgcgtcaccgccatcgacgacaccgaccgcaccaaccgtcaggtgcaggccgacggtcagatcaaatccggcgcacgcggccagcacggcaccaaagaccgcgcccaggtcatcggattcgtcaacgaaacctacctcaacgcgctcgcagcgcaggtcgacgccgcccgcaacgcgctcagccaagccgacaccgactacacggccgccaaaacacagtccgataacctccaccgcgaactcgaactggccaaccagctcgcctacacgtcctgggaacgcatcgacatcgccggcgcgcaacggaccatcacggacacgcaggacgccatcgcatccatcaaaaacgatcccaaactcgccgaactcgccaaacagcgcgacgaactgaacgccgaactcgaccgtgtggaacgccagcgcatcgaatccgaccaggccgcggcccgcgccggcagcgccgtcgaagcggcgctcatctggctgcgcgaccatgccgacaccggcacgacggacgccgccggtgccaccgccgacaatgacgatgacgccgcttccggcccgctgccggacgaagtcacggcggcgctcgccgaatcctacgacaaccgattcgccgggctggcggacgcggccatgcgcgcgcacatgatcatcggcgcgggcgtggccggaacgcaggcgccgggggagagcttccccgaacgcaccatcgccggcatcggcaaggacatggcctcccgcatcaatctgctgaacggccaggccgacgccgcgcgcaccggcgtcgaatcgaaaatgagcacctacatcgcgctctacgcggccgacgatgattcgctgaccgccagcgtggaggactaccggtactatctcgacgaactcgccagcctcacccagctggccgcggttgccgccaccgacgccgaataccggcgctgcctcgaacagctgctcaggagcttcctgaccatcaaacgcgccatcgacacggatgccagcgacatccacgaccagcttgaccgcatcaacgccatgctcaagggccaacagttcggccccaagcacggcagcctgtccctgcacgcggacgtgcgccgtcccgagcgcaccttctgggcgcagctcatccgcgtcatcggcaccctgaacgattggaaatccgccgacgtcaacgattccgacgcctcgcgcaaggccttcgcggcctgcgcgccgatggtcgggctgctgcgcgccgaactcgcgcaggtcaaggacacgaacggcgtgaaaagctacggcgcccgcaacctcgacccgcgctgccgctcgtccttctacgccatcgtgcatcatgccgacggtccggacgaacgcatcacctccaccggcggccgttcgggcggcgccttgcaggagctcacctcattcgtatacggcgcggcgctcatctacctgctcggcggcggcctgaccagcgaaccctcgtacaccacgctgttcctcgacgaggcgctcatcaaggccgacggccgttacacgcagcgcgccctcacggtgctgccgcgcctcggattccaggtcatcgtctccgccccggaaagcaagaccggtgaaatcctcgaggtctccaccaaggcctacgtgacctacaaggaccccgacaccggcctcacctccctgtgcgaggccgtgctgcatcagaatgacatggacgatgaatcatcgtcggatatattgaaggatgacggggttgccgaatgagcagtcccggcgtcgccggtattaagacgattcggttcgactcgacgatgttcgaaagcaggtgatgggaactatggccggcatgaaagacatcgctgcgatcaccacatgcgtgaagaaacatatgcgttcacatatgtacgacatcgaaccggcatggccatttcccgtgccggtgggattgccggaccaagcatttttggaaaccaatgcgattgcagtgcatgacaacaacaatgagatacggcaatgggcaagcaagaatggttgcgaaatcataaccaagcatcgcaccataggcacctctgtcgagttgatctccaaagtcgtcgttcctgacgaatcaatagccatgcgtgtgggtggtcgtacgctggcggcggtatatcgcgacgcgccccgtcgctcggattccactgcctggaggcagcggc

SEQ ID NO: 1644 - DNA, 9409 bp, Unknown
  R221_24m  MAG No. k141_109177
ctttcaaagcggtgctcgcgcatcgtcatttcacggatgggcccgccgccgccatcgccatagccgaataacaagatacctcggtcggagaggtccttgtccttgtagttgctctgcacgtaggccatgtcgtgcgcggacatgtcggaatcatatttgtcggcgggtgggaagtgggtgaagatctgtgacccgttgactccctcccacatgaaggagtgatgcggcaggcgtgtggtgtcgttccagcacaacttctgggtgaggaaccatgagtagccggagcgcttggcgatctgcggccatgcgccggtatagccgaagctgtccggcagccagatgccgttcggcacgacgccgagcttctccttgaagtatcgcttgccataactgatctgacgaatcagcgattcgccgcacggcatggtgccgtcggattcgacccacatgccgccgaccggtatgaggcgcccttccgcgatgcgggtcttgacgcgttcaaacaggtcggggtggcgttcctcgagccatgcgaaatgctgggcggcgctcatcacgtaggtgaagtccgggtcgatatccatcagcgcgagtgcgttggatacggtgcgcccgaccttgcgttcggtttcgcgcaccggccacagccatgcggagtcgatatgcgagtgacccattgcggtcagggtcatggccgaggcattggcggggttgtgcatcaccttgtcgagcgcctttcgagccaaggcgagcgtgttgtagtctttctcgtcccacaggttgatggatcgctgcatggccttggcgagcttccaatagcgcgggtcagcgtcgttcatgttttcgagagatccggtgacgacgtcaaggtcggcccagtagtcgaacatgtcctgatccagagcggcgatatcgatggaactgaactcatagcgttcgtctgctttgccggtgggcttggtgcccagctcggtaacggtaaacgacgggacattagggttgtaagcgccttcgacgtaaaccacgaaagagccgtcaggattgaccacacgatccttgacaccgtcagcggagacaagcggcatccagtggttgcgtgggtgcagtgccttgatgacggtgccatcggcacggtatgccatggcctcaatgtgaccgccgacgggccattcgagccaaccaaggttgaacaccagctcgatggctcgcccctcgggcagggtttcgggcaactgtccctcgacacgcatccaggtcgtgccccatgaggttccccagggttcgcctacagcgagcggctgaaaattgacctgcccagacactgcgcgcgtaatgaacgcagcgggcatctccggttctcccgggttcttgaccgcgccgaccgtgcactgtgcaagcacctgatggatatgcggccaaacacgctcccgcataacgcgcttgcaacgatcaatctcgcgattgactttgagcagcatagctctccttttgtcgtgtacttttcgctgagactaaagcgacttagctgaccaccatggtcattcgccggttactaaagcgatttagttagagaataacacgatgcatgcacgaacgcaacatcaccgtgtcacatgtcgcatatcgttaccccacctcccatccccgccataacgcgcaatcgcgcgcgaccatgcagcatctcggaggaatccgattcccgcatgatcgagcgcgattgcaatatcggggttaagaccatctgtccctatcgccgaatacgcaatgtgacgatctggaacggcgcgaacgagacggatgcaccctcagcgggcaccggccctccggcgaccagcgcacggggcagatcatcggccagcaccggctcctccatgagattcacctcctccaccgtgcatcctgcgaacgtatcatcaaggcgcagcgttgccttggcgtcgcccccggcggcctcatatagacgcactataagatcgccggaactatcgtcggccagcttcacccaatccagtaccggcgtgccggcaacatcggtgagcgtagccagcggtctcacggccggcagctcatccataatcggcgcgttgagacgagatgcttcggccagcaccgattccataccggcaccggcaaccaacgaccaggcgaagaaatgctctccctggtcggtgcgtggatcgggatatagtggcgcggacagcagtgaaatccggaccatcgtgccacgtcccgcaccacaagcatcttgcgtatgcaatgggctcacatctgagccatacgtggaggcgttgaccacagcggcggcatagtcggcatcggcgatacgtacgaagcggtgtgtgcagctttcgaatttggcatcatcgctgcgcgtgttcttgttgatcggacgttcgaccaacccgtactggcattcgtactgcgcgttcaccgcctgcaccgtgaccggcatatccaccttgaggaacttctccacggcatgccaatccacgtcggcggtaaaatcaagactgccggaccccgggcgcaacgtgatgacggtatggatctcaacaccgcgcgcacgggtgacgacgtgaatcgcagccgagccgtcgggcatatcttccacatgctcgaccatggcgtcggtgagcgtatcggcggcgaggaacgcatcacgctggatatcccatgcatcccaatggaatggctcatccttcaacagctcatagcgccccatgcggacaccggatggcacaagttcacgacgcaaagcgagatcgatcagggatgagacggtgccatccgcctcaatacgcacacgaagacgtccgttgtcaagtatgatggcgtttccgtcacgctcgacggaaaccggaatgacagactcttccacagccgttccaccaccgtcacgcacagcccatgaatactgcggattgcttgcatatggcgcaatcacggcatgcttcaccgtcgctatgcctggctcggcctctttaacggcctggccggcagccgcagcgatgtcacgcagacgtgcgatgtcacgcgcgtattcctcgcgtgcctgacggtgcacccatgcgatggcggaaccgggcagaatgtcgtggaactggttgagcagcagggtcttccagataaggtccagttcctcacgaggatagacgtaacctgggttcttgatactggccacggcgcacaggtattcggtgacgcgcagcatcgactcctcctggcggcagccgcgcttcatgtcctgctgggcggtgagggtagcgcggtgcagttcaaggtacagttcgcccttgaacaccggggtctccccttgcgcatcgtcgacgatatccttacgcacacggtcgaacagttggtcgggagtaccgaattcgatcttcggcgcgccggcgagatcatggtcgcggcggatgcgcgcggtcatctcacgggtggggccgccaccgccatcgccgaagccgtacagcagaatcgcgttacgggagaggtccttgtccaggaagttgcgctgcgaatacatcagctcgcgcatgctcatccacgagcagtaggtatccgagggcgggaagtgcgtgagaatacgcgtgccatcgatgccctcccacatgaacgagtggtgcgggaacttggtggtgtcgttccacgagatcttctgcgtaaggaaccagtcgaatcctgcacggcgggcgatctgcggccaagagccggtgtagccgaaactgtccggtagccagacgccgcgcggcgcgacgccgagatgctccttgaaatatcggcggccgaacgtgatctgccgcaccaatgattcgccggaaggaatcatgttgtcggattccacccacatgccgccgaccgggatgaagcggccctcttcgatgcgccgcttcattcgtgcgaacaggtcgggatgctcctcttccagccatgcgtactgttgggcggaactcatcgcatacgtgaagtccgggtcttcgtccatcaaagccagcacgttggatacggtacgggccaccttgcggcgggtctcgcgcaccggccacagccatgcggagtcgatatgcgcgtggccgatggcgatgtgtttgattgcgctggaggcggccggttcggcgagtacgccggcgagcgccgcacgggctgccgacacggtttccaagtcgcgttcatcgtagatgttcagggagcgttgcagtgctttggcgagctgccagtagcgtgggtcgtcgtccttgagctcacgaatcagcgaggagacggtttccagatccatgtagtaggcgaacacgtcttcgttgaagatggtgacgtccatacgactcagtgtgtatgggaaatcacaggtgccggtggcctcttcgccgagttcagtgggtgagaacggggtggggccttcgacgaatgggttggcggcggcttcgatatagacggtgaagtcgccatgctcatcgagttcgacagtgctgccaccgtccgcgtagacgagtggaatccagtggttgcgtgggttcgcggatttgatggcggtgccgtcggcacgatagacaagtccctcggattggaatccggggccgcggtgatcgagccagccgaggtctaccatgagttcgacttttcgtcctttgaccgccgccatgtcgatatggccgttcacctcgaaccatgtggtgccccatgtggtgccccagactccgggaacgcggaaaggttcgaagggcacttggccgttgcgcactttggctagaaattcgctggagggcaccggttcgccgggattgtggaacgaacgcaaggcgcatgcggcgagtgtggtgtggatatgcggtttgacgcgctgctgcatgacgcggtcgcagcgctccaactgctgattgggcagaagaaacatggagagttcaactcctttgctgtgtctggtggtaggggtgggagtgatggtaattggagaaaccgtaatacgacatacttctgccccctcatggtacaaggaggcagaagcgtcaggcgaaaattcagcgcgtgatacgcagggtggcgagctggaacgggccgaagtgcagtgtggcgccttcggcgttctgtgtgccgtcttgcagcgcgaccggcaggtcggcggccaaatcgtcgccttccagcacgttggtctcatgcaccgaagcgcctgcgagcgccgggcagacgtgcagcgtggcatcggccctgccgccggccgcctcataggcgcgcacaatcaggtcgccggagccatcgtcggccagctttatccagtccaacaccacggtgccgtttgctgactcgatcgaggcgagcggcgctaagtcgggcatgtcatgaagcgtcggtgcgttgagtgcgcaagcggcgtcaagcgcacggcccaccgtggcgttggccaccacggaccagtcgaactcgtgcgagccgatatcggtgcgcgggtcggggaaggtcggcgcggagagcaatgacagtcggaacatggtgcccgagtcacaaccttcggcggcattcccggcgatcggcgtggcatcggacccgtataccgatccgttgatgacggccgcggcgtaaccggcatcgccgataatggcgaaacggttcgtgctgctctcatacttggcttcgtcggatgcggtgtttttgacgattgggcggcggaccagaccatactggcagtcgtatgtcgcttggtcggccacgatacccagcggcagatcgactttgaggaagcgttcacgttcgtgccagtcaatgtcggcgtggaaatcgagcgtgtgtgaacccgggtgcagcgtgatggtggtggtgatgacggtgtcatcgtcggcggtacgcacgcggactcgtgccgcaccgttttcagtatcgaccgattcgattgatccggtcatggcattcgccatgagcagggattcgcgttcgatctcccaggcatcccaaacggcgggttcgtccttcaacagttcgtattggcccaatcgggtgccggccggaaccagttcacggccatgctcctcgtcaagcagtgacgagattgtaccgtcggcctcgatggtgacggacagtacgccgttggccagcagtacacggccgttgtccaatgtctgggtcagtacggaaagcgcgtcggtcggttcgttgatgcggttggcatgccaagacgcgccgtcattgcggaactggctgatgcgggcctcggcgagcaggtcggcctgcgggttggccttgcgcagcacggcgcacatgtcttgggcgatttcagcgagacgcttcaggtcgcggcgatagtcctcgcgggcttcgcggtgcacccatgcgatggccgagccgggcaggatgtcgtggaactggttcagcagcagcgtcttccatatgcggtccagctcctcgcgcgggtagacgtactccggatcggacaacacggcggctgcgcccaggtattcgaccgtgcgcaacagcgattcctcttggcggcagccgcgtttcatgtcctgctgcgaggtcaaggtgccacggtgcagttcgagatacagctcgcccttccagacgggcatttctgggccggcgttctctgcaagctgctgatgcgccttgtcgaagaagtcattcggctcttcgatgctcaccttggagacgccttcgaggttctcgtagcggtgcaggtgctccatcatgttgcgcgtggggccgccaccgccatcaccgaaaccgaagagcagaagcgagcggtcggagagatccttgtcctggaagttcttctcggcgtagtcgagttcctggaccttgcaccaagcagcataagtatccgccggcgggaagtgggtgaagatgcgcgagccgtcgatgccttcccacatgaacgagtggtgcgggaacttggtggtatcgttccacgagatcttctgcgtgaggaaccattcgtacccggcacggcgggcgatctgtggccatgcgccggtgtagccgaagctgtccggcagccatacgcccttgggctccacaccaagatgttccttgaagtatttgcggccatatgcaatctggcggatcagtgactcaccggcgggcaacatgccatcggcttccacccacatgccgccgaccgggatgaaccggccttcttcaatgcgccgcttcatgcgcttgaagatgtccggatgatcctcttccagccaggcgtactgctgggcggagctcatcgcgtatttgaagtcggggtcggcgtccatcagcgccaatgcgttggatacggtgcgggccaccttgcggcgggtctcgcgcaccggccacagccatgcggagtcgatatgcgcgtggccgatggcgctgacgttcatggccgaggcattggccggcttggccagtacgccggcgagtgctgcgcgcgcggcttccacggattcggggttgcgctcgtcgtaggcgttcagcgaacgctgcaatgctttggcgagttgccagtagcgcggcgactgtttgtcggcgaattccatcagggagctcaccacgtcgagatcgacggagtagttctcgtagcgttcatcgaattcggccagatcggcggacttgaatacgtacggctcgtccggcttgccggtggcatggtcgcccagttcggtctcaatgaacggaggcacgccgagcagcagcgggttgctggcggcttcgaggtacagggtgaagctgccgtcttcggcgaccggcacttgcgcgttgccctcagcatccatgaacggcacccaatagttgagcgggtgtacggctttgatggcggtgccgtcggcacggtagacgaggccctcgatatggccgccgcaggagtgcgggtaccagccgaggtcgaggatgagctccagcggcttgcctttcgggtagccggccggcacggtaccggtcaggcggaaccagactgtgccccatgtggtgccccattcaccgccgagcgtaaacggcttgaagtcgatgtcacctcgattgagcttctcgaagaactcgtcagtgggcatcggctctccgggaatgtcaaaggactccaccgcaagctgtgcgatcgatgggtggatatgagggtccacgcgctggcgcactatgcgcttgcaccgctccagttgctgttcaggtttcaggaacatctgctgttcactccccttatctctgccgcttgtgcggccacatcattgtgctgcccgttcatgggaaacatatcgacatgcgccctcgcccgcagaagactaaagcgctttagtaacatattggagggaacaggatatgatgtcaaatcactatcgcaattcagcgtgttccgtcaggcatgtcatgctcggtgtcgatgacgatggtcaccggcccgtcattgaccagtccgacccgcatatgcgcaccgaaacgaccttccttcaccggcactcccccggagcgcaacgcctcatcgaacttgatccacatgaaatcggcatgctcgggcttgccggccttgatgaagctcgggcgattgcccttgtgcacgtcggcgaacagcgtgaactgcgagatggagagaatctcgccgccgatgtcctggatcgaacggttcatcttgccctgcgcatcctcgaacaccctgagattcagaatcttatgggccagccaggcgatctgcttgtcgccgtcctcatcggtgacgcccaccagaatcatgaatcccgggccaatctgctgcggctcgaacgtgggatccagcgtgcccaattcattgaccacgtccacggacgcttcggacactcgttgcaatacgactttcatggttccctacagtacaacgtgtgcagtcatcaccaccgaaccatgccaatactgcggcagccagcaggtcgaggcaccatggacgctctgccaaggttgaccgcaggccgcgcacccgcaggataatcggcgtctgccccgaatgcagacgcgaagtgatggccgcgaagggcgaggcgctgcgcctgtgcaggtgcggcaatcccatcaacgtgcaggagctgcgcgagcagagccgcgacaaggccgaggcaatacacctgaccaagacaccggcaggcatgagccaatggctcaagggaaactacgggtacgaggtcagccgtaagcggatcagcaactggctcaaccggggcaaactccccagctcgagacccgtcgatgacggctaccgggagttcaacatacgggagattcttgcgttggctatgggctccagcggccattcggcttgacatgatgtagtctgtaggatacaatagaggtatggaaatcaagcaatccgccgaataccgcaagtggttcaagaaactcagggaccacaaagcgaaggcctccatccaagcccggctcgatgcctgcaagctcgcaggcaggccattcggcgacatcaaacccgtgggaggcc

SEQ ID NO: 1645 - DNA, 18038 bp, Unknown
  R221_24m  MAG No. k141_112085
ctgctggccctgtcatgcctgctgctgatgaccgggcaggtcatcgacgtggcctccgaagtgttcgaggtggatgcggccggcgacgacgatgacatgctcgtcaagtacagcggctatgtcgccgtgattgccagcgtggccggtacgttgctgggccaggttgccggatcggccttggccaacgcctccatcatggccatgctgctcacctcgtcggcactgtcatttgcctgcgcgctgacgcgattccgcacccgcgagttcatgccgggattcggcaacgatggtgcgggcggcgatgacggcgacggctccgccgacgaatccacggcggccgacacgtcacacgcgccgcagcgcactccggtcacccgcttgacccgggtcagactgctgatcgcatcgctgctgcttgcgctgattccgtcgctgtgggcaagctatgcgttgctgggcatcggctcccggtacggcagcgatatgctgaccgtggtctacgcattcggcggcgtgggcagcatcgtcggatcgtttgtctacatgcggctctccgcaaaactcggcatgcgcgccgtgtccgccatcggggcaatcgccacggcgatttcccttgccgccgtactggttcccgagtttgccgcggtgtgcgtcggatggctcatcaacaacctcggctatggcctgctggcgcatggcgtgatcgtatcgcgacaactgctgctgagcggtggtgacctggccaaattcagcggccgtgccaggttcgcgtatgcgatcggcggtgccgtcggcacgtggggcggctggctcggctccgcccactggcagatactcgccgtcgtggccctggtactgtgcgccggattcatcccgttgctcaaggccatgcctggcccggtacggcactgaggtgacggatggggccggctggcatctcgtgcgccgggcgatttcggcagattttgccgtgctgatgtatgcaggtgttgacgttcggcgaggttcccagccacattgctgtgtgattgatgccgctcgataggcatgtcaggccggacacaccacggcgatgccgaatgggcgacgggccgacgacccgcatcatcgcagcagccgggttttgccatccttgacaagcagggcctgccggttggtgaggggcttgagactgagatcggcaccataccggtcgagaatgcgttgtgcggcgtggcccatggccgttgcatgatggtgggggaccacgcggaaatcagccaagcccaatcctgcgtaatcggtgagatcgggggctttgtccgtgcggtccatgagcttgatatagccgatgtcaggtgccgtgatgaccgagcccgcggactcgccgatgtacggcgtgccggcgcgcacctgctcgatgatggcccggtcggcaccggtgcggcgcaactcctgcaggagaaagaacgtgttgccgccgcccacatagatgcagtcggcctcggcgatgctacgcgtgacgcgttcggcggacccgctcggcacatcttccacatccagttgctccacctcgaaaccgaggcgttgcagcgcgtgtttgctcaacgccgagtgaaccggcccccacggttccacggcgctcgccgtcgggatgaacgcgacccgcttgccttgcggatgcggttcgacttcatgcacggcggacgaggcgttgcggaatatcgaagtcagcagcatcgtaaccataaaagccttcttcacatatcgactaggcgactatgcggcagtgtcggccttgaatatacggaagtgttcgtgcgttcgctctgggtatatccggcctgatcagcgggactcggccaatgtgatgccggccgccgtcatctgtttgcgggccgcgacaccgagctcctcgctgaccggtacggtcaggtcctcgaacacggtgacctcgaaaccgaacttcctggcatcgagcgcggtgtccttgacgcaatgcgattcggcgatgcccaccacatccacgtgactcacgccggcggccttcagcgcattggccagcgtcttgccggcggattgctcggccgcaacctcctcgcgggtctggatacggtcggtattgtcctcgatgccctcaaaaccggaatatgccgccgaatactggcccttcttgaaatgatgatggataatcagcgccttgatcgccggatgcaattcggcgttcggcgtgccggccgcaccatgcttcggccacgtgtccacgaaatccggttccgccgaccagtgcgcgcccggctcgatatgccagtcctgcgtggttgcgatatacgcgtactcgctgcgatgcgcgttcacataatcggcgatccgctcggcgaccgcgttgccgccttcgactcccagttcgccgccttcacagaacgtcggctgcatatccaccacaatcagtgccttggtcatcatcattccccctattgccttggattcgttttgaatattgtctcgaactcgacgtgcgattgctctcatcatagccatgcgcggccctgtgggaaacgttcgggcttacactgcaagcagcaatcgaatacaagaaccaggggagggtgaccaagaccatgctggaccatctgacgttgcacgtgaaagacatcgaccgtagcatcacattctacaaacaggcgctcgcaccgctcggctatatcgtcaaggcgcatcatgagcccacgctcggattcggcgtggatgacggaaccctgcactccgatttctacgtgtcgccgattgacgggccggaggcggaggcttcgccggtcacgccggtcacacacatcgcgttcctggctgacagtcagcaagccgtgcaggcgttccatgcagccgcgctcgccgccggcggccgagacaacggcgctcccggtccgcgcccgtaccatcccggctattactccgcattcgtgctggacccggatggcaataacatcgaagccgtcgtggattgggctcattcgaacgagtaaaaaacatatccgtgtcgtgcctcaggcagcatcgacggcgtaggctccagtcagtcggatttgtggtcgcgacggcgttataggtcacatcacgcaagcgtgacggtgacggtctgctcggcggtttcggtgccggtccatgtgccggctctgcggttccaatccatgccgtccgcgtgcagtgcatcaatgccgtattgatgcgcctgtgtgaccagccaccctgccgtctgccagcaaagtcgagtgcggttgtcggcggacaggccgtccggcagcgtgatcgtcaacgttgtgctggccgtattggtcgcagcgccgttgttcgtgccggttttgccatttaggggcataaccgagaccttgacattcggcagtgtagcgcttatggcggcaaccaacccgtccgcgtccgaggaggttgctggctccaacgcgcacgtgacgcccgccgaccgttcgccggtcagccccgaggcccaagcgcgtgccatcgcatcccatgtggcatatagttccgggtagcctgagcgctgcacctcctgcgcggcgtcctccaccggaatcgtctcccaatccggcacctgcagcagatggtcgtagaagatgtttgtcgcataggtcatgtcggacacctgctccgccgtgccccagccttggctgggccgctgttggaacaggccgagcgaatccaagtcgccgtagtccagattcgtcagcctcgactcctgcatggccgtggcgatggccaccgtcgccgcgtgatccggcagtccgcgcgtgacggcgatgttcgcaatcagcgccgcgttctgcgcctgatcaggcgtcaaggtgcggcgggctccgtcgggcgacaccgccgcgcaatatgcttcctcggccgtgcgcgcggtctcgtgaggcgtgaatagccgtggcagcagcgtccatgccgcgatcagcgccgcaacaacaagtatgacggctgcaatcagcgcgcccgcgccatgggagcggcgtctgccgtaccgcacctgttgtcccattgcgcctccaatatttcggtgtcatggctgaccgtgaccggctggcctatgcagcatgcgagatttgtcgtgttccggctcggccgtcatcatgacagcgtggcatatccacctgaacggcggctgcgccatcacgcgactttgtgacaattcttcacgcttcctgacatccgcgcaatcagaccggggaatgatacaccgacatctctattgcaagttcgacgcagctgataagtcgattcgcaatcgtctatttgcgtttcaaggggctgatttgctcgttccgagacatccacttccgtttcgaggggctgatggccgagtagcgacagctccaaaacggcgaaatgacgttggcatgaagccattcgtacttgggttttggccaatgaccagccccttgaaacggaagtggatgtccccaaaccacgaaatcagcccctcgaaaccgagaatggcggtcgggattgctccgacaccaggggagctgctgccgctattgtgtgaaaggcgatttgtaccgggttgaaggagaggaacacatggcacaattgcagccgtactgcgcgattgagggcaatgatgatggattgcccgtcgtgttcgtgcatggcatgggtgtggaccatcgttcgctgatgatgctcgacaaggcgtttgacggcaatgattcaattcgccgtatatatctggatctgcccggtttcggccgtacgccggcattgcccgagcatgcctgcgggctgccggaaatggcggattggctgcaaacggccattgacggccttgtcggtaaagcggctccattcgccatggtcggcaactcgatgggcggtgcgcttgtccgcgaagtattggcgcgcgaacctcgccgagtggccggtatggcattgatcgcgccggtcgtggacccgcagcatgccggccggcatgtggccgaacatgtggttgcacagcccaatcccaagctgacgcactccttgccacaggaacaggtgttcgatttcattaccatgggcgtcaaccagtcattcgacgcgtggcggcgctaccaacggttcatcctgcccggcgtggcgttgtgcgaccgtgcggcatgcgaacgactggatcagcgttattggctggccgataatcccgaggaaatgctcggcacatatgcgggtccggtgctcatcgtcaccggcaagcaagaccagatcgtcggatacgaagaccagcaagccctgttgtcgcactatcccaacgccaccttcgtgactctggataatgccggtcacaacgcgcacatcgaccaacccgaagccgtcatcacgctcgtgcgcgaatgggtggctcatatggcgttcgttccgttgagctgacggtctgctgacagtctgccgaagcctatatgcatatgagcgaccaatgccggttgacgcaatacgccttgcaaggtatatcgtttttcgatatagtcatatcgatgttcgcggtgtcgccaaaaacgtcggcacctgaaaggaccgggctatgaaaaactacatgaaccgatgggtgttgctcgcgttgaaagccatcgtgattctggtctggctggcctgcctatggggccaactattcgccgtaccgggattgagcggcgcgctggccggcctctgcccgagccagacgtcgatgcactggtcatatctcattatgggcgtgctgttcctgctctgcatcgaagcggcgttcgtggccgtatggaaactgttctccttgtccggatcgggcgcgaacttgagcaggtgatttgagatgacgattcgcatcaatctcgacgtcatgatggccaaacgcaagattggcgtcggcgagctcgccgaacaaattggcatcacgcccgccaacgtgtccattctgaagaacggacgtgccaaagccgtccgcttcaccacattggacgccatctgcaaggcactcgactgccaacccggagacatcctcgaatgggaagatgtcgattgatcgacacgccaccggctcgaactcatggttcaacttgtagtctctctcaaaatcaatgatgccctatcatcctgcaagacgatagggcatcagcatgtgattatgcgcagctgatatgtcgcgttgttatcactcggcgtccgcggccggtgcctccttgggcgcggagaggaagtgctcctcgctgggcagcacggcgttcaggattacggccaccacgaacgacacggcgatgcagttcgaggcgaagatttgttggaacagtgccgggaactgcgcgaagatgtcgctcacctgggtgaagccgatgccgatggtcagcgaaagcgccgcaatcgtgatgttgcgctgcgtgaagcccgcttcggcgatcatctggaagcccgaaagaatgatgttgccgaacatcatgatcgtgcagccgccgagcaccgcctgcggcagcgagttgaacacctcggcgatggccggcacgaagctcgccagcaccagaatcagtccgccggagagaatcaccttgcggttgacgaccttggtcatggccaccaatccgatgttctgtgcgaacgaggtcagcggcaggcatccgaacaggccggatacggtggagatcaggccgtcgccggcgatggcgcccgcggtctcgcgttcggtgggcgtacggttcaggcccaccttggtcagcgcggcggtgtcacccagcacctcgaccgaggagacgacgtagagcaggccgatggagattatcgaaccccagtcgaactcaggcttgaacggcatgaactgcggcacggacacaatagcgaggttctggaaaccggagaaatcgaccttgcccatgcagatggccgccacatagccgaccaccaggccgaacagcacggacagctgcttggccgtgcccttcatcaacagctggaacgccaggcaggcgaccaaagatataagcccgagcgtcaggttctgccagcttccgaagtccttggctccgctgccgccgccgaagctcgtggcacccacgttaagcagcgagaagccgatcgacgtgaccacgatggcggagacgatgggcggcacgaaccgacgccaatacttggccgtcaaacccagcacgagttccagcaggccaccgaccattaccgcgccggccactgcgccatagcccttgtctgcgcagatcgccacggcggccgccacgtaggtgaaggagatgccggtgaccatcggcagacgcgagccgatgagccacgcgccgtacagttgcaggcaggtgcccaggcccgccaccagaaggccggcctggatgatggtggccgattgggccggggtcattttcgcggccgaggcgacgatgaagatcggggcgaggttcgccacgaacatggccatcacatgctgcaggccgaacggaatgcccttccagaaggatactggcgcgttcagcgaagacagcgcctcaaaggatacggaattcttggttttcttctctgacatgattcttttcttctctctgttgctcccgctggcgggagcagtcaatgtgctcagtgcctaaatgtgatttcgccggtctcgggattcatggactcgacgatggccagcgaatccacatcgtagccttcggcacgcagcgcgtcaccgccgccctggaagcccttctccacggcgatgccaatgccctcgaccgtgacaccggccgcctcgcacaggtcaatcagaccgcgcaacgccttgccgttggccagaaaatcgtcaataagcagcacatggtcgccggcgttcagatacttcttggccacgatcaccgggaactccttctgcttggtgaaggaatagaccgtggtggtgtactggtcgccgtcaaggttgatggactgcgccttcttggcgaacaccaccggcacattgccgaaatgctgggccgccacacacgcaatgccgatgccggacgcctcgatggtcagaatcttggtgatgtgcttgccggcgaaatgagcggcccatgccgaacccatgcggtcgaacagacgcacgtcgcactggtggttcagaaacgcgtccaccttgagcacatcacccgccttcaccgttccctcgctctggattcgctcctcaagttcctgcattagacctcccattgctgtatgtcagtgaatgatatggatacttgtaagtgtacgttgtcctgcgctgacccgtgcatgtggtaaacatgaatgtcgcgattcaaagggaggcaacagtgtacgacgagccggaagtcatcgcacgcagcgcgcaggaactcgtaggcgatctgaacccgcagcaggcggaagccgtgcaataccgcggtcaggcgctactgatcggcgccggtgccggctccggcaaaacccgtgtgctgacccgccgcatcgcctggatcttgagccagttcggcgcatggccgagccagattctggccatcaccttcaccaacaaggccgccgccgaaatgcgcgaacgactcggctcgctgatcggcccggtggcccagcggatgtgggtctccaccttccattccgcctgcgtgcgcattctgaggcgcgacggcaagtccatcgggctcaagtccggcttctccatttatgattccgccgactccgagcgactcgtcaaaatcatcgccaccgaattcaacctcgacatcaagcgctacactccacgctcgatcctcggccatatctccgacctcaagaacaatctgaccggttggaaggaaaacctcgccgttcacgcgcccgacttcacgcctggccagcgcggctaccagttcggcacggtgggcgaccttgaagccatctatgcggtgatctacgccgaatacgagcatcgcttggccctggccaacgccgtcgacttcgacgatctgatcggccgcacggtcgagttgctgcgcaccgacccggccgtcgccgagtactaccatcaccgcttccgttacattctcgtcgacgagtatcaggacaccaaccacgcccagtacgtgcttgtgcgcgagctggccggcgtggacacgggggagaaggccatcccgggcgcgccgaacgccggcaagtccggccccgcctggatcaccgtggtgggcgattccgaccagtccatctacgcgttccgtggcgccgacatccgcaacatccaggacttcgagcaggacttcccgaacgccaagaccatcatgctcgaacagaactatcgttcgacgcagaccattctggacgcggccaacgcggtgatcagcaacaacgagggccgcaagcccaagaaactgtggaccgcgctcggcaagggcgagccgatcgtcggctacgcggcggacaacgcccagcaggaggcccagtgggtggccaccgaaatcgcgcgcctgcacgccgaagagggcatctcctactccgacatggcgatcatgtaccgcgccaacgcccaatcccgctcgctcgaagaggcgctgatcaacacgaatcagccgtatcagctcgtcggcggcaccaagttctacgaacgtcgcgaaatcaaggatgcgctggcctatttgcaggcgctcgtcaatccggacgacgatgtgaatctacgtcgtattctcaacgtgcccaagcgcgggcttggcgaccgcgccgaaggcgtgctgctcgcctacgcgcgcgagcatggcaccagcttcttctacgcactcatgcacttggatgagatcgaggtgccgacccgcaccgccacctcgctacgagcattccgcgatctgatgggcgcgctctcgcagttcacgcacgcgcacgactccaagcccagcgagatcgtggccgaagtattggagaagtcgggcttaagggccgaacttgagaaatccgtggatccgcaggacgcctcccgtctggagaacctctcccagctgcagtccaccgcagccgaattcgaacagaacacgcctgacgccacgttgtccgcattcctggagaccactgcgctcgtggccgactccgaccagctgcccggtgaggcggaggactccggcaaggtgacgctcatgaccttgcacaccgccaagggcctcgaatacccggtggtgttcctgaccggcatggaacagggcaccttcccgcattcgcgttcgatggaagacaccactgaactgcaggaggaacgccgactcgcctatgtgggcatcacgcgtgccaagcagagactgtatgtcacgcgcgccgccgtccgctcccagtggggccaggccgccgatatgatgcccagccaattcctcgacgaaattccggattcgctgattgattggaaacgccgtgaagccggcgtggagcgtatgcgcgccaactgggagaccgatggattcgccgacgatttgggcggctgggatgatgacgatttcggcggtgccacgtttggcgggtcgtcgacgttcggctcgcgtggttcgtccggttcgggttcgtcctatgggtcgcggtcgcggtatgggtcgtcgtatggctcgggttccggctcctcgtcgtatggttcccgttcaggttcttcgtacggttcccgttcatcatcatatgattcccgctccggctcgtcctcctacgggtctcgctcccgttcggggtcgtcttacgggtcgcgttcccgttccggttcttcatccggttcatatggcggcacccgtggcggcaaggtcaccacgcgccgcaccacaccgaaatccggttcgaccggctctgccgtgcccagctcgaagctcaccaaggacaatggcctgaatatcgccgacttcgccgtgggcgacatgatcagccacgaccagtacggtctcggcaaggtcaccgacgcgcaagacaagggccgcaattcggtaatcaccgtggacttcggctccgccggcgtcaaacgcctcatgctccgcgtagcacctattgagaagttgtagatagattggcccctctgacgaggggctgagttatataccaaataaattcacaaaaaacaagacttgtgttcttcatcactatctgggcataatgcggaggttgtgcctacgagccctgggaacaggggagaggaaaaagtagttatgaagaacaagctgtttgcatccgtgcccaatattctgttcggcgcgctgatcaccatcgcgccccagacctttgcgcacgcctgcaccggccatgacatgccgggtgcctgccactactcgcagcaggcggccaccggcatcggcgtcgtcatcctcgtgtttggcgtcgtggctttgttcgtcgccccgcagattcgcatcggcctcaatatcgccgccgcagccaacgccctgctactactcgccgtacccaccttcctgatcggcatctgcaagggcgcgatgatgcactgccgcatggttatgctgcccacgctcatcgtgctcggcgtgctcaccatcgtgttcgcggccatcgccatctggctcgactctcacgccgccaagcgcaactgatcgagcagacggccggagcccagccattccgaacgctggactccggtctcgcttattgcaaccgcactataagcaacataaggactcatcgtgccatcccatatcgcattgcgcggccttccgattgaaaacctcaaacgcaagccgttccgcgccggcgcactgctcgccgtcgtcaccatcctcgcgctgacgttcttcggcggcaccatgctgaccatgaacctcaacaccggcatgaccagtatggagaagcgcctgggcgccgaccttatggtcgtgccgcaaaacaccgcgcagaaggctgaagcgctgctcaccagcagcaatcccagcactttctatttcaccaaagacatcgccgacgaggtcatgcaggccgacggcatcgcacaggccaccgaacagacctatatatcatcgctggccgccgcctgctgtgccgaaaagctgcagatcatcggttacgacccggacactgacttcgtcatcgaaccatgggtcgcatcccagttcgaaggcccccttgaagacggtcagatgattgccggcgcaaacgtcaacgtgtccaccgacggcaccatcgaactctacggccataagtggccggtcgtcgcccagctcgccaacaccggcaccagcctcgacaattcggtgttcatcaaccaaaacaccgtgcctgatatggttgccgcctcggccaaggtctccaagcaggtcatgcccgccgaatatgcaggcgaagccgtctccaccgtgatgatcaagacgcagcggggttacgaagcgcagaccgtggctgaaaacatcaagcgtcttgactcccggttcgccgatttggggtacgtataccccggcggcatcaccgccaacaccagaacttcgctgaccgcgcttgtcacctacctcaagattttcgtggcggtgatctgggtaatgggcgtgattgtgctgctcgccgtattcgcctcgtcggtgaacgaacgcaaacgcgaattcgcgtccctgcgcatcatgggcgccacgcgcggcatgttgaatgccatcattctgaaggaatccgccatcatcggtctgatcggtggcgtaatcggcgtcggcgcggccagcctggtgattttcccattcagttcgctgatcggcaaacaacttcaattgccgtatctgcaagccagcccggttgcggtgatcggattcattgccgtgaccattgtgtgctctacggtcatcggcatcatcggttcgctggccaccatgtggcgtctcggccggcccgaagcctacctgaccctgcgagagggggagtgatatgactgagacaactacgccgactcagctgaccacggttgagccgaccaagctccagccgaccacgccagctcagccgaacgcgccgactgcgccggattcgccgcacgtaaccgagacgccctccccggaccatctgctgaccttgacggacctgacccgccagttcgtccgccgcggcacgccgttcgacgccgtcagccacgtgaacctcaccgtcgatgccggcgaattcatcgccatcgtcggccggtcgggcaacggcaaaagcacgctgatcaacatggtcgccgggctgattcgcccgacctcgggaaccgtgagcgtggctggacgcaatgtggccgacttgggcgataaagcactgtccgtgctgaggaatcgcaccatcggattcgtgacccaaagccagaccctgctcggcaacctgaccgtgctcgacaacgtgattctgcccgcaacgatgtttccggagccgctgccgttcgcccaaaacgcagaagcaacggatgccgttgctcaggtggacgctgttgcgtcgaccgatgccgtggcacaagccgctgccaccaatgatgaagcagccgccgacctgttcatgccggatgtcattgcgccaatcacagaccgggaaaacacgccgtcaaacacggctgcgagccgtccggacctgttcgccacccgagctcgcatgctgctcacccagcttggtgtcgccgatctggcagacagctacccgcgcgagctgtccggcggtgaaatgcggcgcgtctccatcgcccgcgcgctgatgaaccagccgagcctgctcatcgccgacgagccgaccggcgacctcgaccaggagagcaccgacatcgtaatgcgtctgctcagagaccaagccaacaacggcacggcgattctcatggtcacccatgatcccgatgcactcgaatacgcagaccgggtgtatcgcatggacgccggagtgctgtccatagcctcggtgtaatatggtctgctggtgtctgccaacaggtagataccgtctggagtcatagcccatcagcgggtcggcggtaggtgatcgcaagaaaaccaacccgttcgtgtttgttcacgacgaagcgctggggaggcccggctcagcgcttgccaggcatatgcaaggcaagcgttccgttcagataacgacagaaggattaatccaatgacgaacgttcagcgttctcgccgtcaggtgcgtctgtctcgcgccctcggcatcgcactgacccccaaggctcagcgcatcttcgaaaagcgtccgtacgctcctggcgagcacggccgtgaccgccgccgcaccgagtccgattacgcggtgcgtatgcgcgaaaagcagcgtctgcgcgctcagtacggcatctccgagaagcagcttcgcgccgcttacgagaaggccacccgtactgccggccagaccggtaacgccatgctgaccgacctcgagacccgtctcgacaacctggtgctgcgtgccggcttcgcccgcaccaccgcccaggcccgtcagttcgtggtgcaccgtcacatcctcgttgacggcaacatcgtggaccgcccgtcctaccgcgtcaagcccggccagaccattcaggtgaaggccaagagccagaccatggttccgttccagatcgccgccgaaggcgtgcaccgtgacgtgctgcctgcggtccccggctacctcgacgtgaacctgccgtccctgaaggccactgtgacccgtaagccggaggtcgaagagatcccggtgcaggtcaacatccagtacgtggtcgaattctacgcccgctgattcgggcccccttatctggaacatcagaatcaaggacataccgcttggaccccgctcccgcaagggacgcggggttctcgcgttccggggcgcgggcgttttcccggagactagatgaacggaatcacgccgttctgcttcctggaaggcgtttcgtcgagatcggcggaaagcttgcgtcagcaggcgtcgatgaaggcgctgaagatgcgacgttggttgctatcggctcggtgggagaactcaggatgccattggacggcccagacgaaacgtttggccggcatccagaccgcctccacgatgccgtccggcgcggtggccatcggttccagtccctggcccagcgtgcgaatcgcctgatggtgatagctgttgacgcccagcgtataggcgcgcggatgatacggcctgccgaaggaatcgacctcatcggcctccgtctcactcgggccgttgtctcccagcggccacaacgcacgggccaacggcgaatcgggcgcgatcgacacttcgtgggccaccgggtcatacggcggcttgtcgccatgatgcgcgaccgggctgggatgttcgtccggcagatcctgccacagcgtgccacccaaggcgacgttgaggctctggatgccgcggcagatgcccagcaatggcttgtccgccgcgatgacggaggggatcaggcgctcctccatccggtcgcgggccttgcatagtttgaccgtcttggggccggccgcctcgccataccgttctggatccacgtcgtggccgccggtgaccaggaacccatcgcattggccgaccaactgtccgattgtggtctcgtcgtcggtcagcggcagcatcaccgggatgccgccggcttcgatgatgccgtcgaaatagccgggcagcatccacaggctattcagtgtgtcgtcccacaacgggaccacgccgataagcggacaatgggccatcgatacctccaaatacagacttactgataaagcgactcaacttgctacagtctcaaacctgaaaattgtaccagtgtgacttgcgggcggagcctactgcatagcttagggaggtagggatttcaatcgagggcggcttatcgctcgtagtgttccaattcggcgagtggatacacctgagtccaatggtgcggctgcaggtcgcgcagcggcacgaacaacggatgctctccctgattgttgtctgaaacggcgcacatcacgtcgtcgccccaatagcgcagccgttcctgacagatgccgcatggagacaacacggtgaacggggcgtgttcgtcatcgcgtacgacgcagatggtgtgggtgacacggcgatcaagcttcatcgcctcgcacatcgctccgacctcgatgcatagcgaagcggcggcattgggtgtctcaatcgccacgctcgtgacgataagtgcctccgagccgttgcttccgtcatgtttaccgttgtctttgccggcgagtcgcatcgccgccgcgcctccccatcctgtcggataccttcgctcgatcagttccacggcactgcgatacagcgcttcctcgatatgacgctccactggagccatatggtcacctcgcgtaatcgacctgccatcggtgggcagacgggattcaaaccattactagtctagggggggagatgtccttgacgcatgcttatcgtcgaagtagttgtggccgtggtcgtcggcgtgtttttggtcggggtctatcgtgatgcaaagaacggaacgttgcctttgcagaattcggtaggcatcaaaacgccggcaacaatgtcatccgaagacacatggaatcggattcacaagcagtacgctccgatattcctcgttgatgcatgtgccctgttcctcatcgcccttgaaatcatcattggcggggccatggagaagaacttcaataacatggcattggaggcattgattgcgttggtggccacgcttgttgtcatggtgctggccaatctggtcgtcgttgttttggcagatcggtctgcacgaaaatgagatagcttggtgagaagccgctatgtcggacttgctgaaacaaccaacttcgcaacggggtaataaagtaagagagcgacgaatcgggattctcggaggtgttatatgttggatattcaagatgatatcagtagctaccttgccttttcgcactatatcgattggaatgaaccgagtgtgcaaagaaaagccaaggaactaaaagactccactgaaggcgaaatcgaactggcaaaagccgcctactattttgttagagatgaaatcaagcattcatgggatgtccaagacaaaagagtcacggcaacagcctcagacgcattaagggagggcgtcggtatttgttgggcaaaatctaatttattggccgccctattaagagcaaatggcattcctgccggaatatgctatcaaaggcttacgttaggcagtacgcctgaaagcggatactgcatccatgccttgaatgccacttatctgagatccattgaccgatggattcgtgtagatgcaagagggaataaagagggtgtacaagcagacttttctgttgacgatgaacgtttggctttccccattcggaaagagtacgatgaggtggattataaaactgtgtatgccgaaccgttgccgcagacaatgagcattcttgaaaatagtacagatgctctatacatgtatctgcattcgctgcccgaaagaatttgacgaattcatttttatcgggaggcaggaggcagcggctggttcggactgcattagcggttatcggggaacgattcgcccgcgacaacagcccatcacgccaaacttgacaagagtgacgtcggtgacccgtgctgcggcaagcacctcgacagggatggtgacggtatcggttgctctcaggctagtaggcccggatagagttcgttgatcgcccaggcgacgcggccggcatcatatgccgaaagtcttcctgtcgggccgtcgtcgaggaaaagattgcttggcagccgcagcagttgcgagcatcgcacggcgctgggcttgctcagtcccgcgtcctgccagtcacgcagcaccacatagcccggttcgtcgcgccaggtgttgccggtgaccttggtcaccaaggcgatgcgggtgccgtcgtcccattggaggatcacgctgggacggttcttcgctttgcctggcttgtcgggaaaagcgaacggcacccaccatatctcgaactggcgcggatcagtcttcatcatcgtcccaaccctccggcaggatcacggcaccatcacgtatctggggcgtcacgatgcggggatcatccatgttcgctttgaacaggggatatccctcgttgtctttttcgaatgaagggcggacgcttggcgtgaatggc

SEQ ID NO: 1646 - DNA, 5396 bp, Unknown
  R221_24m  MAG No. k141_112806
cagcacgggtgtgttggtgccggcgatgatgaggaagatgttcgaataatcgatgccgcacagcacgcgagtcaccttcgcgctgcgccatggcacgacgtgcagcagcgcgctgttgccgaacagcagcatggccgaggcgccgtacaccgcgcaggccgctttgaccgagccggccggcgcgatgcagatgagtacgatggacgccgcgatgcacagcggcagggtggcgaggtgaagccatccgcgcagtcgcggcttgcgattgccgaatgcatccacggggacgatctggcgcttgatcgccttcagtgcggccttggcttggcggtagcgcgattgcgcggccctgtatcgggccgatgcacggtccagtgcggtggggttggcgtttgcgctggatttttgactcgcggttgcggaaggcgcaactgttgcggcggaagccatggttcgtccagatggcgtgctgatggaaacgctcatactgatcacctcgctatggccggcgacgctctcccgaccactaacctacgctaccgtaacctagtataggcccgcgcaataatcaaggttgatttcgtaatgcttacagttcttccgtggtgcggtattcggtggtgcggttgcggaatacatcgccgagtctgtgaactcgtattatgcgtgtctgctgggtctgacttgtgtcggttcctgatttcggattgctgcgaatgatgctcccgacgccgccccgccagttgccggattcgtacggctcggccgttcggccgagctggtcgtcggtgactccagatacttcgttggtttcgtctcggttcatgatgttatgtaatgctagtttatggcggatggaaagttgaggaaagttaaatctgcttcatgggcttctctctgatctgtatttgtcccggttcatatgtcaatcgtttgacctgtcgaccggggcagaatccgctgtcccggtcggcgatttcggcttgttttcgtgaaccgggacactccggtttcctcaactcatatcgtctggcagacggaatcggcggaataaggccgattctggaattggcacgttgtcccggttttcgcataaatcgattgacatttataccggggcaacaaaaattgtcccggtttgcaaagatcgcccgaaatcgcgaaccgggacagcggattctggcctggcttgaacgtcaaacgattgatgcaggtaccgggacattttccgccacgaaagttgggccataagccttaagtcttaaagcccccctgaaaaacggcgcttgcccggataaagcaaaagagccggaaccttccgattccagccctttagttgctggtgcgagtggggggagttgaacccccacgagcatacactcactgccacctgaagacagcgcgtctaccattccgccacactcgcagacaatcgactaacttacacccggctgggtaatcatgcaatcttcggcgtgtcgcatgggaggcagggatatatcgcttgtgggtctcctgcgggcgccgtgatctttgagggtggcggcactcccctcagtcacttcgtgacagctcgtccgcaattaaggacgggccttgcctgcaacctgctggttcgactatcgtctcaccttcgactacaaacagcccactgggctgtttgcttaacgtctcagcctcagcgaggggagcagagagaagttcagcacaagccgcaacgaaggagaaaaactcacaaccctggccggcgctcgccgttgccgtagaagtgggccagcgcttcgtcgcggaactcatcaaagtatccgccgtcgatcgaggcgcggatgtcgtctagcagcttcacgaagaaatgctcgttatggatcgtggccaacgtaaacccgttgaactcgcgggcgcgcagcaggtggtcgacgtacgcgcgcgaataatgctggcatgtgtagcagtcgcatccctcctccagcggcccgaaatcgaacttatgctgggcgcgcttgatgttgtaccggccggcgcgcgtgtagatcgcgccgttgcgggcgcagcgcgcgggggccacgcagtcgaaggtgtcgccgccgttctccacgcacgcgaagatatcgtccacggaggcgatgcccagcacatggcgcgggcggttctccggcatcgcgtcgcagatccacgcgcaggtgtctccaatgatgcgcttctcgattgcgccgccgattcccacgccgtcgaagtccagcgaggcgatctgcgaggccgcgcgccggcgtagatcctcgtaattcgcgccctgcaccacgccatacagcgcctgatagggcttgctcagccgctcagccgtcagccgctggtgctcgtccacgcatcggcgggcccagcggaaggtgcgctccaccgagtcctcctggtaggagcgggtgttcatcagcgtggtgagttcgtcgaacgcgaacatgatgtctgcgccgattttgtgctggatgcccatcgaaatctcagcggagaaacgatgtgcgtcaccattcaaaggcgacttgaacgtcacgccgtcctcatccacccaggccatgcgctccttgcccttggcgatgatgtcgtccgacttcatgccggtcacgtccattgccagcgtcttcttgaagccgacgcccagcgacatcacttggaaaccgccagaatcggtgaacgtgggcccatcccagttcatgaaacgcgccaagccgccggccgcgtccagcacgtcctcgcccgggcgctcgaacaggtggaaggcgttggccagcaggcattgtgcacctagatccttcatctgctcgggcaacacggccttcatcgcggcttgcgtgcccaccggcacgaaggcaggcgtgcgaatatcgccgtggggcgtgtgaatgatgccggtgcggccgtatcgggcaccgtctcgcccaagcccgctggccgtggatggcaggcgggtgatcgtttcgaaatggaaggcgctgcggtcgccgggctgtccgggctgtgcgcccaacggatgttcaagaaggctgatcgtcatatgttcactttaggcagaagggtcagaaaagggccggaaattgtgaagaactcggtttcgaggggcggatttcgccgctcccgaacgtctacttccgcttcaaggggctcccggtcaagtaggccggctgcaaaaatggcggaatggcgttaaatgagggcccttgatactcggaattgaccgcgcgaacagccccttgaagtgcaagtagatgttcccgaaacaggaaatcagcccctcgaagccgagatgcccataagactctgcgatgattacgcatagactttcaatcaacgttcagaaaacctccagattgactgcctttactactgaggtagcacacgagaagtggcaatgggcaagtgcccgaatagccgccgaacagacgtgataggaatttaggaaaaggagcagcaatggctgacgaatttaacccgcagggcgtcgaccagaccccgcggaataacgaaaaccccaatagtactgccgataccggcaacgccgagccgaagaacccgtttgtgggtggcgactcggttgatgccggcaacgccagcgattccagcgagcagcaagccccggtttcctcggccgccctcgctgccgatcagcagcctacgcaagccgctaccgacactgccgccaccgagcccatcccggactacgcctccgccaagggcgagagcacggtggtctcctcctcgccggcttctccggcagcaccggccgcaggccagacctcggccacaactccgctgtatcgtccggccccggaatatggcgcttatggtccgaccccgactcaggcacagggccagcagggcggccaggccggcagcaatgtccagcccacgcagcaattcccgttcggccagcctgcacagcaaaccccacagggccagcagggcaaccgcaatccctactacaccaataacccgcagccgcagggcaacggcaatccgttcaatccgcccacgcagccgcagcagaacaacggcaacccgtttgccagccagtccggtcagaatggccggaatggccagcagccccagcagggcggtctgttcggtttcggcactcccggtaccggtacgccgaacggtcaaggcccggcccagccgggacagcccggtcagcccggccccgccaagcagggcatgtccaagacggcgagcaacatcctcatcgccgtggtcgccgccgttctggctgcggccctctgcctgggcctcggttacggcgccctcaccagcggcctgatcaccctgccgaccagcaattcgctgtctaacgtcagctcgaataagtccggctccgggtccgccaccgccaagagcggcgaagcccccgactggcagaccgtcgccagcgatgtctccggctccgtggtctccatccagaccgcgttgagcaacggcaccgccaagggctccggcgccatcatcgacaccgaaggccacatcatcaccaacaaccacgtgatctccggtgcccagcagattcaggtgacgcttgccaacggcaacatgtattccgccacgctcgtcggcaccgacaccaccaccgatcttgcggtcatcaagctcgacaacccgccgagcgacctcaaggccgtggaattcgccgattccgacaagctcgccgtcggcgagaacgtgatggccatcggcaacccgcttggctacgacgacaccgccaccaccggtatcgtctccgccctgaaccgcccggtgaccgtgaccgacgataacaacaacgagatcgtcaccaacgccgtccagatcgacgcggccatcaaccccggcaactccggcggcccgaccttcaacgcggccggccaggtgatcggcatcaactcgtccatcgcctcgaccgccacctcatccgactccgcgggttcgatcggcatcggcttcgccatcccgtccaacctcgtcaagcgtgtggccgacgaaatcatcaaggacggcaaggtcaagcacgttgccctcggcgtggtcatcaagtccgacacggttgaagccgacggcgtgacccgcggcggcgcgaccatcaccaagtccagcgccaccggcagcgcggtcgtctccggcggcccggccgacaaggccggcctcaaggagggcgacaccatcgtggctttcaacggcaacgcggtgaacaacaactactcgctgcttggttacgttcgtgccgcggctttgggagacaaggtgacgctgaccatcgtgcgcgacggcaagaccatggatgtggacgtgacgctcgatcaggaggagtcgtcggtgaacggttcgtccagctccgattccaacggtaacagccagaataagcagaacaaccagaacgg

SEQ ID NO: 1647 - DNA, 9667 bp, Unknown
  R221_24m  MAG No. k141_112892
caacaccaccctcgtccccaccgccgccgaagcccaagccgccgcggccctgaccccggaccagcagatcgccaaattgcccgaagccgaccaggccacggtcaaccagatggccggccagatcgacttcactcgcgacggcatcgaatccagctacggcaaggacgcccagcgcgccacctccaccttcgccgacgaaatcctctccgacacccgctccaaagacaccggcgaggcgggcgaactactgaacaccatgctggtcaccattgacgaggctgacctcggcggcttccgcaccattccgatcatcggccaggtggccgtcagcgtggataagctgcgccgccgctatcagaaagtcgacgcgcaaatcgacgaaatcatcgtgcgtctcgaatccgcgcaagccaaactcgtggccgacatctccatgtacgacacgatgtacacgcagaacgcccagcaataccgcgagctgaaaatgaccgtactggccggcaagaaggcgctcgccgacttcaacgccaaccagctgccagcgctggaggccgaggccgccgccagtggcgacgccatgcaggcgcaagtgctgaaggacttcaagtccaagctcgaccgttttgccaagcgactcgacgacctcgaccgcatcagcgtggtcaccttgcaggccgcgccgcagatcaaaatcatccagaacgcggaccagaccatcgtggacaagatcgacaccaccatctccaccacgattccggtgtggaagagccagatggtgatcgcgctgggcctgtccaaccagcgcaaggccctcgacctgcagaacaaggccgacgatgtgaccaacaagctgctggcgcgtaacgcggccgccctgcacaagggtgcggtggacgcggaaaaggccaaccagcgttccgtggtggaaatcgacacgctggagaagatcaacgccgaactcatcgccaccctgaaggagaccgtgcagatccagaaggaaggcaaggccaaccgcgaggccgcccaggtcaagatgcgccaaatcgagtccgacctcaaaaacgccttgctcgaaaacgcccagcagatgtgagccgttcgcgcgccagcatgctcccgttggcagaggtatatgagtacgcctactggtgtgcgtatatatgctcccgctggcgggagctggcagccgtaagactggctgagggtggtcacggcgctcggctcggccggctttaccggcaaccattccccgccgcaatttctctgtgggcataatcccggaatgattgccgcgctcgggaattgggtgaagtgaaggttaaaggttgagagcccgggagggttccggaaccggccacgataaccgctgctagccccgcgatacgggttggcggccggcatccaagccgattctctcctaatcaaggagtaccgattatggcaatgtttccggctttgatgaatgacacgatgttctcggatctgttcgatgatccgttctttgagggttggcgcaacacggacaacacgatgagtgccgcaatgcctgccaacatgatgaccaccgatgtgcgcgagaccgacaagggttacgacgtcgacatcgatatgcctggctttaagaaggaagatatcaaccttgagctcaacaacggctatctgaccgtgtccgcctcgcgttgcagcgagcatgaggacaaggctccggccgctgagggcgaggcttccgacagcaagtgcgcttgcgcgtccgattcgggcaagtggctacgtcgcgaacgctacatgggctcctgctcgcgtagtttctacgttggcgaggacgtgaaggagtccgacatccacgccagctaccggaacggcacgctgtgcatccaggttccgaagatgcaggcccagccgcaagtcgagtccaagcaccaaatcgcgattgagggctgacgatacttgattcgtcccgaagtcccgcttcgagtagctttgccccctctgacgagggagctcccgcgaagcgggtgggggagagataaatcgtaaccaaaccatgcttcccacgccgcctgccctacgctttcaacgccgactaacctgacagacggcgggaaacatagccaatgcaaatgccgggtagggatttaccctacccggcattttgctgtttcaatcaccgaaccccaccctgttcgcgcgccggtcgtgtgccgttctgcagctgtacacatccgatgagtagaatgccttcgaaacgaggcaagagaggcggacatatggcgaacggcgcacagaacgcaagcggcacgccggccccggcggcaagccgttccggcggccacgtcgtatccgcgcgcgccacgaccatcggcctgatggcgatcctgctgtggagcttcatggccggcaccgtgcgcatcgtctccgaaaacttcggtgccacgcttggttcggccctgatctacacggtcggcggcatcctgctgctgatgttccggcgcccggccccgattcgcgagttccccaagaaatacttgattatcggcggcctgttgttcgtattttacgaatcgtcgatatccctctcgctgggtctggcctctaccgacgcatcctcggtggaagtgagcctggtcaactatctgtggcccacgatgatggtgctgctgtcggcgggcgtatcccatcgcaagcacgcggtcgtcaaggtgctgccgggcgcgattgtggccactgccggcgtggtgctggcggtcggcggtaattccgggctcgactggcatgcggccgtgcagcatatcgccgccaaccctttgccctatgcgctggcgttcgcgggcgcgctcgcttggtcggtgtacgcggtgttcacgccagccatgagtcatggggtggacggcacttcattgttcttcccctgcgtggccgtggcgttgtggattatccacttcgcgtccgggcaggggtggccggccgagccgccgagtctggtcgcatggctgtttgtgttgattgccgcggcggcgattggcggcggttatgcctgctggggctatggcattctgcatgggtctatggagcggctggctattgcgtcctatgccacgccggtgctgtccaccggggccggtgcggtgctgctgggtttggcgctgtcgctgccgttttggtgtggcgcgctgctggtggccgccggatcggtgctcaattacttggtcagtgcgcgcaaatagcggggtggctttgcttatggggcggtaataatcccatggggcggtaaaaccctcatggggcggtatcccaaaatggctttattctgccgtttcacaatttcttcaaaccgccccatgggccttttaccgccccatgggtaaattaccgcccgatgggcagcagcaacttactcgccgcggcgctcggacgggcggcgaatcgggtcaagcagcgtattcggatcggagatgccgaacatgctgcgcccgccggtggattcagggtgcttggcgagaacggccagcgaaatcgcccccggaatcataatgatcaccgaaagggccgccaatccccagttcacgaagaatccgagccccagtacgatggccaccacaaccaccaccgtgacgataatcgtcaacagtgctcgacgtgggttggtttccctggtccaagaggtgctggctgcgggttttgctgttgaactggccgcggcgtttgtggctgttgtgccatcagccgtgccggtcgtgggccttgccgccgcgctcgtcgcggggtcagtaggggcgtcagacacgttatcggcgacattgccggtcgctgctggacgttgttcgtttgcgtgagtcatatccaccaacatattccctgcttccggctaaagctgggacaagcctgcgcaccgctaatccagcgccgacactggccttgagctgcggacgtccaggccggatgtgaacaggagctgaacggagtctggggaaaccatgagaactcgcgacaatttttgtgaaattgggtgacgctctatgaatcgcgcgctagtattgcgtgagcttacaagacgaggagcctggagcgcggggacgaaggatgaagaactccgtttggaagacgttcatggaattgtcgctggtccgcggaatcgtgccgtggaccgtgttcggactgaccgcgatcgcggcaatcatactgattgttgggctggcattgagcaagaagcgcggcccggcagcagacggcccggcagcagacggcctggcgccggacggcgaatcgtcggcccaatcgcccgtcgacccagataaccagccggccaaccagcctacgaacgcggctgctacggcgtcatccgcagcttcgacggaagagacgtttatttcccatggcctgcgtacgccgcaacgtcgtcacttgcatccgctggccgccgcgctggccgccgccgtgctcgccggcgcgggcggactactggccacatggctgatgtccgacgtgttcatggtgttcggcgtatcgttgggttggccggtgatcctcaccgtcgcgggaggcttcgcgggcctcggcttcgtgctggccgccgccgtgacgttacggggggcccgtcgcgcgctggccgtcgtgctggtgccgctggtgctggcgtccaccgcgcttggcgtggactcgatctacggcgaataccagaccatcggcagtctcgtcggctatacgccataccccccgctcggttcggtcaccgtgcgcaaagcctcgatgagcgtcggcgagtggcgcgacaaggcgcgcaaggacgctctgccatccatgcccgactcgggcagggtgttcgtcgtcagcatcccgaacaccgaatccaagttcaaggcgcgcaaggcgatggtctacctgccgcccgccgcgctgtccgaccgcccgccggccctgccggtgatggagctgctcgccggtcagccgggcagtcccggtcgcctcatcgacgccggcaacatcgccgccacgatgaacgcttacgccgccgaacatgacgggctggcgccgatcgtgctcgcacccgaccaaaacggttcggccatgcacaacagcctgtgcgccgacaccacccgaggcaacgccgaaacctacctcaccaaggacgtggtgaactgggccagggcgacgctgccggtagccaagtcggcccgtatgtgggcgatgggcggattctcgcaaggcggcacctgcaccacgcagctggtgccgcgtcaccccgacatctacggtgcgatgctgccggtggatggtgagctcgagccgaccgacggcagcgtcgagacgatggttcggcgatatttcgccggcgaccgcaaggcctacgacgggcaggtgccggtcaacgccatcgccgccaccggcacggccggccaggcgctgttcgccggcgccggcaaaggggatcggaagtcggtagccaacatgcgcaccatcgccgcggccgcccgcgcggccggcatggagaccaccgaactggtcgtgcccggcgccgaccatgactggcatgcggtgcaggcggtctggaaccccggtctcgactggttcggcgcgcgaaccgggctgggcgaaatgacgaaatcgttggaggaatacccacaagtggaggtgttgcaatgagcgaagaacaacagcatgggaacgcgcggccggcggccatgccgcagacgcggcggcccttgcgggacgcggaaccctcgcggacgaagcccgccacgacctcccgcgccaccaaaccgcatacggcaaggtccagccatgcggcggaaagctggcgtgaactggccggtgacgtgcggcagtgggcggacgaccaccggctggccgtcaccgccacggcggcgctggtggcgctgaatctggtggcgtggctggtggccgcgatggccggattcgcgtttccgctgcggctcagcaccagcatggccgcattcaacgccggcaaactcatctgctcgctgttcctggcgcgcggcgtcatccaactcatggtcgacgccgtcctgtggctcgtcatgctgtcgatagccgaaccatggctcggccgtgtgcgcaccgtcgtcaccgcgctcgcctgcgcggccggcggcgtgctggcgggcctgaccctgtgcgcggcggccggatggatgttccaggactccctgttcgtctcccgcatgcggttcgcattgagcccgctggtgttgccggtcggcgcgctcatggcggccagcgcgttctgcagccacctatggcgcaggcgcatccgactcgtcggctatgtggcgatcctggtcacgttgctctacagcggcaaccccagcggctactgcatactcgccgccgcgctgatcggccatgccgccggccgtgtgatggccggtccgcccgcgcacgtcgaagccgaatggcactggctgcgcagcacctccttcgaggcgcggcgcatattcgcggccatcgccgtggtactggccctggggccggtcatcgccatcacctcccataaccatgcgggcccgctcagcacgatcggcctgctcatgagcccggtttccgtcgacaacggcatgctggccaaatgcctggccggtgacacgcacggcggatgcttcctgcagttcgatctgttgcgggcctcgatgcccggcgcggtgctgcgctcgttgctgcccaccgccgtgaccctggtgctggcgtggggcctgtatcgcggacgtcggttcgcggccatctgcaccgtggccatcaacctgttcacggtggccatcgccgtcgcctactatctggtcgtgccgctgagcttcgcgccggacggcatggcctccctgctgcagcacggcgcgatcgtggcctgcgtggcgaacgtcctgcccccgctgctgttcgccatcgccctgctggcggcgatgaaacacttcccgatccgcatcggctggtgcaggctggtcggcggcatcggcgccatcgtgctggcctggctggcgtgcgccgccatatacctgatatacggcatcgcccaacccgccaccttctcgccacgcgctacggcctcgtcgctgctggccgagctgccgggacgcttcctgcccatcggcttcctgagccatatgaagctgtcgttcgtgccgcgcactccaatggcctcgatcatgtaccaaggcgtcggcctggtgttctggatcgtggtgctggccgtggtgatccactggatgggcgacgtgagcgaatcgaacgagcgagcccgggcgcgcgccgaacgtctggtcgaaaccggcggcgaatcgatgagcttcatgaccacgtgggaaggcaacagctactggctgtcccccacgggcagatcggccgtggcgtatcgcgtgctcaacggcatcgccctgacctgcaccggaccgttcggcgatccggcggaatggatggacgatctgaacggtttctcccagcactgtgcggaacgttcgctgtcgccggtgttctacggcgtgcatcgggaacagcgcaacgcgttgctggaagccggctggaactccatcgaggtcggcagcgaaatggtggtcgacccgcgcggctggaagacgaccggcaagaaatggcaggacgtgcgcaccgccatcaacaaggccaagcgcgacggcgtgaccgacgtgcagtccacattcctggaagcgtcgcttgatgtgcgcgaacagatcgaggacatctccgaggagtgggcgcagctcaaggcgctgccggaaatgaagttcacgctcggcggcgtcgaggaactgcgcgacccgcgcgtgcggctgctttacgccatcgacgcggacgggcgcgtgctgggcgtcaccagctggttgcccacctggcgcgacgggcgcatcgtcggctggacgttggatttcatgcgccatcgcaccgacagccccaacggcatcatggagttcctgatcgcgcgcatggccgagcggctgcgtgacgagggcgaagccgatcccacgcacgccgtggagttcatgagcctgtccgcggcgcccctggccggcatgaatcccgatcgggacaacgccggggaggacggggcaccggccagcgaaggcacgcaggtgctccaacacgcgctgcagatcgtggccgactggatggaacccgcctacggcttccactcgctgttcaacttcaagcgcaagttccagcccaccgaggcgccggtctacgtgtgctacccggacccggcggcgttgccgcagatcgggctcgcggtggtgcgcgcctacgtgcccagcgtgacggccgccgaagtggccggcatgctcagcacgctgcggtcgtgaaggtgtgcacacgggtacgcaggttagccgattcgagcctgagacgtggtatctgctttcagagaggtacatttggccccttgcggacaactaactgccttcaaagaggtgcctgaactctgaaatctcgagtatgagcgttgcaatgacaacgtttgtactcggggtttcccgtattcggtgcctctttgaacgaagatagcattctgcagaagcccgaatgtacctctttgaacggagaaagcctgacaaggagggcgcggcaagcgctatctccgtttcgaggggctgatttggtctctcccggaggtctactcccgtttcgaggggctgatgccgaagtattcacgctccaaaatcggcggaatggcgttggcgcggatgggtttttacatgcggtctagcggccgaccagccccttgaaacgggagtagacctccggcgggggtcaaatcagcccctcgaaagcggttttgccggtgcagaggtgtcgttgactgcatcgcgagccgtctcgacgtagtaacgtggggcgtatgagcgaacgtaacgaacacaatgacggaaatacgcaaaccgcatacttcgccggcggctgcttctggggtctggagcgctacttccagaacgtcgacggcgtcacggacaccacggtcggctacgcgcaatccaccgtcgaatcgccgacctacgagcaggtatgcgcgggcggcaccgatgcggccgaaaccgtgaaagtcgagtttgacccggcacaggtcagcctgcggacgctgacattgctgttcctggaggtcatcgacccgttctccgtggaccagcagggcgaggaccgcggccggcagtaccgcaccggcatgttctacacggacgagacgcagcgcgccgtgtatgtggcggctctggagcagctggtcgaccgccagccgcagcgcccggccgtactggtcgaaccgctgcgcaacttctacccggccgaggcacaccatcaggactatctggtgaacaaccccggcggctactgccatgtaccgatcgccgcaattgcgaacgtgaaacgccgtcagaagtacgtggaacgcatctgggatctgacgctcgaacagttcgccgtcacgcagaacgccgccaccgagcgcccgttcgtcaacgagtacgacgagaaattcgagcccggcatctacgtggacatcgtcagcggcgagccgctgttctcgtcgcaagacaagttcgattccggctgcggctggcccgcgttctcccgcccgattgccggtgacttgctgaccgagcatgaggaccaccgcattccgggccgcgaccgcatcgaagtgcgcacgtcggac

SEQ ID NO: 1648 - DNA, 11401 bp, Unknown
  R221_24m  MAG No. k141_114476
aacttgaagcttctgttcagcaggttgacgatgaaggtccccgccaacgcgcccatggccgtaaccgacatgaccaagccgacctggcccgacgtgaagctcagactcttgcgcatgatgacgaggctgtcgttctggaaattcccggtcagcacgttgaacaacgcggccagcacaagcgggtagagaaccacacgcctggtcttcagataggaaagcccctgccgggtgtcgccgatgaccgttcgcaccgcggccggcacggggcccctcaacccgccggcgcccttcgaggaaccgaccctcatcaggagaatggcacccgcactgagaagaaaacacgcggcgcagatcagggtcagcagccccatcggcaccacggagtagagcgccccgccggcaagcgggatgagcagcccggccgtgtactggatgccgtacacgatgctgttcatcttcgaataatccgatttcgacacgaaatacgagatgaacgttatctcggaaacggagctgaacacattggtgcaccctatgaccaaggtgacgagatagatggctatcagcgtcacggtcgcgttgctccgagccgaaagaaccgccgcgagcaacgcgtatcctccgaatctgatggcatcggaacggatgagcaccttcctgacgtcgcacctgtccacaatagcgccgaaaggcagacccagcagcaagaacggcagcgtctcgaacgaagagatgatcgaaagatgaataccggaaccggtaaggtcgagcacgataagcggcaacacgaaagtcatcaacgaactgccgagattgtcgcttacaacggaaagcagataaacccagttattccccctccttgataaattttccatgtgaatacgcgaccccatccccaccaaacagaacaaccctataagagggtacatcgggagacaggctgtccgtgtacattctgatgttctcaccacactctccgaattgctcatatgcaagagtgccatgagttttatcatacagtcggaaatagtaaaattcataccctgtagtggctatcgagaatgctgtattccctgcttcattagtcacagaataatgctgaatgaacttttcgctgcccacttggatggaatagattccgcagatgggacatgtcctcatgcatagttggtaagaatgcgtttttgaaaaatcaaagaaatctatttttgaacagcacctgccgcaccgttctgtaggaattttgactggataccctatgttattgctgcgtacgaatgccccaaactggtcaaataggtatccattgcttgaaagcaaacgtatttgctttcctacaatttttttcattttagtcaatagtgaaaaaagttcgtagtactcatccttgctaattattttgaatcgatttgcttggatgaccatgatattgatgttctgaagcctctgcctaaacagatcagcgattctttgaagaagagttgccatctcgtcattcaagtattgattcaaaataaggtatgaagaaaaatcttcaaaaaacggataaatgagcatatccggcgctgctcatccttcaacgattttaccgagcgcgtttcatattccagtttcttattggaaaagactaagagactttctggtaagcgaaaacatttgccttttatccatgagggaactattgcaataacactaccgttgatagcttggattgaatggaaactacaggataggttgcagtttgtgagttcatctggtagcttccgtgtgcagcagacgaaggggtacgttccttgatgcatgaaataaagctgattgaggtaataagtaacttctgtaaatgacattccagattttaatgcttcaatagcgatactacagcacgaaaggatccttcgtctgagagcaaacgacatagcctcacaccagttccaacgtcttgaaggcgttggccaggccgttctggtgaatgtcggtggtggtgaagtcacagaaggcttggatgccgtgaatggcgttgcccatggctacggatgtgccggcggccttgagcatggcggtgtcgttgtcggagtctccgatggcgatggtgtcggcaatggcatagcccagcaaagaagccacgtcgcgcacagcggtacctttgtcgatgccattaatcagcaactcgccattgttcggggaaatcttgtcatacgaaccatgcacgagctcaaaccatgggctcaaatcatgttgggtctcctcgaaagtcacgtcaggattcggcgaggtgaagtatgaccccttgctcacacgaatcgtctgtcccaaagtcgagccagtcggcacctccacctcatccaacaggtgccagaatcgcgcgaattcgccacgattccaggtcttgcctttcgattccagatgttgacggtagccttccgagatgtacatgccatccgcaccttgccattggtagctctcgatatgatgcttggcaaaatacgccatcgccgcatcgaccgcttcaggagggacgagatgctggaacagcagcttgtctccgatattcgcctgagcgcccgccacggaaaccacgccatcgaaaccgaggtcgaggatgctgcgttcgattttcggaacggaacgcccggtgcagatgaagagcttgtggccgttggcctgggcttgtttgcaagcgattctggcagattcgggtacgacgtggttttcgtcggctagggtgccgtcgatatcgatgaatacgagtttgctattggttgtcatggttgccttcgtaactggttggacctcccccagtcagcttacgctgacagccccctccagagggggcgaagaaaatcccgcctaaaaacctacaagcatcacacggcgtaggcggcccagcgaccgtgggtgtgctggacttcgatgggcataccgaacaattccgacaagcgttcgtcggtcaggccattctccaacgaaccggtgtagacaatggtgccagcaccgggattacccattgaatccacgcccgcttcggtggcgtcctcggcgggaatcggcttgcgtcccatgatggcgatgtggtcgaaaccggccggaatctcctccaagcgatgggtgaccagcaccacggcacgctcggagttctcttcgccgattcggctcaatgtgcgcatcacctgctcgcggccgcccaggtcaaggccggtggtcggttcatccatgatgagcagctcgggatctcccatcagcgcacgggcgatcaatacgcgggtgcgttcgccttcagacagtcgccacatctccttgccttccagataggagacgcgaaaatcgcgcagcagctggcgggcgcgggcgtattcctcttgcgtgtaggtgtcgcgccagcgcccggtcacggcggacaggccggtgaccacggcgtccagcgggtcctcgaactcggggaactgccggcccaggtcggcagaggcgagaccgatgcgggtgcgcagtttgaatacgtcgtatttgccgagttgatggccgaggatgaatacgcggccttccgaggggaaggtgcgggtggccagcatgccgaccgcggtggatttgccgatgccgttcggaccgaacagcacccaacgctcccccgcgttgatggtgaggttcacgtcggtgataatgacgcgacggttgcgccggaattcgacgttgtcgagttggaggacggtgtttgtcatgagtgaaatactaactatgattcgcggtctgagaactcccctcagtcacctgcgccagactgaggggagcactcgttgcagcgctacttacttcttctgctcgtcgagcacggactggtagacttccacggtcttgtcggcgatggtctcccagctgaacacgtcgcgggcgcgttcgtagccggcctgacccatcttcttggcgagttcggggtcagccatgatcttgtcgatggcggcggccatgtcgtgcacaaacttgtctggatcggtgggggtgccggtgccgtcgtgcagctggtcgatcgggaccagatagccggtttcgccgtcgaccacgacttccggaatgccgccagtggcggatgcgacgaccggcagaccgcaggccatggcctcaaggttcacgatgcccagcggctcgtagatgctcgggcagatgaaggcatcacagccgtgttccaaagcattcagctcaggcttcggcagcatttcttcaatccagacgatgttgccgcgttcctcatccagcttggcgaacgcgatcttgacctcttcggcgatttccggggtgtcaggagcaccggcgcacagcaccacctgaatgtccttggaaatcaggtgcagggccttgagcaggtatggcaggcccttctgacgggtgatgcggcctacgaacagcagggtgggcttcgaacggtcgatgtggtaacgctcgaacaccttccaacccggatcgtctggtgccggggtagcgaagtcggccatggtgatgccgttgtacaccacaaccaccttgttcggatcgaggttcgggtaagcagtcagaatatccttgcgcatgccaccggaaacggcgatcacacgatcggcgtgctcgtaagcatccttctcggcccaggagctcagattgtagccgccgccgagctgctcacgcttccacgggcggaacggctccagagagtgcgcggtaataaccaatggagtgccgtgcagcatcttggccatgtagcccgccaagcaggcataccaggtgtgcgcgtggatgatgtcggcgtccacatcattggcgatctgcaaatcaacgccgaaggtcttcaatgcggggttggcatcagccagctcagaaggcgtgtcatagccgacgaccttcaagctgcccttagcatcggcagcattcgggatagcaggaatgtccgcctcggtgcgcttgccatcaaacgcacgaacggttacgtcgatgcgctcggcaagcaccttggacagttcctcggcgtgtacaccggccccaccatagacgtgcggcgggtattcgcgggttagaatatcaactttcatcggactgcctctccttcgtgcgtcagaaagaaactcaagcacttcttactttagggcaccgcatacaagaaaacgcacaacttccgtcgtgcgttttgcttttcaagccggatttaccgggcaaaagatcagactgccgtgccgttctgatccaaattcggattatgcttggaatcgccagccgtaaagaacaggctcagcacacccacaatgaacaccgcggaaacggtgatgatcagccacatcggatggcttggcagccacataaccacgaagaacgcgataatcgcgatggcgatcagcgtccagctgcccacgcggaaccactgacgcagcgaatgcggtgccttgaacatcttcggattcgtgtagttcgggttagtggtcagcagggtttcggtgtccgcaatcgtaccgccgctgggcttccattcggtgccgtcggtgccgtcctgcagacgctgggacttctgctgcagctgatattcgtcaatcattcccgaacggccacggccacgggtctggtcatactgcgacggcactcccctgcggcctgctttggcttgggcacggcgttctgcacgattcggcatttcactactcctgtttcgacggtgacactgttggctatattacccgcttatcggcggcaatttgccaccagtccatcggaacccactgtgtgtcattgttttttcagtcagtgatgcggtcaatcggtgatgcgataggtttgcgtatggaagtcgcaagtgaccgcagtgccgtccgcgaataccgaacgctgcaccagcggatcatcatccacgaactcgtgacgaaccagttcctgcatgccgacccgctcatggaatgcagcgaccgcatggcagcgttcgatgtcgttttccgtgcgagcgcgctgttcgtcgtccatgtcgccgtcaacgccgatgtatgcggcatcgcgaatcaggtatggagctccgccattgagcaaggcgtacagcatgtaatcgtcgccgtccaccacacgctccatcatccacggctcgataacgcaatcatggtagacgaggttatacagcggcaccggcacaccttggcgcggctcgttgggtgagcgcatctggaagtcgtatggcgcgtaatggcagaatatcaggcttggcactgcccagtccgatacctcttcggacgaggagaggatgccgtgcgagagcagatattcgaagcattcggcgcggcggtcaaagcattcgcggcgggtcatgcggtgttcggggttcgagcattcgtcgccttcgttgcaggtgaagacatccaagtatgcacagtcgagcttgatgccatgcgcggcgatttcggcgaaattgcggcgtacgtagtccggtgcgagctcggcgcacaggtaggtctggcggccgcccgcccagcgtgcgtgttcgggcatcgtaccgtctgccagacgaatcgcattgttggcatcaaaggtttgcgcggtgaagtagtaatcgcggtactggtcatgcgtgccgaaaatatcgccttgctcatggcaggcgtcgaccagcgacttcatgccttcccagccgcctgcctcctgacaagccggcagatagtcggggtgtgcgttgtcgtatccgggctgtgcccaaccatccaagtgcatgtacagtcggcctgcacccatgctgtgcaatgttcgcatttgcttttcgcgctgtgcgaaggtgaccagtgactcgtttttctcggggtggtccttatcgtagtagtacgagtcgggctgtactttggttttgatgccgatgtgcacccatgaacgaccaatcaggtcacgcacggagggattgcgcgccgccttttcgacgagcgtacgcaagcgacctcgttcgttgacgtacgaacgataggccttgcacaccgccgtgtgatcggcgtggtcgaggaactggtagcgtaccacgcggcgataattcattgtgccgaggcttggctcaaaccaagtattgatatgggtgtacgggccatcgctgggatggtcgatgccgtaaccggcattccatggagtttcgcagatggcgatatacccgtgtccgtctgcgcggagctgcgcgaaccacggcatgtaaccgccagccgtttcgaagcggccgtcgaaggcgatatctttggtgctcacggcggtaggccatgtgttggggatcatcacaccttgctcatgggtgatgagtgtcgtgtcatggtcgtcggcgcaatcgaagtccatggctgcgggccacgtcacattggtgatgttcaggccttgctcattgagcggaatccattcgaagagcacatcgcctgaggcacgctccacccatacataggtttcaaaggagtatgcgctgtgcccaaagccggtgaagatgctgcgaatgccggttcccgtgccggtttcacgctgctcatgggtgatggaagtggcacccgcgaacgcgaaggtgccttgcgcgcattgcagggtcggcttgaaatcagcgcaggtattccattcggcaccgtcgcgcgtaaaagcgaactgcattgttcgttcatcgaatcgcacggtagtgccggatacggtgaattccatagttaatgtgctcctgtatgttctcgattgctcccgcttacgggagctcgctcatataacaagataggggtggtctgctgtttgagaccaccccccagtcggctttgccgacagcccccgccagcggggggctagcgctgtctgtttattacttactgcttactgcttcttggtcagtgcggtgaacactgggccgccgccgtagtcgaatgcgacgccggagactgcggaggtgctggctgcggtggcattctggttccacaacgggatagccggaaggtcctgcagcagaatctcctcaccttgctgataatacttgtcggcttcctcggtggacggggcggaaagagccttgtccatcatggcatcgaactcggggttcttgtagttgccgctgttgccgcccttgccgtctgccgaactggaatcgtacagctgtaccagatagttgtccgcggatggataatcagggccccaaccgctgcggtatgcggaggtcatcttgcctgaatccacattggacaggaattcgtcggaagtggacatcgggatgctcttggcatcgatatccagcgtgttcttgatgtagttgcagattgcctcaacccagttcttcgcagtgccatcagcattgtatgcaatgccgaactcaccgctccacggggagatggcgttggccttggcccacagttccttggccttggacgggttgtacttcagtacttcatttcccttgagttccttggagtaggcgctgattggggctgcaaggaagtcgacggcgggcgtggcggtgccgtggaagatcttctcggcgacggtcttgcggtcgatggacatggaaatggcctgacgacgcaggttgccttcctcgttctggccgaagtgttccagccattcaggaatggtgaaggtgagcgtattgccaccgggctcgttgtatgccttcagcgacttgtcggattggaaggaggtaagtgcggtgtcaggaatcgtgttcgtgaagtccaggttgccaccgcgtaggtcggcgtatgccgaatcaggcgaggtatagatcttgaagttcaggccatcgttcttggcgacacgattgcccttgtagtcagggttcttcaccatttcgatgctgtggttgtgctgccaggacacgaacttgtatgggccgttgctcactgggtgctgaccgaacttcttcgggtccttgaacgcggattcgggcaacggcatgtaggcgtggctgccggccttgaccgggaatgccgagtcgggctggctgagcttgacatcgatggtgttgtcgtcaacgacggtcaggccgctcagcgtggccttggggtccacgtccggcttttgcagatcatcatagccttcgattgtgctgaagaagctggcgctggcctgcttgttggcactgttggcggtgtaattccatgcgtttacgaaggagtgcgcggtcaccggagtgccgtcggtgaacttccatccactcttgagcttgatgacgtaatgcgtggcgttgtcgctggaggtgatgctgtctgctacctcgttgtggatgccgcccttcgcatcgtaggtcaccagacctgcgaacagctggtctacaaccttgccgccaccggcctcagtggtgttgccggggaatagtgggtgtgccggctcactgccgtacacggaaatgatattggaatctgaagcattgctggaattggaggtaccggtcgatccgcagccgctgagcagcatgacgattgccgcaccggccgcgaccagtgaagtgacatgacgtgtgttcatgaatctctcccaaatattctggcgtcatctttttggcgacgaaagacaccataggagcttcatgttaaccatgtatgcaatattctcgaaatataaacattactgaagactcaaggcagtaattaatcccagaaacgcaaaaatcccctcatgaagaagggattttcatgtttctgtttggaaagtattcagcgaggcagcatcatcggacgctggctggccttgatcggggccggcagctcgctcttttccttggagaggtactcgtccacggctgcggcgcaggagcggccttcggcgatggcccagaccacgaggctctggccacggccggcatcgccgcacacgaacacgccatcctgggaggtggcgaacttgtcattgcgagcgatgttgccacgcttgtcgagttcgacgggcagctggtcgaggatggtctcggtgtccggatgcaggaagcccacggagatgaggaccagatcggcgggcagcacgcgctcggtgccaggctggcgagtgaacggaccattttcgccgggagccacggagacgaccttcaagccggtgacatgaccacgctcatcggccacgaagccttcggcggtggtcgagttgtcgatggtgaccttggccttctcctcttcggtgccctcgaagttcacggagtcggtggagtagatgtactcgccgccctcttccatggaggaggtcttctggtaggtgcgggcgaaggtcggccacgggctgttgtccggacggcttgacggctctttcggcatgatctgtagcacggtgacgtccttcgcaccctgacggatcgaggtgccgaggcagtcggaaccggtgtcgccaccgccgatgacgatgacgtgcttgtccttggcggtgatgtcgtgcaccggcttgacgccgaagatacggcgcgtggcgtcgggcaggaagtcgagggcgaagtggatgccgtcgagctcgcggcccggaatcttcatatcgcgcggcacgcgggagccgatggccactacgacggcgtcgtaacggtcacgcaggtcatcccacgtgatgtccttgccgatttccacgttggtgcggaagcgggtgccttcggcctccatctgcttgacacggcggtcaagcagacccttctcaagcttgaagttcgggatgccgtaacgcatcagaccaccgatggcgtcgtccttctcgtagacgacgacggtgtggccggcgcgggtgagctgctgtgcggcggcgaggccggcagggccggagccgacgacggcgaccgtctggtcggtcagacgctgcggcggcagcggcttgacgtagtccaaatcccatgcctggtcgatgatggtctgctcgtcaagcttgatcatggtcggcggctggtggatgccgagcacgcaggcctgctcgcacagggccgggcagatgcggccggtgacttcggggaagttgttggtcatggacagacggttgtaggcgtcttcccacttgccctgacggaccaagtcgttccactcgggaatcaggttacccagcgggcatccggtcatgcagaacggggtaccacaatccatgcagcgggccgcctgcgtttgggtccacggttgcaggccggtttcggcgtgaacgtcgaaccagtccttgatacgctcctcaacggggcgttcagccaactctcggcgggtacggaccttcaggaatcctctcgggtcgcccatgtcagcgcgctccttccataacctgctcgtacaccttttcccaggtgccgggcgcattgaaatctacattgttggccttggcttcttccatggccttcgtcatggccacgaactgcttcggcactacgtgcgtgaaccgcttgacggtttcgttccagtcctccagcagggccgcggcgaactgggaaccggtctcttcggcatgctgcttgaccagtgcgtacaccagc

SEQ ID NO: 1649 - DNA, 22574 bp, Unknown
  R221_24m  MAG No. k141_115372
atggtgttcttcggcgtcaagggcgacggtgccggtcgtacgcgagacattatttccttgcgcgcgctgcgcgaacggcgtgcgcggcgtatggctgcgaactgacggcagattcaaccattctcaacataataagaaaccccggtttccaacaccggggcttcttattatgttgtgctatcgcaggatttcagctggagtctattacgccctgcccattagcgtcaggacaatcagcagcacgttcaacgccacaatcagcgccacgacgatcataaagatcacgtgcttgacggttccatcagcccacttgcccatgagttccttgttatgcgtgtatcgcatcagcggaatcacggcgaacgggatgccgatggaaagcaccacctggccgatgaccagcgcctgagtcgggtccttggcgaaccacagcacaatcagtgccggcaccagcgtgaccacgcggcaggcccacatcggggcgttgacgtgcagcagaccgtgcatgatttccgagccggcgtacgtgccgaccgatgtggagctcagcgacgaagccagcaggccgatggaaaagatcgtgccgatcaccgggccgagcacctgcgtgatcgcccgctgtgcgccgtcgatggagtccgtgccagacatgccatgcagcgagttggcggcgagcaccagcatcgccagattcacggtgccggccagcaacagcgcccaggccacatcgattttcgagcctctcagctgcgttttgatcgacggcttttcgccgcctgcgtaatggtcgttcaccagcgtggagtgcaggtagatggcgtgcggcatcacggtggcgcccagaatcgaggcggccatcaacaccgagtcggcgccttggaagcgtggaatcatgcctttgaccacttcgccggggttcggcggggctacgaacagacccgcgatgaaaccgaatgtgataatcagcagcatcacgatgatgatgcgctcgaatgtggtctgtgtcttgccgccttggaaccacagcatcaccgtggagattacgccaatcgccaaaccgccgatgaacagtggaaatccgaacagcaggttcagggcgatggcgccgccgatcacctcggccagatcggtggcgatggcgatgacctcggcctgcatgaagaacatgaatcggccggcgtcgctcatacgctcgcccagcagttccggcagggatttgttggtcacgatgccgagtttggcggactgatactggatgagcacgctcatggcgttggcgagcaccagcacccacaccaacaggtagccgtatcgtgcgccggaggtgatgttggccgccacattaccaggatcgacgtaggccacggccgccacgaacgcgggaccaaggatgctggccagcgcatggtcatgcggcttcttattgttattcgtccctgctccggccccggttccgactccggcaagctggcgttccttcccgatttccggtgtttcctgttcgatgtctgccacagcgttcgtcatagcggttgccgcagtggcatctgcttcggtgtgtgttactgccatattgtttgtacctgttcccttcataccgcgcacagttatagcgcaggcatgtttcccgagtcaacagacggacaatctgcggacgattgatggatgaccggcggactggcagctggcatttcccgccatctcgctcatgaaatgtgaaaaaccgccgaaaactcgctcatgaaatgtgccagacggtagaaaactcgctcatgaaagtgtaaaatcattgatatagcagtaattcggaaaggggctcctcatgtatctcaaacgcaaagccgatgcctatctcaatgcatggaaatccgacccgaatcgctccccgctaatcatcaagggccctcgtcaagtaggcaagacagagactatcgattactttgccgcacacaactaccgttcggtagtggaaatcaacttcgttgaggaaccgaaatatcgtgcaatcactgcggacggttatggcgcgaataccatcgtccgcaatatttccctgatcgacccagccaaaaagttcattccgggcgatacgctcatctttttcgacgaaatccaggcccatcctgatatcgccactgcactgaagttctttaaaatcgacggcaaatatgatgtgatttgcagcggttcaatgttgggcatcagctataagcaaatcgaaagcaatagcgtgggatataagaccgactacgaaatgcgatcgttggacttcgaagaatttctgtgggctcgcggatacgatgaggccgtcatcgaaagcatgttcacccacctgtgtgatgctacgccattctctgaagtggaaatgaacgtcttctccacggcatttatggattactgcgtgcttggcggcatgcctgcggttgtcgcctcccatatacgcactggcacgttcgagggaacactgcaattgcagcgccagcttattttggactaccaggaggatatccgcaaatacacgcaaggacccgatcaggcacgaattctcaacgtgttcaaccatattcccgtgcaactcgccaaggaaaacaagaagttccaaatcagcaaggttgccagcggagcgcgtttcaaagactatcgaggatgcgtggaatggcttgaaacctcgggaatggtgaatatctgccgatgtatgtcctatcctgaactgccgttgaaaggcaattatgacgaaaacaagttcaagatatatttcggcgataccggtctgttcgtagcgatgcttgacgacgaggccagtgatgatctgcgggccaatcgtaatcttggtgtctataagggtgctatgtacgagagcatcgtctctgaagcgctacggaaatccggctatgacctgtactactacaaaaaagaggattccacactggaacaggatttcttcgtccgcacgcgcgaatggctggtgccggtggaggtgaaatcgaaaaaaggcaccgccaaatccatgcggacgctaatcgcttcggattcttatccggaaattcagttcggcgtgaaactatccgccggcaatatcggtagcagcaaacacgtgttcaccgcaccatacttcaccacatttttgctccgacggctcctgcgcgcttatgacgaggggcaggcacctatgctcaacaatcctgagcggtagcccctattcgtctgcgggcacggcctggcccgggcaggtatggaggacggcgagcatggcatccttttcttgggaggtgacggtgagctggtacttgtctttgacgccaatctggcgggccacgtagtcgcaacggtagtcggcgttggtgggtagccagtaggcggcggaagccgaacccttctcctgattggccggaccgtcgacggccagcaggttataggggtcattgccgaattcatggcgtttggcagtggaccagtcgtgcgcaccggattgccaagcgttttcaagggccaccacatggtcgatctgcactttggcgctggtggcgcggccacgtacgaaatggatggtctgggcggtgtacggatcggccagtgtgccggactcgaccacacaggaaccggcgtatttgtaggtgatgtccgtgagatcgcgggcgagcacgtcgtcgcgtacgtcgcagccattgccgtcgacgtcggtggtgcggaaaccgaaggaatcgcggtcgtagccggaggagctttggttgtcgtctacggcgagcgcgttcaaagtgtcggcggctgaaccggtggcagtgtagccaccggtgattttggccacgtcggagctgacctgcggcagtaacaggccgatggtcacgccgattgctacggcgagaacgatgagaatcagcacgcgctccagcggtccagaggcgttgaaacgacggcggaagtgggcgttacgacgtgccatcaatcacgcataggtgaaggtgagggggtcgtggccggcgcgggtggggccgtcgagggcgtcgatggcagcgtgttcatcggcggtcagggcgaagccgaacaggtcgagattctccctctgacggtcggcatgcacggacttggggatgatgatcgtgccgttttcgatgtgccagcgcagaatcacctgggccgggctgacctcatgggcggcggcgatcttctcgatggtgccgtcgccggcgttgaggtcggcgccacgcgccatcggcgagtaggcctccacggcgatgccgtgcttcttgcagaacgccaccacttcgcgctgctgccacgtggggtgcagctcaatctgattgacggccggccatgcgccggtctccccgtgcagacgcttcagatcggcgggcatgaagttgcatacgccgagcgtgcgtgccatgccttcgtcgcgcagcttgacgaacgccttccaggtgtcggtgctgcgccagtcgaacggcgtgggccaatggatcatgtacatgtccacgtaatcgagctggaggagtttcagggagttgtcgaatgccttgagcgcggagtcgtagccctgctcggagtcgcgcagcttggtggtgacccacagggtctcgcgcttggcgccggtgttgtatccggaagcggcgagcgcacgacccacgccggcctcgttgttgtatccggcggcgccatcgatgtggcggtatccggcttccagcgcagattcgacgacaggggccacgccctcgtcatcgatacgtagcatgccaaggccgacctgcggaatggaatggccgtctttcaaggcgatgtccggcacgttggcgggattgatatgtccgttggtcatggcttgtgatgctccttcatgtactgcaactacacgccactgtacacggttatgcaggcgatgtgcgggtgctgcaaccaaacggcatgattgcgcccggccttccgtgtgggagagccgggcgcaatcatgacaacatcacgctctactcctgcgaccggccctcgccctattgttcccgggcgcgaatttgccccggtacaggcgtcaatcgattgacgtttgcaccggggcagaaatcgttgtcccggtacgcaatttcgggccattttcgagaaccaggacaagacaatccccaaagtccacataccccgacaaacagaatcggcggaatacagccaatcccgaaatcaacatactgtcccggttctcacgtagaacgattgacgtgcaaaccggggcaacgggaattgtcccggtacgcgaaaaacacccgttttcgcaaaccaggacagtgatttctgtcctggtacccacatcaaacgattgatgcacgaaccgggacagaatcgcatcgctgcgccgagacagacgcatctgacagccgacaaccgataaacgacagccgacagatggcatctggcagccggttgccggctgccggcaaccgcatcataatgccgcatcagtctctatcaggagcgcttacgacgcaaagcaagcgagaccccgccggccacgccgagaacgacaaccgcaagactcacggcagtcaccgcgctaccggtattgctcagcacaccagtgatcttgtcgccattcgcaccgttggtcttatcgccctcgcccgtatcgggattgatagtagccccgccattacccgcaccgtccgagccgttgccggaaccaccttcggcccgagcggcaaccgcaaccgtataggtttcggtgacattcggattcgacttgagcgttacggtaaccttcgccgcatcagcgggagcggagaaatcgtaatcgagcgtgaactggccggcggaaagcgcctgatcgagtttggcgagcgactcgttggtgtactcatcgcgattgattttcccggcttcggccacggccttgtccaggttctccgtggatggcttcaccggagtttcggtctttttgacgagtgagaccttgtccacattgtggttgctcaactgtttggcgtaagtggcgtaggtgccggctttctccgggttggtgaaatgaatgacgaccttggcttcggggagcacttcgcgtatggctttggaacctgcggagaatactttggacatgccgtcccagccggagatgccggcgattttcgcagtggtttcgttgccgacctgcaccatgccgacgtccacgccggcttgtttgaacgtggtcagagtctgcttggtgtagtcgtatacggtgtcggcggttttgtccgcgtcgccttcaaaggatttccacgccttgggcacctgctgcttgctggggtcggcccagaaatcggagtaatggaagtcgaccagcactttcagccctgctgccgtggctcgcttggccatggtcagtgcgcgatcggcgttgacgttgccgccgccatatccttggccgtctgcggtgaacggatcgttccacacacgcagacgcacatagttcacgccggattccttgagcaacgtgaacaaatcctcgacctcgccattggcgttcttgaacgtgacgccgctttcttccagcgagagcatggatgaaacgtccataccgccgatgaaatcatcgcttaagccttggatggccttgaccgagacgtcggctttaactggttcttcttcggtggcgtttacagtgaacgtgcctcctgcgcagagcattatggcggccacgccggatgccataatgcgagtaagcgcggtatttcggcgcatgctttttctcctttgaatggtgaacgctcagaacgaacgcccagtgatgcttggcgcttcctttccttacgcgccacgcggtacagctgtgtaccacgcaatcgtcgccttagcactttatgccgtgttggtcaaccggtgtatcaacgcctcgtacggcccagtacagcaacaccagcattacagcaatgttgtttagcgtgtggaggcgcgggcgatgacctgggattcggtggtgagcagttcggacttggtgatgctgccgtcgatgcgtccgaggatgcgattcactgccgtgggagccgtccagtcaaggcgggaatccatggtggtcagcggaatctgcaggtagggggcttcctcgttgttatcgaagccgatgacctgcacctgcacgggcacctcataaccagcggtgcgcagagcggtcaatgcgccgatggccaactgatcgttcaaggcaatcacaccgtcgaatggcacgccggaatcaatgagccgctgggtcacacgggcaccggctccgatggtccaatcctgatcggtgttgccaatcagctgcggatccaaggagagcccacgcctacgggtctcttcgatgatgccgcgcagacgcagctgcgcgttgccttctacggcattcagcaatgcatcttcgtcgtaaacgtcacgggcaccgatcactgcaagtctggtggaaccgcggtcatacaggtagcctgcggccatggcggctgcggatacatcgtctggggtcacgtgatccacaatgccccacgtggtacgcgcgccaacgatgaccagcggaaaatcaaccttcagatcatcgggcgaaatgttttccacctcgctcatggaaaggatcatgccatcggacaccgtggagttgaacttcttcagcagatcgcgcgcgcctttcgcggagccttccgcatacgtggtgacgtatacggaatagtcgcgctgacgggcggcctcgatggtgcggttggcgagctcggccagatatggcggaatcagcgaaggcacggcgagggtgatgaagccggtgtgatcgcggttgaggttgcgggcggccacgttgactcggtagtcgaggtccttaatgaccgactcgaccttggcacgggtctcatctgtcatacgcccggagccattgatcacgttcgacgcagttttgagcgatacaccggcggcctgagcgacatcgcgtagcgtcactcgacgcttggctgttttctcgtcgctcatgccgcactcctctatccggacaacattgccattctagcgcggtttagcaggacgttttagcgataagaatggcgttgcggttcagcgtatatccaacggcgtcagtctcgcaacggtgggcgatgatgggatcaccttccacaccgttgatggcgacgggctggtttgagcggttgaggtagaaatcgaagcgggtggagccgtctgcggatcggcggatggtgtgcaggatgcggggatctgtggtgggataggttggagtttgaccaccctcagtcggctgcgccgacagctcccgccagcgggagccaagtgctttgagcaactgggcaatgtcgtgacggttgaggtcgcagcccacgtagatggcggtaccgttgccataggggcggctggtgatggcgggggtgcgctccagctcccagtcggcggcggactcacctgcgtaagaggcaagcactgtggtgtccgcggctacggaagtcacgtcgttctgccacaggcgggtcgtcagaccattggacaggctgatttcgctgggctcgtcttcggcttcttcaccgaggatgttgaattcttcgctgcggatgccgagcatgtcgcgtaggagcccgttgccggcgccggggtagccgccgaggccgatatggaagtgctcgtcgatcaggccggtggcatagccgacgatgacggttccgccggccttcgcgaagtcggcgatacggagaacgtcttcgtcggacaggctgagcacggtgggcagcacgatggttttgtagccggtccagtcgtaggcgagcggcaccacgtccgcgcgcagcccggcatccaggaagccgcggtaccagtcgcgcacgtcgtgccagtggttgagtttcatgctgggcagggtttcggagcgtgtggcccattcggattccgcgctgaacaggatcgccgtgccggcacgctcgagctcagtgccctgcagcccggcgtcggagagggtcttcagcgccttaccgagctcgcatacgccgcggaagaccttggaatcggcgcccgcgtggggcagcatggcggagtggaacgcctcggcgcccgacttggattgccgccattggaaaaagcagatggcgtcggcgcccatggccacgtgggccagggagtcgcgcatgagttcgccggcccgtttgcgtgtgttcagcggcttccactgcacggctgaggtggagtgctccatcacgtaccacggcttgcccagcgcgagggagtccatgagcgcgtccgagcaggcgagttcgtccaggtgggattcgccctcatggaagtagtgatcgttggacacgaagtccacctcatccgcccatttggcgtagttcatgacgcactggtcggtggagaccatgaagttcgtggtgaacggcttgtcggggcagatctgctcgatggcgtcgcgttcggctttgtagaagtcgagcagcatgtcgttgccgaaccgctcgtaatccaactgctgcgacgggttgaccatggcgtcgccgcccatgtgacgtggcagcagcacctcgtcgaaactgttcacgtgctgcgaccagaaggccgtgccccacgcctcgttcaacgcgtcgatggtaccgtacttggcctcgcaccacgtgcggaacgcggccaaggcgttgtcggagtagtcgtagcggttgttccagccgtattcgttgcccatgtgccaggcggtcacatacgggttgtccttgtagtgttcggcaagtttgcggcacaggcgcagcgcgtattccttgaacaccgggcttgtgggctgccacgactggcgtgagcccgcgttgacggtatgaccataccggtctaccggcagcacctctggatgggattcgtacagccacagcggcgcggcggctgtggcggaggccaagtccacggcgatgccggctctgccgagcctgtcgatcacatggtcgagccactcgaacgtgaacgcgccctcgaccggctcgatcttgtcccagctgaaaattgccagcgatacgacgttcacgccggcctcacccatgagacggatatcctcgtccagcgtctcctcgggccactggtccgggttgtagtcaccgccgaacgcgatgccgcggccggattccgtcagcagggacggccacctaaatgctctatgagtagtcatattaatcaaatcctttattgtatcggctcatggccggtgctgtgtttgccggttttgggctttggctcccctcagtctcactgcgttcgacagcgtcatcggcgctttgatcaaggcgtgaatgctgcgttgcgttactgcattgccatgttgccatgttaccgcgttattgcatcgctacgttgccacgttgccacatcacattgcattgccgcattgctgcgttgccgcatcacatatcgcaacacaaacgcagcaacgcaatgacgaccggagatggcatcgccgccacccacgaggaaccgcaatgcaacgcggtaacgtaacgcaatgcgatgtgattcccgcgtagttacaggcagttacagattgagtaccgcatcagcaatgcgcatggcggattcgcggtgggagaccagcaccacagccgcgccgcgctccttgtctgcatgctgctcacccacggccatagcgtgaatggaacgtagaataatagcctcgttcaaagcatccaaacggctggtcggctcgtcgaaaagcaccagatcagcattgcgcaggaacacacgagccaaaccgatacgctggcgttcaccttcggatagacggtcgcccaactcgcctacctgagtatcaaggccatcgggcagggaatcaatgagatcaagcacggaggccttggcgagagcctgacgcaaacgagcatcgagaccgtcagctgctgccacctgaacggcatcgccctctgccgattgcgccgccaactgctgctgtcgggaatcaacggtcttggcacccacttccccattgcctgcaacatttgcagcttcaacctcggactcaggcaaagcaatcagcagattgtctcggatagagccatcaaacaggtgggtttcctggctcatcatggcctgaatacgtcggcgagcatgcacatcgacctcgggcaacggcgtgccggacaacgtcacctgaccgcgctgcggatcccagtagcgcagcagcagcttgagcatggtggacttgcctcggccggacggcccctggatacccagcacgccatgctgcggcacgtcaagcgagaagtcggacaggacttcatgctcccccgcatatgcaaaggtgacgtcatcaagacgcatgcccatatactcctgcggcacaacagtgccgttctcggtcacagcgggcacctcgtccatcagtccgaacagtcggctagcggacgcgaaggtctgagtcaggttagcgggcaaggcggcgagcgccaaagtcggtccgaacgagccggcgaacagcacgaaggcggcaatcagagccggaatgctctgcgggttcgcgccggcacaggcaatagccacggcgaccgaagccgctgtgagcacagccaccaagagtccgctgattccggtgaaacggccgttgaccttgctgagtttggcgtgatccttccacaacgcatgggtacggtcctcgatggcctgcgcacgttcctcgccgcggccaaatcggatgatttcgtccaggccgcgcatgtcatcgagtatcacatcgtcgagttctccggcagcgccacggatggcagggccaaggttacgtacgccggtggcaaagaatcgcggcacaaggatgccgataaccaggtgggcggcaatcaacgccagcgccatccatgggcttagggtggcagccacaatcgtgtagatgatggtggaggttaccgcgatggccaccggactgatggtgtgggcaaagaagatctcaagcagttccacatcggtggtcagcatggcgataaggttgcccttacctttgcccgcgagcttggccggcgccagtctgcgcaacgcggcgaacgccttggaacggaagagtgcgagcagatggaatgccacattgtggttcagatattgttcaatgtatcgggtgatgccacgcagaagagcacagataatcatcatgatgacggcgggcgcaacacccatgccccacaccggattaccggtaagtgcaaatgccgcgataatgccgaacacgggcaggaaagtggccgaaagatggccgatggtgccggcggtggaggccgctgccatcagtcctgccagaggtcgggcttccttaagcagtcgcctgatcacttggaatgtgctcattttggaagacgaatcgctatttgcaacaccagccggagtctcagccgaggcctgctcactcccgccaacggaagccgtcggcaaagctgactgcaggcggtcaaccgtcatacccgcctctgcgcttacgcgcgctgcgccaccctcagtccgactgtcgtcggacagctcctgcttgcgggaaccaacctgcagcacacgccgagcatggccttctccgaagttctcaatatctgcctgcgtggtaaacagcttggcgtagacgccgtccgccgtcatcagctcggtatgggtgcccctctcaaccgacttgccgtgttcgagcaccaccacttgatcagcgtattcggcgttggccatgcgatgggtgatcataataaccgtcttgccgcgggattgcgccaattcgcgaattgtatccaggatcagctcttcggattccatgtcaacgctgctggtcgcctcatcgaacacaaataccggcgaatcatgcaggagcgcgcgggcgatggcgatgcgctggcgttggccgccggacaggttggcggcatcggactcaatcggcatgcccagtccgttcggctgtgcgtgcacgaagtcggcaatgcgcgcctgctcaagcgcggaccacagacgggagtccacggaatccggcgaatcaggaatctcgtcatcgggcaaggccatcagaagattctcgcgcaatgcgcccgcaaacagatggctgctggcaccaatcacagtgacggctccggccagtgtttcgcctgacaaatcggatacctcgacgccgttcagcgtgagcgaacctcggtaaccggccagtgtaccggcgagcagcgaggcggccgtggacttgccggaaccggagatgccaacaatggcggtgaactgaccgggccgtgcggcgaaggtgatgttggtgagcgcaggagcgacggcggaattggggctggtttcaccttgcttatcggtctttgcggatgcggacttggagtcgccgtgcccggcatcatcataggaatagccgacgtggtcgaagcggaccatcagaccgtcgtcagcggaatcggaatcgttggccggcagggtcgccgtgccatgctcgggctccggggtatccagcagagcgaagatgcgcttggtggaggtcatgccgttcatcgccacgtggaagaacgagccaagctgacgcatgggaataaagaattcggcggacagcagcacaatcagcagcagtccggcgagggtgagcggaagcccgcaccgaacggcatcaggtattgcaggccgtagaccaggtaggcgaatgcgccgggcaggtgggcggcgagcatgatcggcgaccagccggcggtgctggctcctgcggcggctgcggtggtatgcgtatactgccatagagccacaccaatgccggccgccgcaccgccgtaggccacgatatccatggcggtcagcgagcgcagctggatctgcagcacgcgcatggtcatgaccctgcgctccacattccgcgcaatcccattcaccttaagcgaacgccctcgcacacgccagacttttaaagtgagagaggccacagaattatcgattgcggagtgcgcatgctagacgcgccaaccagaaaaaaatatgcttcgatatcaggggctgaagcatccactacacccaatacgtgcatttatccgtttcgaggaggctaatttttgcgtttgccggaggcctacttccgtttcaaggggctgatttcgcatttgccggaagtctatctccgcttcgaggggctcctcatccatgtaatcggaagtataaacggctacacgtcaacgtcattccgccgttttagggccgtgtctacttgggcatcagcccctcgaagtggaagtagacttccagataaggcaaaatcagcccctcgaagccgagaaagcacgtttctacggtgtcagaagccgacggaacgcaaaagggtcgtctgcacgcagacgacccatatgatcaattcgccaatagacgcagcaaacgcggcctagtgctgctttttgcgcggcgaccagtgcttcggcggcggccgtacttatcggacaggaagccggagaagccggcgccgatcacgccgccgatcatgatggagctgatgaccagaccctgcagggccgggctcagcgcgtacttgtcctgcaggcagtcgatggctcccgaaatggacacggtgtcataaccgtagagcaaaccggttagacacggcgttgtatacaatccacaaaaccagacagacaacttctccattgcccacaacgcgcgcaaccttacgccagcgtaacctaacttgtcagaatggctcgattttgtcaacagccatcacgcaacgcacgtaaggacacggcccgcttatgcttgaccactacaccacgcctggcgaatccatcgaaatccgcgacaaccagaccatctactccctacttaccgatcgccttgcccgcaccggcgcggacacggtaatcgccgccaagaaaatcggccccggccgctggcagaacgtcaccaccggcgaattccacgagcgcgtggtctcggccgccaagggcctgatcgcgctcggcatcgccaagggcgacgcggtgaccatcttttcctccacccgtctagaatggggcattctcgatttcgcactggccgcggtgggcgcggtaagcgtgccgatctatgacaccgactccgccccgcaggcccagcgcatcatgaacgattcggtggtcaagctggcctttgccgacaatcgcgagcgcttcgaccggctcgactcggtcaaggaccactgccctgccttgaagcagattctcatgctcgagggcaacgcactgggcgcgctcgaaggtctgggcgtggctgtttcggacgaggaactgaacgagcgcgtggccaccgtgcgcgccgacgatctggccaccatcgtctacacctcgggctccaccggcaacccgaagggtgccgaactgacccataagaacttcgtgtccatcaccatcaccgcttcgcaggcgcttcatgaagtggtgcttgacgaccatccacgcctgctgctcttcctgccgctggcccactgcttcgcacgattcatccagtacgcctccatcgcctccgatgacggcgtggtcggttatctgccggataccaagtccctgctgccggacctgcgttcgtttgaaccgacctacctgctgggcgtgccgcgcgtgttcgagaaggtgtacaacgccgcctcgcacaaggccggtgccggctggaagggccgcctgtttgtcaaggccgccgaggccgcgcgcgtctggagccgcaaggagcaggccggcgagcagcacacatttgccgaaatcgccgaacgcgccaagtacgaaacgctcgtctaccgcacggtgcgcggtgctctgggcccgaagatcaagtacgtggcctgcggcggcgcaccactttcgcttgatctggcgcatttctacaacggcatcggactgccgatgattcagggttatggcatgaccgaaaccgccgccccgttcgccgccacgcgcgtgaccgacaatgtgatcggcaccgtaggccagcccgcgcccggctcctcgattcgcatttccgacgaaggcgaactgcaggtcaagggcccgaacgtgttccgcggctaccacaatctgccggagaagacggccgaggcgttcaccgccgacggctggctcaggaccggcgacctcgcgtccatcgatgacgccggccgcatcatcatcaccggtcgaatcaaggacattattattaccgccggcggcaagaacgtctcccccattccgctggaggaggagatcgccaagtgcccgatcgtggagcactgcgtggtggtgggcgaccagcgcccgttcatcggcgcgctggtgacacttgacccggagtcgctggccatttggctgcccgcgcacggcctgtccacggagacgccggtcgaccggctcgccacgaacgccgcggtgcgcgaggagatccagcagtacgtggacaaggcgaatgcgacggtctcgcgtgccgaatccgtgcgcaagttcgccgtgctgggcacgcagttcacgcaggagaacaagtgcctgacgccgtcgctgaaggtagtgcgcccggccgtcaaccgcgtgttcgccgatgtgatcgacaacgagatctacaacggcaagcggtgaaacgcgcggttcgtaatccgacacaaaaaagggccttttgaaccgcacccccgatcatcgaatctgtattactccagtccaacaatcgaggtgcggttcaacctcgccgggcacttcatcattcatcactggcatggttccattatcacgcacattatggcgcagagcgaatacggcaccccggcaacgcgagtgggtcgccggggtgccggagcgcgggggtgccagaatgccgaagggccgggataccggagtgcccggtcgccggggtgccgaaatgccgaagcggtgtatgggtgccgcccggcccaggtgggtcacgcccgggtcagtttcttgctcctgagacgcagcacgacatcggcggagtcggcgacacgcttggaatgcgtcaccacgattacgcatttgccgagctgatgggcggcatgctgcagcagatgaatcacctcgtcggtcatctccgggtcgaggctgcccgtcggctcgtccgcgaggatcgcgcggcccggggcgaccagcgcgcggccgaccgccacccgttgacgctggccgcccgacaggtgcatgatgttgcgcttggattcctcacggctcaaacccagttcctcgaggatcttcatatcggccttggtgctgaccagccgcaggttctcttcgggggtgaggtagtcgatcaggttatggtcctggaacaccagggacacgtgctcccgacggtgcttcgcatagcccgatgcggcgatgtcctccccctcgaagcggaccactccccgggagggggcgtccaggccggccagcagagacagcagcgtgctcttgccggcgccggacgggccggtgatcgcatacatcttcccggattcgaaatccgcgctgacatccgagagaacaaggatcttcgccgcgccgtaggcgtaatcgacatggtccagttgcagacagttagacatgattggtgactcctaacgcatagaggaaagaatggatttcggggatttggacagtacggcggcgcatgacacggcaagggccacggcgatgaccgcgcatccgagcagcaggatgagcaccgtctgctcaggcggcaaggcctccacgtgcaacgattccaatggcgcgacgcccgaatcgcgcaacagtcgggaagacacgtatcccgacagcatggcgccggtgcccagcgaacacagggcggcgaccgccgccatgagtccggtttcgatggcgagttgtgcgactatccgcatcttgccgatgccgagggccagaagcgtgcctatctcatggatgcgtgagcgaatccagaagaccagcgccatcgccagcaccagtacgtccgcgaggcagacggacagcagcaccatgcgcaccagatcacgcaccgtctgcacggattgcaggacgccggagagccgggccgaatcgtcggtgacgtcgtacttgccaccggccatggtcttggcctgactgaccgccgcggacaggtcctgcggattatccgacaggcatcggatcatgccgatccggtcgtttccggtcagagcggaggtcactcgcctgcccgaatagatgaggttctcggaagtgtccgagggcagggggctttgggcctgcacgttgccggagaagatcccggccacacgcaccgtggcgttgcgcccctcctgccggagacggaatgtcgagccgatcgataggccgttctgcagcgcgaagtcgcggtggaccagcacatcgtcgccgtcgcccgagatatggcggccctgctccaggcggtacaggccgctctggaattcctcggacaatgaggaatcggtggtgcccagcacgctgacctgcatggccagatcggagtccagtcgggggccctgccggggcatgaccggacgcgcgccatccacctgcgccaaggtcttcgtcgcataggcggtcttcgtcacaccggggatacgcgagaaccggctcgcctcctcggcgctgatgggattctcgccggcgctgacggtaaaccctatgcccatgcccgcgccgatgccgtcggacatggtacgcagggccgtcgagactccgacctgcgccaccaggctcgtgaagaccatcagcatcagcagaccgatgatgccgctgcgtaccggcttgcgtacgatcgccaacgtggcacgcttccacacattcatgctcatcatcgattctccgacaggtctcgcggcgatttgcgcagcatcggcatgcacgccaccgcgacgcacaccagcatcaccgccaacaatccgagcgccacgtacagcatggcggtcccgtcgaccgacaccgtgagcgaatccagggtgcgcaccgacatgctggattcaaggtcgccgccgacctgccccatgctgctcagctccttcgccgcggaggcgttcacggaatggagcgccgtggtgccgagccattgggccattccctgcgcgcacagccagccgaggacgagggacggcagaccgatcagcatcatctcggcgaggtattgggcgaccagtgagggcttgccgacgccaagggacaccagtatgcccatctcctgacggcggtcgttcatccacagcagcagcatgagactgagcacgagcacggccgagacggtaacgccgatcagggcgccgcgcatcatggagcgcacgccgcgggcggcatgcagcatgctcgacgaatactggtcgttgcgcgtgatctgatagttgttccaatccaccgggagtttctttgcggcgtccatggtcttctccacgtcaacgcccttggacagcacgaaggtggcgtcctggtatatttccttgccgtccttgtactggtacaggtcgcgtgtggtatccagatcggtgtagatggtgttggcggtgagttccgctcggctggatacctttctggcgctgtcgcccttgaatatgcccacgatggtggtcttgacggtcgccgtcgaatgtgattcgttgtcggcgtcgtaggcgttggccttgagcgtgagcgtgtctccgactttgagcccgttggctttggcgagatcctcatggatcatcgacgtgtacttgtcggaggccttcagatgccgtccttcggccatgccgagcgtgcgcgacgtgaacacgttgagtttcgacgaatcattcgtgcctatgacgttggcggcgttgccgaattgctgctccttggtcgcatcgtaatcatcgccgccggggaccttcgccacattcgcccccacgagatcagcggtggcgttctgacggaccatatacgaatcgaccccgggcagttgggcgatcctgcgcacgtcggcgggacgcaccatgccacctccgcgaggcgtgagcatgctgccctgcaggttgctggccagcacgaacccgccgaccgcttccttctcgattcgtccggcggcctgttgagctgcccgagaaaccgcgatcgtggatagcatgctcgccgttatgatggtcaatactataaggagcactatggttcgtactcgttttctgagcacatagcgcaccgaccgtgcaacgaacgtcatcaatacctcctgtgggccttgggcttttcgcccaaaatgcgaaacatgccgcgtttcgccggttagttagccgcgacaatacatgatgcacctcaagatacgggaagagatacgccttgggcgaaaaacggaacagcggcgaatgtcgtttattctggattttggtccatctcgggccgcgtcgatgcgtcggcccgagaggaatcagcgctcgcgcctcaccttcgaggcggcgaacacgaggagcggcagagcggcgaacgcatagttctcgcattggatgtacaagtatgcgaccaggacgagccagcagatgacggtcttgtgccagacgccggattcgcccggacccgcgccggcaacgccatcaccactattgcccccggcaacatcagcaacgtcggcaacgtcggtgacacaaacaccgtgcgccagcccgtcggacgatgcgccatccgcaccgccacggcataccgtcctcccgcgcgtcatgcagaccatcgaggctccgaccagcatggccagcccgatcagcccgtattcggcgatgacgctggtatacgcgcacatcgtccacaccgtgtccgcgttcacgccggccgcgaatcccgtggccgcgccgccgttcataccaagaccgtccagcagccgtccggctttggccgcgccggcccacaccgcattgatgatgttgcccgcgccataaccggtgagcagcgtccacggatgggtgagcaatccgcatatcggatcgaggctttggtagatccgcgcgaagaacgagccgtctccctcggccccgttctccgcgatggcggagagtctggaatccgccagcacacccagcaggcccagtgcgcatgcgccgagaatctgcagcatgccccggacgcggcgtgcgccgtcatgccaatcggtgcgcgccacaagggcgatcagcaacgccacgacggaatcgatgacgattctggtgccggcttgcatgagcaccgcgccgacggcatacgtgacgatgaggtcacgcagccgtttggcgtagatgcggtcgcgcccgcgcatgagccacatgagcggaagcagtatgccgaacaggtgcatgccgatatagctgggctcggcgaacaggaactgcggacggccgccgccccacaccgagttgtcgctgatgtattgccggtacatgaggtgcgagaaatagtcggtcaacggtttggcgcgcagacggatggacagccattgcacgacgcccactccgaaggaaacccagtatgatgcgatgagaatccgcaatggcgtacgccacggaatgcgtttgatgtcgaacgcaagggcgatcgcacccaaagtggcgagcacgcccagcaatccggtgatgctcatgaacgcggcgttgaggtggatgccgaacttcagccatcccgggatggacaggattatacagaccaccggtaggaggaacattggcaggtaccggttggctgcgatgcgcagttgccgccaattgcataggcagtacacggcgaacagcgccggactgattggcgaccagaacggcgcgtacaggccaagcgtggtgccgtccaccggaagaaaagcgacggccagcaacagccaaatgacgttgcgttcctgcgatgtcagaaatcgcaggaacgaccggtattgcggtcggccatgatggttgcccgcgtcgatggtgtcgttgcgtacgcatgcctggttcatgtgattctccctccccgtcaaccttactcgttcatcacgatgcgcggacgggggcatgctttccccgccgaacgtgcaatggcccgaacattgacaaggccgcaccgaatgcccccatcattggcacattgtgcgatctcgtcgcggctggctgacgaaataatgctggccgaccggttacattggttcggtacagtgacggcattattggccactggatcaagcgatttgcggcagaacgacgaaagcgacacttgggcgaaaagaggcaggcatgaccacgaatcgaccgctcattgcggtgactccgctgatggattacgggcgcgatagtctgtggatgctgcccggatacatggaggcgataatgcgggccggcggtacgcccgtcatgttgccgctgaccgatgacgccgacattcttgcgcaatgcgccgaacggtttgacgcgtttctgtttacgggtgggccggatgtgggaccgatggttggtgcagtggcctccgccaccggccgtagcgaggtgctctctcctgagcgcgaccgcatggagtcgattctgctgccggccgcaatggcttgggacaagccgattctgggcatctgccgcggcattcagttcatcaacgcggcactgggcggcacgttgtggcaggatttgccaagccagcatccgagcgatatcgaacaccatatgaatccgccgtacgatgcgttcggacataacgtttccttggtgcccggcactcccctggcttcattgttctcggggcagactgagattgcggtgaatagctatc

SEQ ID NO: 1650 - DNA, 15181 bp, Unknown
  R221_24m  MAG No. k141_115950
gctcaccccggccggcgtgattcaactcggtcttgtgatcgagatcatcgccgtcgccctggtcgcggtccttatgcctgtggggttctctgtgtggtggcagcttgttcccatggccgcgtacggtctgggtctgggcttcgcctccgcgcagctgaccagcgtggtgctctccgaagtgccggtcatgcagtccggcgaagggtcggccacccagtccacggttcgacaactcggcaccgccgtcggttcggccatctccggcgcgtcgttggccatggccgtcaacggaacattgccggcgcggctcgaatccctcggactgcccgccaaggtcggcgacggtctggcccaggcggtcagcggttcggcgggtggagtgatcggcgcgttccgcagcggtgatggaccggcggcccgattcggcgacgaggcgccgaagattgccgatgcgatgacttcagggttcgtcgaaggaggtcagtggacgcttctggtcgccggcatcatgctgttcatcggtttgctggcctcggtggccgtgcgtcgtgccgcgttgtcgcacaacgtgcgttgacgcatgacggctactgtcttatggggagtgcggtcgtgcgcggtcgaacgatatggtccgcataccgtccaccacacctgcggtcggttcgccggtggaaggaacgatgtatcagacggcgtgtcgtaatccgatgatgctgtaacatatcctcttgtgcctcagcgaggcacgcacggccccgtagctcagttggttagagcgccgccctgtcacggcggaggtcaccggttcaagtccggccggggtcgccaccaaactcccgatgcatgtcgggagttttttgtttcctgccgttcttcgatgccatccgcaaggacggtgaaagtgattgcatccgattcgacacgccgtccgcaccgatgccggcgttaagggggcgcccgtttgcaacgggtgaaatgcatgaggaagcgcatcggcggaatgttcgcgacgcatgacgaaccacggaaaaaccgcggtgggaggtcatggcggctcgctactattttcgctatctcgcatgttacgaaagtcttcaaggagtaagccatgaccacgctcgccattgatatcggaggaaccaagatcgccgccgccgtctgcgatgaaaatgacagcatcatccagcgctggcgcgtccccacgccgatggacgccgacgccatcaaccagcacatcgccgaggtgtaccgcgaggctgtggccgccgggcacaccgatatcgaggccgtcggcatctccgccgccggcaatgtgagcgcggatcgcaagacgctcaccttctccgccaacattccggcatggatcaactacgatctgtccgagcacgtcggcgcgctgatcgaccatgccgtgccggtcatcgtcgaaaacgacgccaactgcgccggatggggcgaattcgtgcacggcgccggccagggtagctccaacatggtcgcgctgaccgtgggcaccggcctcggcggtgccatcgtgatcaacggccagctctaccgcggctccttcggcatggccgccgagctcggccacctgccgatggtcccggacggcgaccactgcggctgcggcctgcgcggctgcgccgaacgttacacttcgggaacctcgctggagaacttcgccaagtccgccgtgcgccgtcgtcctcaggacgccaagcgtcttctggaactgtgcggcggcgacatcaccaaactggaggggccgatggtgtcccaagcggctcaggaaggtgacgtacttggcctgtatgcgttcggcaagatcggcgaatggctgggccgcaccatggccgccgtttccgccgtgcttgacccggacctgttcgtgatcggcggcggcgtggtggccgtgggcgacatcctgctggagccggcccgctacaactaccagcgtttcctggaaggcagcgcctaccgcggccatgccaagatcgtcgcggccactgcgggccaggatgccggtctgatcggcgcggccaacctggctctgcgctgacgatgtcgctccggcaacgggacgttagtctaatggtgagtcatggccggtgccatggctcactgccgcgctgatagtgcggtcgatgagtttccgctgcctgaccgtggaatcgaattccgggttctcagcgatttcctcgtactcgtgttcggtggtcacgccggcgatttcggcgataatctcctcataggacgtttcgacggttcgatgcacgccggtgacgtgcccctgacgtatcacgacaatgcggtcggataccgcgaacacatccggcagatcgtggcagaccatcaccacggaccggccttcggagcgcagtctcttgatatatgcgagcacttccgccgactgcatcaccgacagtgcggcggtcggttcgtccagcagaataagctgcgggtcattgagcagcgtgcgtgctatggccacggtctggcgctggccgacggataaggatgcgataggggagccgacccgaatcgccgagctcagggtcttcagcacggaacgggcacgcgagttcatcgaatcgtcatcgcgtatgccaatctgattgatctccttgccgaggaacaggttcgaggccacgtccaggttgtcgcagaactcctgcccctggaacaccgatgcgatgcccatgcggtccgcctccctgatcgagggaatggtcacctgttcgccgttgagatagatatggccgaatcccggctgcagaaatcccgcgatgaccttgatcagagtggactttcctgcgccgttatcgcccacgatggcgacgacctcctggcgttggatggacagattcaccgatttcaacgcctcgacgaagccgaacttcacacagatgtcctccagccgcagcagaggaggtgtgctcgaattcctcatggtgtgttccttcttctcactcttctcctggtaccggtcactggctgacgtcattgcgaaccgagaactcgatggcgcataatgcgccgcctagcgcgcagttgtcgttcgggtgggatgacacgagtacatcgatgggtgccacggcatcagggaacagcatgcgctgcaacgcttcattgaacggttggatgaatacgtcgccggtcatggccagcttgccgccgagcacaatgacctccggatccacgctgatgcacagatcagccgccacctgaccgatacgcacggccgtgtcggcgatgatgcgacggcaaccggggtcgccttcgttggcaaaggacaccagatcatccagcgtcatattgccgtgtgtgacgctgagcaactgcaccagcctgttttccgccacgacggtgtcaaggcagccgcggttaccgcacgaacagatggcacccagcgggtcgacctggatatggccgatttcaccggccaggccggtcacgccatgcatgatttcgccgttgatgacgatgcctgcgccaaccccgtcgttggctgagatatatacgaaattgcgtttgcctgccgccacgcccatacgggattcgccgtatgccgcgaaattcgcgtcattatcgacgtatacgggaacgttgaacgccgtgcgcaacggggccgtgatatcgacgccgtcccatccgggcagaatgccgggaatcgctatggtgtggtcgctggtggccaccggtgcggccacagccacgccgatgccgaccagctcgctggcttcggcgtcgatgctgctcagggtctcattgatgagcagcatggcgcgttccagcgttgtgtccgccttgtggcccaacggcagggggagcgtgtgctcagcgatgattgacttcgagaagtcaacgatagaaagcgtaagatgacgtcgcgcgatccaaagcccgacgccgaggccctgatgccgtgcaagggtcaccagagtggctctgcgaccgttgcgaacggtgtttttggtctccagctggtcttcgtcgacaagctgatggacgagcgtggacacggtcgcagtggacagtcctgtcacctctgccagttcgacctgtgtcatggcgccgaacttgtggatgctggccagcaagttggcgcggtttgcctcgcgaagcgaggtctgcgaaccgaaaagccttgttgccataagagttcagtgtagtcgttaccggcatgaggcacagcgaggcgcagagcgtggatttttcggcgtgtcgccttgtgatgcgcgaaaaatcgacattgcgttcattggtcgaacataaacgacaggaaattcgctttcttgagtttgacaacttaactcaatacggtattctatgagatgaacctgaggttattctcaggttcgggcgaccaaggagggttcgccatcccctcgaagatgaaggagaacaaatgaagttcactaagaagatcgtcgccgtggtggcaggcgttgccatgtgcgcgggcctcgcggcctgcggtggcagccgtagcggccaggcaactggcggtgatgccaagatcgaaaagggcgccactatcggcatttcgatgccgaccaagtccgaagagcgttggaacaaggacggcaacaacctgaaggccaagctggagaaggccggatacaaggtcatcctgtccttcgccgacgataagccggcccagcagaacgctgacatcgagaacatggtcaacaacgacgccaagatcgtcgtggtcgcttccaaggacggcaccgcagtgggccccgccgttgagaaggcccgcgatgcaggtgccaaggtcatcgcctacgatcgactgatcatgaacaccgacgccgtcgactactacgccaccttccagctggagcaggtcggcgtgctcgaggccacgtggctcattgaccagctcaagcttaaggatggcgccaccggcccgttcaatatcgagctgttcaccggttccccggatgacaacaacgccaagtacttcttcaagggcgcttgggatctgctgcagccgtacttcgagaagggcgtgctcgtctccccgtcccagcacggtcagggtggcgtgaccaaggacttcaccgttgaggattggcagaagatctccgtgatgagctggaagaccgagcaggcgcagaaggacatggaatccatccttgactccacctacgcccacggcgagaagctcgacgcggtcctcactccgtacgacggcatcgcccagggtgtgatcaacgccatcgaatccaagcgtcccgacatgaagccgggcaccgactcctggccgtacatcaccggtcaggacgccatggagatcgcagttgccaacatcgccaaggataagcagggcgagaccgtgttcaaggacgtgaacaagctggctgacgccgtgtacgacatggtcgtcgagatcgccgagggcaaggaagtctccggcctgaacggcaagttcaacaacaacaacatcgacgtcccgtccaagctgcttgacccccagaacatcaccaaggacaacctccaggatctggtcacggccaactacatcacccaggatcgcttcgacgagctgactaagtagtcctcatcaggcaatccgtaaacaaacacaatgacatgcggcgcatagccgatatgcgccgcatgtccatgaacacagaactgtgacgaggagtgatgacatgtcatcaaatgacaccatcttgacgatggaaaacatcacgaagacgttcggtccggtcaaagccctcaccgatgtgaatctttccgtcgatcgcggcgagatccacgccatctgcggcgagaacggtgcaggcaaatcgaccctgatgaacgtgctttcgggtgtgtacccatacggtagctattccggcaaaatcacctttgatggcaaggaatgcaaataccatactattaatgattccgaggccgacggcatcgtaatcattcatcaggaactggcgttgagcccgttcctgtccattgcggagaacatcttcatcggcaacgagcaggccaagggtggcgtgatcgactgggacaagacccgcgccgaggcgaagaagctgctcgatcgtgtgggacttcccgaagacccggataccagggttatggacatcggcgtcggcaagcagcagctcgtcgaaatcgccaaggcattgtccaaggacgtgaagctgctcatcctcgatgagccgaccgctgcactgaacgatgaggattccgcccacctgcttgacctggttcgtcagctacgtgacgagcagggcgtgaccagcatcatcatcactcataaactcaacgaggtcgccgccattgccgacaatgtcaccatcattcgagacggttcgaccgtcggtgtgatgtacgtgacgccggagacgccgctcgaccaggaagaactcatccgcaagatggtgggtcgtccgctgcacaacctgtacccgaaccacccctccaataccccgggcgaggaatacctgcgcgtcgaggattggaccgtgcatcatccgctcgacgcggagcgcgtgatcgtagaccatgcgaacatcaacgtgcatgccggcgagatcgtcggtctggcgggtctgatgggtgcgggtcgtaccgaaatggccatgtccatcttcggccactcttacggttccaacatctccggcaaggtgttcgtcaagggcaaggaagtcaagatgcccaatgtgcagtccgcgattgacgcaggtctcgcctacgccaccgaggatcgtaagggcaacggtctgaacctgctgcagaacatccgagagaacgcatccctggcctccctgaccaagatcagcaagggcggggttgtggacgacaaccttgagcgcaaggaagtcgaacagtaccgcaaggacttcaacatcaagtgtcatgacatcgatgtgaatgtctccaccctctccggtggtaaccagcagaaagtgctgctcgccaagtgggttatctcgcagccggacatcctcatcctcgatgagccgacccgaggcatcgacgtcggcgccaagtatgagatctacgaaatcatcgataagcttgccgatgcaggcaaggccgtcatcgtgatttcctccgagctgcctgagctcatcggtatctgcgaccgcatttacacggtgtcctacggtgtcgtcaccgacaatgtcgagaagaatggatttacccaggaatacctgatgaagggtatgaccaaggaaagggaggtggcagcctgatgagcgccgcaactgcaacacctgcaaagaaagaagaaaagaccggcctgctggccacggtcgccaacaatgcccgtcaatacggtattgtcggcgcactgctgatcattgtcgtggccttcgagatcctgaccggaggtgtgctgctgaagccgaactccttcgtgtccctgatccagcagaacgcctacgtgatcatcctggccattggtatggtgatggtcatcatcgccacccacatcgacctttcggttggttccttggtagccttcatcggtggtgtgtgtgcactgctgatggaacgcgccggagtcaactggatgctcgccatcgtcatcgctctggtcgtcggcctgatcgtcggcgtctggcagggcttctgggtcgccgtcatcggcatcccgggcttcattaccactctggccggcatgttgatcttccgtggtctcgccaccgtgatcgtcggcgaatccgtgccgattacctccctcgaattccgtggcattgcccgtaactacctgcccaacatccttggctggtggggtccgttcgacggtctgaccattgtgctcggcatcctgtgcattgtcggctttgcctggagccagctgcgcaagcgcgcccgtgtggccaaggtcggcctggtgcccgagccgatgagcctgaccgtcctcaagattgtgcttgtcgcggtcgtcatcgccttcgtcacctacctgctggcttcctccggtaacgctgatcagggtggtaccccgatcatgctggtgatcgtcggtgtgctggtcttcatctacaacttcatcctgaccaagaccgtgttcggtcgccacgtgtacgccgttggtggcaaccgcaaggccgccatcctctccggtatcaacacccgccgcgtggacttcctgctgttcgtccacatgggcttcctgtccgcagtggccgctgtctgcatgctttcccgtctggcttccgcaactgctcaggccggtatggagttcgagatggacgccatcgctgcctgcttcatcggtggcacggccgtcaccggtggtattggtaccatcccgggcgctgtgattggtgcattcgtgatgggtgttatcaaccagggtctgtcgattatgggtgttgacaccgccgtggtgaagaccatcaagggcctcgtgctcctgctggccgtcgccgtggacatcatatccaagcgcaagaagagctgaccttcccctttctcctcctcgatgtgggattcgtgccggtgccgctggtgcggatcccacactgttatctgccgtcattcttgtaatcaaaggactttttccgccatgaaactcaccgcgcgctccacctcccgtatgtatgcattgacctgcttggcctgcgttatctggctctggcagtcactggtcgaggccaataacgatggctcgctgttcaattgggccactattgtcttctcgctgtgcttgctagtggtcatcggatggagtggttggaatgccgtcaccgggtggaacgccaaggagactgaggccgccacggcgggtgccaaggatgatgagggcagcactgatcggtaacgtatatacggctgttgttgccgggaacatataggtcccggcaaacctgcagcgatatgtgcattgcaagccagggatccccctggcttttttatgccgaaacggaactcgacacgggcgcgcaggtcgttgggtttgtctagagcctgcatatagttacttatggtaatgactattggtaactaattggaggttgggccagcgatgtgcgattcccgaaccgataccaagaccggcttgcttccggtgaatgaggtgcggagcctcctggatgtctgctggaaggccaagaccatcaccgaactgatgccggcattgccgaaaggtatgaaaccgcgctatgtccacgtgatcgacgccgtctggcatatcaacgaaccgaatgggcaagataccggcaccgcgcgcgtgggcgacgtcagcgcattcctcggcgtcactacgccgagcatcaccaagctcgtcggcgaaatggccgacctcggactcgtcgtcaaacacgccgatgccgccgatcggcgtgcagtgacgctcgcgctcaccgaacgcggcttggatatccgccgcatctatgtggaggaatatcacgcgcatttgagccaactgctgggcggattgacctcggaccagtgcgaaaccacggtacgcaccttgaccgaggctctgcgactcatgcaggaagacttccaacgtcgtagtcagaatatctgaatgaatggaggagagaacaagatcgtgactcattccgcaacacagctgcctaacggcggcaagcaaccggtctccaacaaactcgtcatcgcggtcgtctcgctcgcgatcctgaccttcctcggcatcctatcggaaacgtcactgaacatcgcctactccacgccgatggaggagttctccatcggcgcctcggtggtgcagtggcttgtcaccggttatctgctcttgctgtcggtgtcgattccgagctcgccgttcatggtgcgcaaattcgccaccaaaacactgttcatcatggccatcgtgattttcaccgccggcacattactgggcgcgctcgcggtcaacttcccgatgctgctcgccgcccgactggtcatgtcgctcggcaccggcatctccctgccgcttatcaccaacatccactggcacgaagaagcgtgattccaacatgcaacgccctattatgacttcgcggtcgtttttgtgcacgccgtctgaagcggctgggcccggcgacgaggcaactattcaggacctcgtggatacgttggaggccaaccgttcacggtgcgtgggcatggccgccaacatgatcggcgtgagcaagcgcatcatcgtcttcgtggacgaagatctcggtggccgtatcacggtgatgctcaaccccgtgatcaccgcttcggatggtgccttcgacacccaggaaggctgtttgtcgctgaccggtgaacgccgcacactgcgctgctgccgtatcgaggtcaactacgaggaccgtcggttccgcgcccgccacgccaccttcaccggctggaccgcgcagatcatccaacacgaagtcgatcactgcaacggcatcatcatctgattcattcggtgctcgttgcagccacccccccccgaggctggtcatcgcgattacgatgcaattacatcgcaaccgctatgaccagttttttttttatgtgcactggtggggtgggtgttctcagcggtgttggggtgccatgcgctggccggttggcttcgctgaggggtgtgggtggtgtcatgttgccagcggttggctggttggcttcgctggaggttctctcagcgtcggtgatgtgccaaagagtggcgggctggcttcgctaaggagcgttaccgtcggtggagaaccagtgcgtgacctgctgccgacgctaagcgttcattaagcgtcgttagcggccaaaacttggacgtgtaacgatgctgggcggttttagcgtcgttgctgtgccaagttgtggtcctctgccgacgctgccagtgcagtagcgtcggcgttgggacaggtgttgggcctttgccgactctataagcgagggaaaatcattcgccggtgcctaaatgggtctattgccatgctgaatacatctgctgagtgtagctatgcgttcgaaggcgatttcgggacctttctcagtagcaaatatgcctaatgcgcggagttatacacttcaccgtgcacttatacacgccaaacgaagcagaaatcgactgctgacagtggacgacacgccagagacgatgtggataacccagagacggtggataacagctgcgcgatcagtggataacctgcaagaaagtgcggttatccaccgacggtagccactgttatgcacattccataccccttggaatcattgggttttccacttatccaccatctcgccatgcgggcttgcgggccgccgcacgaacgtcatacagtgtgcctcacggcgggcaacgtagcccgccgtccacatcacatgaaggggaaacaccatgagcaccgcaaccactactactgccgaaaatgccggtttgccagcaatgctggacaccaaagacgtagccgagatgttcaaacgctgcaatctcgccgtctatgccgaagcgagacgcatatattatcgcgaagtgaatctgaacccatgcaaaaagtatccgaagcaggtgctgcaaaggatcgaatggtggttctgggattggtttgcctatgactgcgccgtcagcggtattggactgaccggcaatgaatccgaagatttatgtatcgaattgcagtacggtccgggcgcaggtatctcgccattcctagccttggccgaattcatgtatgacaaggacgaacgtatcggcacacgcgagatacgtgattttcgcgaacttgatgacaccaatttcgcttcggtgttctggattcgcgatgccagcgcggtcaaaggtcgtctgacagttgaggacatcattcatggtggtgtctacgaggtggcggacgcacatgccgcctcgcaatacgatggtgcgcacggcggcatgatcgtcaatcgcatcgcacatgtgagaggcgtgtggcgatcctgttccatcccgatctatgaggcacgaaggcctgatgacccgcaaatcggtgattcgctggcccgttcattccgggaaaccggatataaaccggactttgccggtctggtgcggtttttctacgggagggccaaagacaccggtctcgactgggaagatgtggaagccgcgcgccaagccggtactttgggcgcgctgatcaagaaggccagcaatcggtgaaggatccgcctaacgctgctgtccaagtcggcggccacggtcacgaacgaagagggacgcaaccaaacagaccgcgcacacaatggcgaccgtgcggaacgaagcccgcacgccaatggccgatgccgccgcttccggcactccggtgcgcatggccgccgcggtgtgcgtgttcatgatggtgaccagcagcacagccgcagacgtcatgatcgcgaagcccagcaaggcgagcggccggccaccgatacggtcatacatcttgcctgccaccgggttcaggatgcccatggcgatgccgctcggcatcatcaccagaccggacaccagtgcattaacgccaagatcattctgcaaatatgcccatcgcgtacaggaacagctggcgggtggtgaaggtctcgatgaggaacgcggtgatcgggatcatgatgccgttggtaagcatgaatccggtggtcagccattgcacggtgctgctgggcacgtcgaactcgtgcatcaacgtgggcagggcggagatcatcagcgtttggttgaggatggccacaaacgagccgatcatcagggtgatgaccatggcggtggtgttggcggggggtggtgctgttggagttggcggggtggtggagccggcctcagcggtggccggcgaggaattgcgtgacgtcaattatcaagtctcgttttcttggctgagttgtctttcttggcttgcccatactatctgtgccttgactgcattcgaaaaccattgcaatgactagcaacacgctgagacgcggcgtattaattcaatcatttgacaaacttagttcgttcgttttattattggtcctgcaatccgtaatatcgcctactgcaaaggagcgcccaaatgggtctgtgggatgttgacaagatcgagtacgtcggccgcgccaaaggaccgaaggaagacttcgccttccattactacgatgccgacaaggtcgttgccggcaagaagatgaaggattggctgcgcttcggcgttgcttggtggcacaccttcaaccaggaactggttgatccgttcggcaccggcaccgcgcaccgcccgtactacaagtacaccgatccgatggaccaggctctggccaaggtcgactacgccttcgagctgttccagaagctgggcgtcgagtacttctgcttccacgatcgtgacatcgcccccgaaggcgacaccctgcgcgagaccaacgccaacctcgacaaggtcgttgacaagatcgacgagaatatgaagtccaccggtgtcaagctgctgtggaacacctcctccctgttcaccaacccgcgcttcgtgtccggcgccgccacttctccgttcgccgacatctacgcctacgccggtggccagctcaagaagagcttggagatcggcaagcgcctgggcgccgagaactacgtgttctggggtggccgcgaaggctacgagaacctgtggaacaccgagatgaagcgcgagaccgaccacatcgccaagttcttccacatgtgcgcagattacgccaaggaaatcggctttgaggcccagttcctgatcgagccgaagccgaaggagccgacgctgcaccagtacgacttcgatgccgccaccgccatcgagttcctgcgcaaccacgacctgaccgacgtcttcaagctgaacttggaaggcaaccacgccaacctggccggccacacctaccagcacgagatccgcgtggcccgcgagtccggcttcctcggttccctcgacgccaaccagggcgacaagctcatcggctgggatatggacgagttcccgaccgatctgtacgagaccgtcgccgtcatgtgggaagtcctgcaggccggctccatcggacctcacggtggtctgaacttcgacgccaagccgcgccgtacctccttctacgaggaggacctgttccgctcccacatcgccggcatggatgcctacgccgccggcctgctggttgccgacaagatgaatcaggacggcttcatccagaatcttcaggccgagcgctacagctcctacgactccggcatcggcaaggacatcgacgagggcaacgtcaccttggccgacctcgaagcctacagcctcgacaagccgcagtccgagctcatcgccgccaccaagtccgatcacctcgagtccgtcaaggccaccatcaacaactacatcattgatgccctggctgaggtcgagtgaccatcggtctgaccgattgaattcgctccatcgggcgtgtacacatcaattatgatgccagtgcgcccgatgggctgattcgatagtttcgccatgtgcggtgttgtgttatgcccgcatggcacctttccattccttctttctcctttctctccttccgctggcatggagttcgagatggacgccatcgcggcctgcttcatcggcggcacggccgtcaccggcggcatcggcaccatccccggcgccatggtcggcgccctgatcatgggcgtgctcaaccagggcctgtccatcatgggcgtggacgccgcctgggtcaagaccatcaagggcctcgtcgtcatcgccgccgtcgcctacgacctactctccaagaaaaagaaaggctgagccaaacctggcctccgggcccgcccggtggccacggggatggacctgagttccattcctcctccgaaagggacgctgttgcacgcagcgtcccttttccgtttgtcgcgatggatggatcccggtgtacgttcttcgcgaaatcagccctgacttggggtgtatttcgacaatatgattcggcgatgtgcctcagcggatatgtacggccaatgaaaaacgggataccgatgtcgatatcccgctttcagcgaataggtaaggccagagcttacttcttcttggctttcttgacgcgcttgggggcgggagccgctttcttgggctcgaagaacggccacttgtgcaaagcccaggcgtgcagcgcgggaatcttggcaacggcgaagccgatgaccagaccgattaccatggcccaggtctccagatcatggcctgcgaccagc

SEQ ID NO: 1651 - DNA, 4295 bp, Unknown
  R221_24m  MAG No. k141_115987
ccgccaacaccagcgatgccgccaacaccaccgacatcaccgccgccgacatcaccagcaccgccgcggaacccgggttcacgccgaacgtcacgttcacgcggctgggcgagcaccggttgtacacggcgatcatcgcgccgagcccgtccagcccgtacgcccatgccgacaaactgccggtgctgatgaagccgtacggcgggcccggcttccagcaggtcgtcgcctcccagtccttctactgggagggccagtggtgggccgaccagggcttcctggtggtcacggcggacggccgtggcaccacaggccgcggcccggcctgggatcgcgcaatcttcgagaacatgaagggcgtgacgctggccgatcagatcgaagccatcaacgcccttcccgaggccgtctccaggctcaacgccgatgggcgcaggcccggcgttcccgcaccggacctcgacaaggtgtgtatgatcggctggtcgtacggcggcttcctgtccgcactggccgtgctggacgcgccgaacgtgttcaaggccgcgtgcgccggcgccccgcccaccgactggacgctgtacgacacgcattacaccgagcgctatctgggcctcgacccggatgtctactaccgcaacggcatcgtgcaggacgcaccgaaactcgagcgcccgcttatgctgatccacggtttcgccgacgacaacgtcaccatcgcccatagcctgcgcctctcgcaagccctgatggcggcgggtcgcccgcacaccttcctgccgttgacgggcatcacccatatgaccaacgacgagaccgtagccgaaaacctgctcaccctccagcgcgacttcctgcgcgacgccctggcctgaccggccccgggcgtgccgtgggccgtgacgtccgcggcacgcccggggcccgcgcccacacggcatgcggaaaaacggcgcaggtggtgcgccgcacccatttccgccctgaatttttggatatttttggatattttgcacccatcgtcatgtgaaagaccggttttttgcctcatattcccatcaccgcgtaggatgggtgaggattagaaagggaggactatgagcgttctcgaccgttttgaaaaaagcgtggagggtgcagtcaacggagtattcgccaagtttggctccaaagacctgcagcctgtcgatctttccagcgccttggagcgcgagattgacgccgaggccatgcccgtgggccgtgaccgcacggtggccccgaatgaataccgtttcaagctcagtactcctgacttcgaccgtatcgaggcatggggtagcgagaccctggccaacgaactggccgataacctcaccgagtacgcgaagagccagcattacgccttcgtgggcccggtgatcgtgatcttcgaggaagaccttgacctgtccaagggcaacttcaacctcacctccgaatccgtgcagggcaatgccgtgccggtcaccaccgatgcgcagaccgaggacagcccggtgctcgaggtgaacggcaaccagtacctgctcaccaaagacaagacggtaatcggccgcggttccggctgcgatatcgtcatcgacgatccgggcatctcccgcaagcacctggaaatcgacatcacggataacggcgtgatcgcccgcgacctgggttcgaccaacggcacgtacgtggagggccaccaagtgcccgccgccacgctgctcgatggcaacaccatcaccatcggccgcacccgcatcctgtactgggcctccgcccaagcccaggagtagtcgagcacacgcccgaaagtcgtccacttatgaccgaactgacattcgccctgctcaagtatggattcctgatcctgctgtggatattcatctggctggccgtgcgttcgctgcgcaaggacatcgagacgttcagtccgcgaccttcacgcgcgcgtcgccgtcgtgagcgtgaagtgcataaggccaaggccgaaacgccacaggcagctgcgccgcgcccgcatcgccggcccagcgcttccgcgtcgtccgtcgcctcggcgcagcctaccctgttggtcatcatcgatggtccgcttgccggcagctccgtgccgctggccgaagccgacatcgcgcttggccgcgccgcctcgaacaccgtggtgctcgatgacgaattcgtgtcttcccaccatgcccgtgtctaccgtgacacgcgctccgggcagtgggccattgaagacctgaactccaccaatggcaccgtggtcaaccagcagcgcatcaaccgccccaccatcctgcccgctcgtattcctgtgcgcatcggcgccaccaccttcgaactgaggtagccgcatgccaaaatccgccgcttcacaaccgctgttcctgtattccaccacggtgtccgatgtgggcactgtgcgcgcgaacaatcaggattcctccttcgccggcgagcatctcatcgccatgtgcgacggcatgggcggtcacgccggcggcgatacggcatcctccatcgccatccggtcactggcccacatcgagcaggacgacaccggtggcaacgtcgagacgatctcccgcatgatggaaacctccgttatggccgcgcatgacgccatcgtcggcaaggccaagcgcgaacgcaagcttgccggcatgggcaccaccgttaccgcagtggcattggtggccggctactgggtcatcgcccatatcggcgattcgcgcgcctacctgctgcgcgacggacacctgagccgcatcacgtgcgaccacagctacgtgcaacacctcatcaacaccggtcgtatcaccccgtccgaagccaagaaccacccgcagcgcaacgtcgtgatgcgcgtgcttggcgactttgacattgacccgcgcccggatatttcgattcgccgagcccaccccgccgaccgttggctgctgtgctcggacggcctgtgcggtgtgctggaagattccaccatcgaagagacgatgaccacgctgtccgatcagggcgaatgcgcgcagcgtctggtgcagatggcactgcgggcaggcagcaccgataatgtcacggccgttattgcggatgccacgttggcgttggatgccgatgcgttcgatctgccgcaccaaacgccgttggtcggcggtgccgccagccgtaatcttgagccgatcgccgacatcgtcaacgagccggtggctaccgcgcccgcgctgcgtgaggatgattcccccgcccagcgcgccgcagcattgattcagcccgccagcgcgcacgagacggaggccgcgcaaaccacggccgaaccgtcgtccacacgcgtggtgcagccgtccaccgtccgcgaggagaccggtgaacgagccaatcccgataccggtgagattccggtggtgcaaaagccggatgggcgcctgtccgccgaccccaacgacccggatgtggccaaagccatccgcgatgagcagatcgagcagaagaaggccacgcgcaccaagaagcgccgcaataagcttgcggtgattattacctgcattcttgccgtgctggccttggccggcgctggctggggcgtgtacacgtggagccagacgcactactacgtgggagatagcaacggcaccgtggccatttatcgtggcgtgccgaccaatctctttggacttgagctttcgcacgaagtgcagaccaccaatatcgccaccgcggacctgcctcagacatggcgtgaccagctgagccaaggcatcacagtcggttcgttggacgaagcgcagtcgcatgtgggtatcatccgcaccgaaatgcgcaaactggccaagcagcaggaagccgacgccgccaagaaggccgaggcgtccaattccctggacagttccaaagacagttcccagagcgattccaaggacagcaccaaggattcgtccagccagtccggttcgtcaagctcatctgattcctcggataaatccggtatcggagcggccgacaacgcggccacgggggattctcaatgatcgctacccgtctacgtcagatttccttgttgctgattgccatggcgatcagcgcgttggcgttcatccagatgttccaacgcaccgccggcgaattccctatgcaatacgccggcatgctggcattggtcgtagtgctgtttctggtgctgtgggggctgattgtgcgcttccagccgtacgccagccagtcgattctgccttgcgtgctactgctgaccgccaccggcgtgaccatgatcgcccgcatcgaccaga

SEQ ID NO: 1652 - DNA, 3073 bp, Unknown
  R221_24m  MAG No. k141_116500
aacagatccttgatgatggcgtgctgggcgacggttttgttctccccgcgcacaacagcggtcacgtcaagtccgcgatcaacggcctccctgacaatgagctggccggacttgccgttggctgcgataactgcgatgttctgggtcatgatgggctcctatgtggtaatccattgcgcttgttacacgctgtgcctaattgatttcaacggcggaacctggtgcttccgccgttgaaacagtacgatattgaagtacttactttttgggaagaaggcactttaaagtgctatagtcacctaaaaggaactattgcatgattccaacgattacacgaggtgatgctatgatcgatgtcgacacgctcccggcgtgtcccgtggagacgacgctcacactgatttccgacaaatggaaaatcctcatcgtgcgcgacctgctgaccggcaccaagcgcttcagcgaactgcgtcgctcaatcgggcacatctcgcagaaggtgctcacctcgaacctgcgacagatggaagccgacggacttgtgcatcgcgaggtttaccccgaagtgccgccgcgcgtcgaatactctctgaccgacaccggccatagcctcaaaaccgtcatcgacgctctatggaactggggcgaagactacaaggccaagctcgccgcttgacacgccgcctgatacgccgctcaatgcggttaagcgcaatcgagaaccccgcataagagtgggacgcagatacaaatcatgccaattcgcagttgcgtcccactactgagaccgcaatgacgcttgaatgcgtcaccggattgacaacaaacctcgccatcgctatccgatccagttctcgacggcctgcgcagtggcgtcagcgtcgttctgcgcgactttggctgtactaccgacttcgatctcaccgactgagtaattctctccagtacgagagaagtacaccactaccgcgttattgctgagcattatcgttgttctttcgctgaaatcattggataacagcgggcgaaagtcacgctgtgattcttcacccgctatcgcgcccgcatctgttgcctcaacagtaaagtcagcgaaacagtattacaaatgcaaaagtagaatcgaggcatgatggcccagacattgaccggacgcgcggcgtggctcgaagatgttgccgccttggcgggagtctctttggccactgcgtccaaggcactgcacaacaagccccgcattagcgaagaaaccaagcagcacgttctggacggcgtgcggcacgatacttggtcgatgccatcgacggcaacccgcatcacggtgtcaactacgtaccctgccgccttatccagcgcgaatccaccctcccgctggactgatatcaatcgataccctaccgcttcttggttttgcggccctttaagtagatgtcgatgacgatccatacgccaagggcgaaggccacgacgtagcccatgaagccgatgaccggaatgccgaagataatcggcttcatgccggcgtagtagacaatcgacgagccaacgaacaaaccgaccacaatcagggccatcgtcagacgattcaccatatccgaaagcagctggaacggctcttcggagccgaccagttccatgttgacgcgcaactgaccacgggtcagcatacgggccacggtcttgagttcggtcatggtgccgagcgtggcatgcaaagcctgatgcccctcaacgcccagcgacttgatctcgtctttggtggcgttcttcagcgatttcgacgtggcgatatggtcggagatgatttcgatcatattcacatcaggaatgaactcgtccagcaagccttcgagcgtaaccaacgcgcggccgacggtggtcaccgtactgggcacctcgatgttgtggcggccggccatctgcgtcagtgcggtcaggaaggcggcgatgtccagttcggccagatccacggtgccgaattccttgacgatcacgtccagatcggccaatagcgcgggatagtcctccggatcggcctcggtgccggcaaatcgcagcagcccctcggccagagcgggcgaatcctgtttggcgacggcgaaaatcatttctttgaggactgcacgggtgcgctggtcgagccgtccggtcataccgaggtcgataagtatgatctggccgccccggatgaggatattgccgggatgtgggtcggcgtggaagaagccatcgtcgagaatctgtgtggcgtaattgtcgacgagcttggtgccgatctccttcaagtcataaccggcgtcgatgagctggcccgggtgggagacggagatgccgtcgatgtactccatgaccaccacatgctcggtgcacagttcggcgtacaccgtcgggcagtccatgtatttgaatcgggcggcgaaacgcttgaattcggcgagattgcgggcctcgatcagaaagtcagtctccgattcgaaggtgtcccacagctcctcgaccacgcccttcaggtccacgatctgtgaggtgcgaatcaccttagtggcggccttggctatggagcgcatgatggagacgtcctgggccatgatttcgcgcacacccgggcgctgcactttaatggccacatcttcgccggttttcagcgtggcgcgatgcacttgcgccagtgaagcagagcccaacggcttggggtcgatatgcgcgaacacctcgtcggcgggacgcccgtattcggcggcaagcacatccaacaccgtggaatacggcatcgggtcggcgtcggcgcgcagtttggcgagttcgtcgcagaagctttgcggcagaatctcggagcgcatcgacagaatctggcccactttgacgaacgtggggccgagcgcctcgaacatgaggcgcatcttgaccggagtcaggccgtgcagcacgtcgaattgctcgacgattctggtgatctgccccagtcgtttgatcttgccacggcgcgtcagatggtagcgcgtggcgaaatcgttcctgcgtccgaacagtgccagcgtttcgtcggatacgctcggagtcgccttggtaacgg

SEQ ID NO: 1653 - DNA, 15524 bp, Unknown
  R221_24m  MAG No. k141_117028
atgctccttgcggtcgtcctcggccgctttgttgtatgcgttgatattgagcagactgtatctcatgccgcagtagacaaacccgaaaacaccgggcgcacagagcagcagaaaaattgcgttgggccagccatcggagacgccgagcatgtcatcggcatacaccgtcaccgcaatgccaatcagaatagccgagatgccaccgacgatgccgattaccagcagccgcaattctcggctgcggtcctccccggtgtagaaatcttctacgtatgggtgacgccgtttgaagtcaatacgcgacagacctcctggaatcagcatcgccagccccgcaatcacacccacgcagacgcacagaaacgtcagaaaatcgttgagcggcgtcgctccgagaatggaattgctggaatcgaacaggttgccgatgccaaccccggcgacaatcgcagcaacaccgccggcaatcagcagcgcgaatcggcggcgatgttcatcgtagccagtgatatcctgcgcaagctccgcgataggagcgattatgcccgccgttttggaagaagcggctaaaggcgatgccgtctcagccgaggagtcaacattcgacgaaccggccgcagaagccgacgcggcaggccgactcacatcgccaagtaccagatcatcaagcgtgcagccgaacaggtcgcagatcataagcagcttgtccatctcgggataggccttttcggattcccatttcgaaatggcctgacgcgagacgccaagcaacatggccaatcgttcctgggtcaggttgcgttgcgcacgtaggtactgcaggttagcgcgaaaactcattggaatgtcccttcatacgtaatctttatcatgtcatgttcggccgatgggctcactatggcatgccgtccatgtcacccgccaccatctttgggttgcaatcgccggttattcgagcgcaaccacaagttgcatcggcggaattccgccattccgttgacctgagcagctttaacatcgctccacgagaccgaagcttttccagccatgcgagggcagcttgtctcacctgccaccacgaatccgcttcgacccacgtacacatctgtgtacagcagcgctcgcaatcggttacctacgacccatatgatttgctgagcgaccgcaaaacacgcaatagccgagacaacaccgtcagcgttaaagcttaaggcgactacttgcccaatagtccggaaatctggctgatgatgtcagcgggcagtcctgcttgttcggcaatggatccgaggtccagattggcaccctgctcctgaattgcgccagcgacctgactgatctggtcggcggagatgttttcctccgccagcgcctgcagctcgtcaagtcggtcggcgttcaaatggtcgccaacgacctgttgatttcacccaactgatcggcattgaaatgctcaccgattaccgccggcaaatcaccaatcgaaccgagattgaaatccccgccaagcacattgcctagattgtctgcggcaaaatttttcaggctatcgaacagtcccacatgtgccgctggtactgcttgttcagcaactgctgcagagcatcgcacagaccctgcatcaatcgccgctcttcggcagacaagtcccgcgtgaaaccaatctctgcctttgcgctcatcagctggggagctcacggtcacactcatgcgtcgcagaccacgagcctcacgcgcctcctcattccacatctgtgttaacaacatgtgttaatcgcatgcatcgccaccatgattccccaatgatttcaagggttccccggtctcactattgtttcttccctaaaacggcctcaatcatcggcaccttcctggtagccaccaccacgtccctgaccggcaacgcctcgttcggcgtgctctccatcgccgtcctgctcgttgtggcgctcgttttcctgctgctccagaaggatccgacgcgcgcaaacgtgctgagacatcgccggtgaaccaagttctgcctttttaccgacgccagctcgcataagcaggaatcaaacgtcggcgctgggacacagaacgggaatccgccgacgttcagagtatctgatgtcggtgccgggccatgtcttggacgccaccgacacaagtaccactcttggcgacggtggtggggcatccgctgtcccaccaccgtcgccaatcgttctcagcggcgttgacaatccattatctgtcctttcaacgccgccaaacgtccacagcgtcggcgacggtccggattttgacgcaccaccgatgcaaaaccattgcaggctccgtacggaacatcagccgcgaccaccgaacgagcaccagatgcggcatcagccgcgacaccagccgcacttatcgacgcgcccttaccgcgtcatcacgtccatcaatacaatgactcatcggcatatccggctgcagcccaataatcgtcggccgatagcgagcgattgaaaccggtggcatgatcgcttccgaggtcgccctcgccaccgaaatcgacatcgaaatcagtaccagcatcggaagtaccgccggacataccggcaacggacctgacttcggttttcagcaggtatttctccgcgaaattcagcgtggtgcacaccatcgcaaacccctttccatgcgcgttgccctggcggaccaagacgtccttgtgtaagtaagtatggcggctccccttccacaccgccatatccactatggaagcgcgccgcggcacacgacacaagccccgggacatatgaagaagttatggccggttcaaagcacccgtattacagcccaaacggcaccgcgcgcagcgggattgcacgacggccggacgccactcatgatcggaaaccgctcacagccaaatgccacccgaggccggatgccatataaggaaccgtggcacggcagatatagaaaatgcccgccatcatagactgacgagcgtgatatcgggtgggcgatgtaggaatcgaacctacgaccccttcggtgtgaacgaagtgcgctagccgctgcgccaatcgcccgagcttgtgatgaaaaaaccggcaacattctgccggcaattcatcgagtgggcgatacaagattcgaacttgtgaccccttccgtgtcagggaagtgcgctaccactgcgccaaccgcccgggtcatcctcaggctgaatcaatcatcctgaaccagccatccgagagcggacaacgggactcgaacccgcggtctcaaccttggcaaggttgcgctttaccaactaagctatgtccgcatgtgttaccttcacgggcaacaggtgacaaagatacgccaatctcaggaaaaagccaagcccccgcgtgtcccaccggttttccaacgattatcgggtgccgccgtgcacataactcgcggtggccgtatacagcagccaggcgatgggcatggccagcataaacagcgggtagaaccaagcgatgggcacattgcacggccatggccgtggaaatcaggaacgcatgacgataaccgatcagctggccgaagaggccaaggccttgatcggcgaccgtgccgaagtgaagttcctgaactacgccgacgtgccgttcttcaaccaggacgaggaattcccgaacccgacagccgccgtggccgccgccttcctggcgctcgttgcggagtaatcccgcctgaatcttggttacgttccgcctcaaggcggacggcggaccagctgcatcagcaatgtgccgaacccctctgattgactccaatcagaggggtcgctgcgtttcaaggggctgatttggccttctccggaggtctactcccgtttcaaggggctggtggctgagtagacacgggccaaaaacggcgtaatgacgttagcccggagccgtttatacttgtggtttcccggatgaggagcccctcgaaacggagatagacctccggaacagcccaaatcagcccctcgaaacggagttagacggttgggatgtcggaaagaacactcatgccggcccaagaacccccactatgtcagatatcgctgcccagcacgcaatactgaccgtacagcacgacccgtccttcatgaaatcaggcacggtatgggcttcatccctcaacgcgcgataatggcggtatgacgcaacgacaactgatgcgggccacagtcgaaacgcccatcggccggatgatgatggcctcggacggcgagggcctgaccgagctctgtcttgaagactggtggtgggccaccgatcaccaagccgttctcgattcgaatcgcgaatccgatcgtgaacccgatgtgttccgtatgacccgcgtatggctgaccgcctatttcgccggcgagcgccccggcctagatcagacgccgccgttgcatcccgccggcacgccattccaacatgaagtgtggaatctggtggccgaaattccctatggcatgacggtaagttacggcgaactcgccgccgaattggccgaacgacgcggtggcggccgcatggccgcgcaggcggtcggaggcgcagtgaagcgcaatccggttaccatcatcgtgccctgtcaccgcgtagtcggctcgggccgcgcgtttggcggctacggcggccgactcgacatcaaggccgagttgcttgaactcgagggcgtggatctggcgcgcttcgatctgccgaacctttgacggccccagcggtccgcctcgtcaaaaggattgagtggttacccctcccgccggcgggaagtggcacgtaacgccggagggtggtcggctggctggcatcgcaacccccgctacccgacaattttcgacaagctgacgggaatcctcccacgaattgttcgccgtcggtgcagtcttgctcgatcgcgccggccaaaaccgtacaatccctacaatggaatgtatatggttaattgctgcgcgcagccgcacggccgcacgcgatcgcaagaccacatggcccaaggggatatgcaatatcaacggaagcaggaggtgcgtatgaccggcattatcgattacgcgcacaccgaaacgcgctccttcgccgacttgccgttcaatgaaatcgacgccttgatcatctccacgctcatctatgaggatgtggccagtatctgtccgacgttgatgctggatgagacgcagtcaggctcgttcgccgcacgcattcgcgctttcgagcccaagcatccactgatctggctgaagggtatctggcatcccgagcttgaatcggtgagccttgacgaggccaaccgcgagctgcatcgttcgccggaaacgcatgccgacgacaagacgcacgaagcccaaatggtttcagtggtcaatccggacctgacccacgacctgttccaggccgcgggcgagaacccccgctacgccaacgttcgtctgggcgcggtggtcgagcacatcaatcagggtgagcaaacccaattcgccgccgccaccttccaactgcccgacggccacaagcgccgaaagccgacctacaaaggcacgttggttatttccttccgcggcaccgatgattcgctcatcggatggaaggaagatttcaatatggctttccagtatccggtgccggcgcaacgttcagccagcgcctatctggatacggtggcgcgactgtgggagggtccgattattctggtcggccattccaagggaggcaatctggcgatttacgcggccatgaacgccgaccccaaggtgcgcaagcgcattcagcatgtctattcactggacggccccggtttcccgccggagattgtgaccagccccgcctaccgcaccatccagccgaaggtgacgaaaatcgtgccaagttcgtcgattgtgggcatgattttcgagaccccggagccttgccgcgtggtctcttccgattcggatggcattatgcagcattccgccttcacctggctattggatggcgaccagttcatcaccgagccggatttgagttccagctcgcagttgtttaacgaggagctgaaccattggatcgccacgcttacgcccgaacagcgcgagcgtgcggtggacgcgctgttcaccgtgctgcacgccaacggcgccaccagcttcagcgaggtgatgagcaacttccccgcttcgattccggcgatgcttggcgcgtatgtagggctgacccccgcagaccggcgtcatttggttgaggccctggcgatactgttcaaggcgtccacggccaaacgcaggccgacgcccgccccggcttccgcgccgagttctgcgaccgccaaaggaacagccgaaaccccagcaggaactgcgacaggaacagatagcgcggccccggccagcgccgataccgacaccgacactgacaccgcagcttcgccctcagcggaggacgcaactgaaatcgccgattagctcatagacatgtccacaaataatagttatactgcccgataagttattagacagcgtgaccatatcacgctggtgcatcaggaggaagagatgccacgtccacgccatgattccgaggtgctgcccgccaaagaacgcctagagaacgctttctgggaattgctcgccgaccgcgactaccgcaagatcaccgtcaccgatgtggtgcgtgaggctggcgtgaaccgtaattcgttctattatcacttttccagcctgcctgaattggccgattcagccatcctacatcaggtcgaatcgattccgatcaaccgcacccccgacccaaatggcaatcccgaggaacaatggcgagaccgcgtcaccgccacgctctccgacccggagcagcggcagcgcctcgaccgcctggccctgttggccggcccgcacagcacgcttgaactgaccgaatcgctgcgcgacttctgccgtctgcaaatgctcagcacattgcaacgcgaccccaagaaccttgacctgaaaaccgatctcatggtcgagttcaccgtgggcggcatgctcgccgtgctgcaacgttggcccgaattgagcgacgccatcgaaatcaaagacctgcttaaagaagatgtggccgtgctggccatgggcatatacctggccatgagccaaaaggacatgcttaattactggaatcgcatcttcgtgcacaatgcgcaggattcggccgcccccggcatgccggccgccgccacgcatgccgcgccatcccccatctcaccgtcgaacggccccgcaggattccccgggtacaccgcttgaccgaaaaccagtgagtctggattgtttccgtcgaatgaaccctgcgtgaggtttctcacaaggcgcaatcagcctctcatgctggcgtttccagccctcacacaggaagatggaagcatgagcgaaacatcgaacaaaacccgtctggaacatgactgcatcggccagatggaggtgccggcgaacgtctactggggcattcacacccaacgcgctatcggcaacttcccggtctccggcatcaccgatagccaacatcccgagctgattcgcgcctatgccacggtcaagcgcgcctgcgccatcgccaatgaggaattaggcctgatcgacccggccaaggccgaggccattcgcgccgcctgcctggaaatcgaggccggcaaactggccgatcagttcccggtcgatgtgatgcagggcggtgccggcacctcgtcgaacatgaacatgaacgaggtgatcgccaaccgtgcgctggaaatcgccggccaccagcgtggcgattacacatacatccatccgaacgacgacgtcaacgagtcgcagtccacgaacgacacctaccctgccgcctgcaaactcgcgcttatcgacgcgatcgggccgctcgccgagtccaccaagaaactcgccaaggccttccacgatctggccgacaaacatatcaatgacgtgacgattggccgcacgcagctgcaggacgccgtaccaatgacctatggtcaggaattccatgcgtttgccacgctgttgaagtctgatttggctgcattcgatcgcgtggtgccgctgctggcccagctcaacctcggtgccaccgccatcggtaccggcatctgcgcggatctgcgattccgcaagtccgccatcaagcatctggcgcagatcaccggcttgccggtcaccgccgcgcccgatccggtggccgccatgacggatatgggcgcgtacgtggccacgtcggccgccatcaagagccttgccgtgcacctgaagaaggccgccgacgatttgcgactgctcaattccgggccgcgctgcggtttcaacgatctcaacgtgccggctcgccaggccggatcatcgatcatgccggccaaagtgaacccggtgatccccgaatgcgtcaaccagtgctgcttcacgatcttcggcatggacgtgactgtgaactgggctgtggccgagggccagttgcagctgaacgccttcgacccggtgatggtgcatgagctgctgaccggcatggcgttgctgacgcgcgccatggagacattccgcgtcaactgcgtggaaggcatcgaaatcaatgctgacctggggcgttcatatgcccagtcctcaccgtcgatttccgccgcgctcaaccattacatcggctacgagcacgcggccgacatcgccgccgaagccgtgcacaccggccgtaccgtgcgcgaggtggccggcgaacgcaccgacctgcccgccgagcagctggacgagattctcgatccgattcgactggcccgtggcctcggccagacctgccgcgagcatcgggactaggcgtcacggcgacgtcatcaccccgacgatgctgcaccgcggtgccgcggtggtgccggtggtgccgacggcacgccaccggtatcgcaccatcggcaccaccgcaacggccaaaacccgacgtgggcccgcatgtttacgacttcaccagaaatggtcgatacagtagggcatatgaccgaatatgcacaagacatcgcacactggttccaggtcaatgcgggcaagctcatctggctggccattgtattggccatcgtatttgtggccgaccgcgtcatcagccgcgtgctgcgcagggttctggatagttcgcagattcccagcgcctcgattttcgtgaatctcacgcgcgtgaccatctgggtcaccggtacggcgatggtgctgcaaccggtgttcggcatcaatccgaccaccctggtcaccgccctcggtgtcggaggcgtggcgatttcactgggtttgaaggatacgatcgccaacgtcatcggcggcttcggcctgatgctgggccgcgtaatccaacccggcgatctggtgaccattcaaggcgtcacaggtaccgtgcacgacatcacctggcgtcagaccgtggtgcgcacccgttccggggacatgatggtcattcccaattcggtgctcaacacggccgccttgaccaagctcacgccggccagcgaaggcatggccacgctcgagttcacggccaaggcctctggcgacccgtccgctatcagtcaggatattctcgaccgcgtaaccaaagccaccgccgacgtggcactggagggccagccaccgctggtcaagttcaccggcttctccccttacggcatgaccggccaagtgcttgtgttcgcgcgcgagggtgtgctaccttccaccatcaaagatatggcggcgcgagccatcgccggttcgggcaccaaataccttgttgaagatagcggctcgtcagacaatctgtgatatctcccggctcacctctctgggtccggctatgacagtcatgcgaacagcatccaaccggtaagaatcacagtcaacagtaggtacgagataacgccgggattggcataggcggtgcgtattttaagccccgcaggcaactcctctggcgcaagatagaactcccagctcttgcgcttggtgataagcagcacgataccggcaatgcagaggcccaacatcactgtgccgtacaacatcatgatgcccatgccgcccatgttgccggtttcaaccatacgcatgatttcggcctcgctgattgtgccgtcgaggatgcggggatcgatctgttgtatcaccaatggggcgagcactgccccgttcaggttgatcagcatgtgcatagccactgaataccgcaggcgggaggtgcgtgtgtatacatatccgaacatcagtcctaggccaaaggcgtagaagaactggaacacgttcatatggaatagcgcgaacgccaatgcggagaacatgattgcggtcttttctccgtaccggcgcaggcgggagataatctccttgcgaaaaatccattcttcgcaaaccggtgccaacaggcctatgaacaatgcgttcacccgccagtcgctgccaagaatcacgtcgttgatgcgattggtggcctgaccatcagtggctccggcagacaatatattgccaatcatattgcccaagagcattaccggaatgcacatgacgaaaatccgaatgaactcccccgccttcatggggtactgccgggtgcgaataaccggtacgcgagtgaaggccaacatactcagcggcatggccaccacatacagcggcccggaggaggcgagcagcacagcccaagcgggcacatcggcgccaagcagcgttcgtagtgcttcagtggccagaatattcagcccgatccagaacaccatcataatggcgagcgccgagccgattgtcgaaaaccggcgatgggccgtgaaccaccaatcgcgtggggtttgttgcggctgctgcgccgacggcattggttcgctcatacttatcccccatagtcactggccgcaaacggaccgatcacacgtgcaatactcttcaagaatacggcacggcgtttcgattgcattgggaatggggaaaatcatcaatgggcaaggaatgatctacgtcaatcaatccccatgccgagagagtcctctactctgcgggattgttgtgggacggcacgcgattttgcccgattttttcgcggcggcccacaccactccacatatgactgatgacgccgcacgaagaaatggcgtcattgcaacgattcctcaatacaatctgtgggacggcacgaatgtacatcgtttgacgttcatgccatcccacaccggcgtgggacggcacgcgataatcgcccaaaaatcgccgccgtcccacacacatcattgccgataagccattcgacgatcgtacagtcacaaaaaacagaacagaaccgcacgatcatcgcaacgccattcagcaggcgagcgcggcgaccggacgcggggcgacaatcacgtcatcgcccaccgccagaccggccggcagctcgctggcgggcagctgcacggtggccttgagctgttcacctttgttccagcgctggtattcgccggaggtgatgaccgtgtccacacgaaccaaagagccaaggaagtgaatgacctccacgcgggcgcgttcgccgacgtgcgaatcgctgctgccagccaaggccagcatcaggttctccgggcgcacgagcacggccacggaatcgcccttggcggagccggcgagcagcggcacgcgctggccgaagaccacggcctcgtcgccattggatgcgccgagcaggcggttggtgagtccaatgaacgtggccacgtactcggcggcagggcgctggtacaggtcctgcggggcggcgatctgctcgatcttgcccttgttcatcacgccgatgcggtcggccacggccagcgcctcttcctgatcgtgggtcacgaagacggttgtggtgccggtggtgagttggatgcggcgaatctggtcacgcagctggacgcgcactttggcgtcgagcgcggacaacggctcgtcgagcagcagcacgcgcggcttgatggccagcgcccgggccaaggccacgcgccgctgctggccgccggacatctgctgcgtgtacttcttggcctgatcggcaagccccacgagctccagctgttccatggcgatcttgcggcgttcggccttgcccatgccgcgcacttcgaggccgaattccacgttctccagggcggtcatgtgcgggaacagcgagtacgcctggaacaccatggccatctcgcgcttgttcaccggcacaccggtgacgtcctgtccgccgaccatgatgcgtccgccttggatgtcttcgagaccggcaagcgatcgcagcgcggtggacttgccgcaaccggacccaccgagcagcacgaccatttcgccgggcttgatgtccaggttgaagtcgtcgagcgcgtgaacggtggagccgggatagatcttgacgacgttctgcatctgaatggaaccaccgccgcgcttggcggtgtctttgagcagggccttggcggccttggtcacgtccttgccgcgcacgccctcgagggtagcggtgggatcgttcttgaaggcgtcctcggcagtggaggacacggctgccgggatggccggggacgccggggcggcgtccactgcggtaccggtttcctgacgggtgggagttgaatcgttgttcatcgggtcacttaccttcccttgacttacgcattgcgtcggagatcaggtcgagcgcaacgaggagcaccacgccgaagagcagagccagcagcgacatggcggtggaaatttgggcattggattggccgagctggtagagcgcgacctgcaggttcatacggccgagcagcgaggcgacggtgtattcaccgagtaccacggcgatggagatgaaggatgccgagaggatcgactgccacaggttcgggatgatcaccttgaagaacactttgggccaggaggcgccgagcgatcgggaggcttcgaccaacgtcttgacgtcgatggagttgaggcccacggcgatcgcgcggaaggcgaacggcatcacgagaatcacataggcgaagcacagccagatcgggttggtgctcaacacgtcggcggaaagccaacggtagatcggcccaagacccaccaccagcacgatggccggaatggtcagcggcagcgtggccacccattcgattgcacgctccaaggctttggagcgaatatgcacgatgaccatggtgggcaccagcaggatgagcatgatcacgacggtgacggcgctcaacgacagcgagatgccgacgccctgccatagcacgctcagatcggcgcccaacgattcgccgttgccggtgaaaatcgccgtccacggcgcggccgaccagcgaccggacaacgggtgacgcagggtgaagatgaacatggccagcagcggcacgaacaggaacgccagggtgacgaacaggatcacgaatttgatgatgctctgtttgcgcacgcgggcggcacgcagctgcggcggcttggttgtggaagtttcggtcattgccaacgtccggccctcttttccacggcgtggctcagcagcatgacgatggccacgacgatgatcattgcgaatgccagcacctgcgcgaagccctgctggttggggtccatctcattgcgcatggcaccttggatcatcaacggcaccagaatcgagcgctgcgagaacagggctgcggcggtcgcataggcggagaacgcggaggcgaacaacagcaggaacgccgagatgaagcggggtgcgaggatcgggcaggccacgcgcgtccagtattggacggtgttgccgccgagcgactcgcaggcttcgcgccactgtggacgaatggaatcgaccgcaggcaggaagatgatgatcatcagcggaatctggaagtagcagtagacggtcaccagccccggcagggagctgagccaattcgggttcacggtatagccagtcagggttttgatgagcatggtgccgatgccgttgatgccaagagtggcgatgaacgcgaacgcgagcatcacgccgccgaactgggcgagcaccgatgagatggcggcgaccatacggcgcagcggtccgttcggcttggcgccgatcaccagcgcgtaggaggcgagcgcgcccaccacggcaccgatcagggatgaggccacggacaccaggattgacgtgccgaacgcggcgatggtgttggcttcgaacatcttgtggaagttcgcaagcgtgaaaccgccgctgcgatcctggaacgcgccgatgatcacgatcacggtgggtgcgagcaggaagcaggcggtgtaggcgaagaacgggagcgtggtggtgagcgtgccaagctcctgacggtgcttcgccagtgcggacgaagcgggggtcgatgcggcggacggacccgcggccttggaggcggcgggtccgttcggtgcgatgggtgcgattgcggcggtcatcgtggactctcagttgccgatcgtcttgtcccagttgttttgaagccactcggtgatgcgggtggagtcatcgttgctgtaggtgaccggctggccttcgatggtgatggcgtccttcagggtggcctggtcgacggtgccgtcggccttcatggagtcgagcagcaccgggttggcgccgcccttgaaccacaggttctgggtttcggcggtgtacaggtattcctcccacaggcgtgcggcggcggggtgcggcgcgtccttgttgatggcctggttgtagtagctgacgacctgggctttggggaaggtcttgtacttccagttcacgcccttggacttgagttccttcttgtaggaggcctggttgtaggtccagtcgaagaccacgccggtctggccggagtcgatggtgccgttggtcacatcgatggtgttcaggttgccggcttccttgagcttcttgaagaagtcgagaccgggctgcaggttgttgatgtcgccgccggcgagctggttgaccatcagatagccgttgaaggccgcgccggcctcggtaggcttgccgttcagggacacggtgccggcgaacttcggatcgagcaggtcgttcagggaggcgacatcgccgtacttgtcggcgttccagcccacggacatgatgccggtgtagtcggcgtagtaggcgccgtcgacgttcttggcagcatcagggatcttgttccaggcctgcaccttgtacgggtcgaaatagtcggtggaggtggcggcgatggcctggccgacgtcgaagacatcgggggcggcgtcggtacccttgttggtcttggcggcgtcgatctcctccttggaggaggcgttcgggttcagctcggtgatcttgatctccgggtacttcttcttgaagccctcgatgacctcgccgtagttggaccaatcatgcggcaaggcgatgacgttcagcgcgccttcttccttggcagccgattccgcaccacacttacctcagcacgccctcaatcaatcgcgtgatgagttcggtgtagctcactccggtggcatcccaagccttgggatacatagaaatcggcgtgaagccgggcatggtgttgatttcgttgac

SEQ ID NO: 1654 - DNA, 29178 bp, Unknown
  R221_24m  MAG No. k141_117104
gatgggtcgagcgcggcggccacggccagcgggtcgtgcagtccacatccgcgaatctccggctggttcttcaggtagaagtcgatgtagtagtcggtcatggtgacgaggaagtcgccggccggcgtccccagagacgcccattcatgggctttctcacgggtgagcgcggtctggtgggtcacgtcgaggccgatcatggtggtgcgtgcgccacacttgaacagatagtctgctgactctgggtcttgggagatgttcgcttcggcggccgggcttacattgccgggcagcgtcaacgcaccgcccatcaacgtcacgttcacgccggaatccttcaggtccggagcgttgcggaatacggtggccatggtggtcatcgcgcccgtaggtacgatggtcaggtccgggccgtattcgcgcgcggcggcgatgatgaaatcgaccgccgagcctggtgcttccggagcgcgcggggagtcggggatgattgcgccgccgatgccgttgggatggtggaccgccaccgagccgggagttggtgcccacgaagcgtccgtttgccagccgtccgcgccgccgttctgccagcgcgcgtaggcctgggtccgctcgtctggtgtggtgccacgcattttcggcaatgttgccggggcgatgggatggtcgactccgggatagaccggaacgtcgtcacggccgaacaagtgcaccaccgccagcgcgttgcgcgcggccagcggcaccgtgacattgccgtaggtggccgtgataccgatcagatcgatctcgtcggcactgcctagggcatatgcgatggcgagcgcgtcatcgatgccggtatcgaggtcgaggatgagttttttgcgcatggcggttccttcaagacgaatcaatcctcccgaatttgtgacgttaagccaacgtcagcggcacaaattcgggaggatggggaatgggcaatcagccgagcttggcgagttcttcgggggtgagttcgagctggtcggccttgagggagtcaaggatggtctcggggtggtgggcgccgggaatcacgaacatgtggtcgcccttggcgagctcccatgccagcacgacctgctggtagctcacgccgtgggccgccgcgacctcgcggaacgggtcgaacttggtctcatcataggggtgacggtagccgccgagcgggctccagcacacgaaggccagaccgaccttggcgcagtagtcgagcgtgtcctgggtctccaggtgaatcggcgagtactggttctgcacggccacgagcttgtcgcccagaatgccgcgcgcaatgtcgatttgctcgatggaggcgttggagataccggcctcctgcgccacgccctcgtccaccagctgcttgatggcttcgacggactcgttgtacggcaccttcgggtccgggcggtggaagtacagcaggtcaatggtgtccacgccgagcgccagtgcgctctccttgccgcgccgaatcaggttctccgggcgaccgtccacatcccacgtggggcggccgtcggtgaagttgcggaagtggcccaccttggtggccaccagcacctcgtccttcggccccttccaggtctcaagggcctcgcgcaccagcttttcaccggtctgctcctcgccgccggagcagtagtaggcccaagcggtgtcgatgtggcggcagccggcgtccagcgaggcatgcagggtttcgatgccgacctcatggccgcggttgttttcgatggtcagcggcatttcgccgtggccgatggcggtggtggagaacggtccgaggttacggaacaatgccatggtgattcccttcgtgaaacttatggaaactcgatatccacaatcaagcctaagcatcccgttggatttcacactctcggcctgcccgcacaatcaatctatgaaatttccgcaacttcacggaatagaaaacgcaacttactcatacccagttcagtgaaaacgaggggccggaaccccatggattccggctgttccgctgatagatcagtggcctcgtctgagactcattcccagcaataccagtgcggcaatgatgatggccgtcgaccgcccctgtccaacttgattggccagggcgatcaacaggccggtcatcagaccttcccggtattgccggtcttgtctcggacggttgtcatggttgttgcctaccatgagaacctcctcttgaattttgagacgtcattatgccggttgacacaacgacaccgcgccaaagtggcacgctagtagaccttggtttggtcagtccagtgtactggtgagcttcggtggaggctggtatgctgtgttgtagcagaaaggtcacgctaacttcgaggcaatcttctcggcggcgccacagactttcgccccgttggacctgactgttgaggtttcctcacctcgattttgagagaaaggcccgatgtcttatgacaccgggccttttactttcagagctatagggactttcagaagcacaccgcttaccgcccgccgaacgaaccgccgccggaaccgccgctgctaccgccaaagccgcctgagccaccggatggcgaggccgcattgattgtcgcggtgatatccgcaaatccgtacgacaattgcgtgccgaggtcagagaacccagccgcgaacgacgtgcccccgaacgctggcaccgctccggccaatccgctgtcagccacggaatccgcgaacgccgagccattgtagaaacgcaacccataccagtcgtacggacgataattccaatagaacaccgtgtcggaggcattggcatcaagccattccggatcggatacttgcggataggccatggccagctcccgcatcacccggtcggatatgccaaatgcggcagcgtagaccatataccaatcccacagcgtcgaatccgcgactccacggtacttgaagttcgagaagccttgcatatatcgtttgagacccaagcattgcccggccatctgctgaccatgatcggtcagcacgtaggaattccccatcaggaagcagaatatgccgaccgtcatcaggggaatgccgatgagggccccggccaccagatatccggccaaaccgttgatgaatatgctggcgccaccgatcagcacggtgattgccccgggaatgagccatccgttctcggttttcggcgcgatatccgccgccgcgaattcggtcttgcacgcattgatgaacttttcgagttccttgtagccgtctttccaatccttgcaggcgtctttgatgtcatccatgtcaaatgccgtacgacctacgcgctcggaaatcacggtgagcagatagagcaatgcccgctcagaagcactgagatcgggctggtgtgcatcggacacgctagatgcggcagatccagatccgccagatccagatccatcaaatacggattcgacgaatactgattcatcaaatccctcagatacgccgtaatcggactgccacagcatcacaatcgtgctattggtacgcgcattattgcgcttgtatggatcggacccgattcgctgactgagctccaccggagaaacttgtttcagatccacgccgatatacaggtccgccgaaccggggaacacagcaatgactttcttcacggccagagaaagcaaggtcgcgacgagttggcgctcggaaatgtcgggtttgtcgccggaagtcacgatatcgatgagtttggccgccgatgcggggctcagctcggggcgatcgcgccaatattcgatggagccacggtaacgtgaacgtccggaggagcgtaaggctgcaacaacaccaataatcccgaatatcaggccggccgatatggtggtcatccagttgttcaggcgccttgtggcgcgttggcgttccagattgcgccagaaccgttcgtcgtcggcttcgtcttccttcaactcctgcagatgatcgtcggtctcgacacgagccatatctcccgccttggccgcgtcgaaagcggccaccacgtctaggtactcgccgcttttcacatcatttacggtgaaggtgaagctgccatcctcggttcggccggtttccgaggtttgttcagtgtgcagccaagtccacgagttgctcgcggtcacacctttggggaaatgcaccgtgccggtgaccgtaccaatcggcacctgattgttctcaccgaatggctcccattggaaggtcgccacgtccttccacttggtggccacgtcatgcatggtgaagctcaccgtgaacttgatgctgttggtttttacggtggcgggaatattccagccgatctccacggtttggtcttgccatcgtcatccttgcgtttgcgcaacttgatatcgatatgctccgtgactttaagatcgccgtcggcggtggcggtcacatcgtaatcaagcgtgcggtagctcaggtcggcaccatctgtgccgagaatcaaggcaccggcacagagtgcggcaagaatcagcgcaccgacaaggcttaagcccagggcacgaacaatgcgtttcgacataggcatgcgctaccgcccgccgaacgagccgccacctgagccaccgaacgagccgccgaaaccggagccgccgcccgaaccgaagctggagaaatcgccaccggaatcggcggatggtgctgccgcgctgatggtcgagctgatgtccgccagaccggagttcagctgcgagccgaggtcggagaatccgccggcaaacgacgtgcctccgtaagccggagctgggccgccaacgcctaggtccatctgcccggcagcatcgtggtcgaatggaccattatgacggtggctgtaccagccatacgggcggtagttccagtagaacaacgagttggaggcgttggcatccagccaagccgggtcgttgacctgaggatatgctttggccagttcacgcatcacgcgatcggaaatgccaaacgcggcggcgtagaccatataccaatcccacaaggccaaatcggcggtaccccggtcggtgaagttggagaagtcttccatataacgcttaaggcccagagtccggccggcgatatcctgcccttgatcagtgagcacggtcatcgcgccggccatcgagcagaacagtccgaccaggaatatcggcagcccgataagaccagccaccgggtatccgataaagctgttgaccagcagcgaaccaaatcccagcacggcggccaatacgccgggtaggatccattgccagcccacagagcgcgtggcacccagccgctggtattccatgctgcatgcaccggtgaatttgccgagctcaatatagccgtcttgccagttctggcaggtcgccttcatctggttcaggtcgaataccgggctgcccacgcgctgagaaatgacgatgagcaggttcagcagcgcatcttccgattcgctcaatcccaactgttgcgcgttgggtgcctcatcaatggcgagcggcagaatcacgatggtgctggtgatgcctgccgcatactgcttgccttggtcggcggcaatcatttggctcaagcccaccggcgtggcctggctcatgtcgatgccgcgatacatgtccgacggccccggataaatggcgatggccttcttgacggcgagcgacagcatggtggcggtcagctggcggtcttcatcggattggcgcgtcgacggatcgaccacgcgaatcagacgggctgcggaagccggactgatgccgggctggtcgcgccagtattcgacgctgccactgtattgcgcacgccggttgctggagatcacagcccagataccccacgcgcacaacgcgatgccgagcacgatgctgacaatccagaacacgagacgagctctggcagcgaatcgttgcttgtcgagccagcgctgctgttgcttatattcgtcctgtttcaggtccgtgagatgattgccggttcccttgcgggcgatgcccttggctttggcggcatcgaacgccgcgaccacatcgaggtagtcgccattgtggatgttgtaggccgtgaacgtgtagctgccgtcgctgttgcgcttggtttccgaggtgcgctcggtgtgcagccatgtccatgaggttttgccggtgatgccgttggggaaatggacggtgccggtgaccgtgccgataggcacttggttcttcttgccgaacggctcccattggaaggaggccacgtctttccatttggtggccacatcgtgcatggtgaagcttacatcgaacttcatgctgtcggcctcggtggtgaccggaatattccagccgatctccacggttgtgtcatcttcggtggcggaggcgctgggcttgaggccatcggtaccgggcgtgtatgcctttggatggtcgctgccatcgctcacatcggcgacataccaatggttggcgtagtcgctgttccattccttgtcggaagagacgtcactgggcagcttgggctcgctctgttgtgcgtagtcgatgccgtcggtgacgttgcgcacgctgatatcgctgatatcagtcaaggtgccggagttcagcgtgtattgctggaacagctgcttccacggcttggtgttgtcgtcactgtcggtacgctcacgcatcttgacgtcgatatgctgcgtgaccttcaaatcaccgttcgcggtggcggtcacgtcatagtccagcgtgcggtagctgaggtcggccgaatcgccgaacgcggaagtcccgattatcgccaaggtgataactgccaacaccaccgtggcaacaatgctgatgattccggcgcgaatgaatcgtatccgcatatcttccctctcttaagacaatacgggcccggccggcggcttaccggacgggcctgaagcgggtcagaactggacctgtggcacctgacgggaagcgtcatcggcctcgaagtattgcgcctgctcaaagtggaacagaccggcgatgatgttcgtcggcacggtttcgatggcggtgttgagcttcaggaccacgtcgttgtagaactgacgggcgtaggcgatcttgttctccagttccttgagctggttctgcagatccatgaagttctggttggcttgcagctgcggatatgcctcagccgtggcttgcaggttgaacagggcgcgggacagctggttttcggcggcggcgcgctgagcagtggtcgtgctcgggttgctggccgcagccactacgccggcgcgggcggcggtcacctgagtgaagacttcagactcgtgggatgcgtaccccttgacggtattcaccaggttcgggatgaggtcggcgcgctgcttcaactgcacgtcgatttgcgcccaaccgttcttcacacggttcttcagcgtcaccaggttgttataggcgctgacgccccaaccaatcaagacaacgataataacgacaacgacaatgccgacgatcagaccagtactcacctatgctcctttgctggaccttgctgtgaccattcttccacactcgcaccgtaaacagaagattcatcacagagtattcatcgtgcggacttgtcttgtaccgctttacccgccgttctcccgtcgatcgaccgaagcgggaagtcgccgcccagtccgacgaagtattccagctcgctccgttgcgagaacgataatactcggcaatactcgcgttgaatatgcgaaagcccgccttgcggcgggctttgccgtttctcctacgcacaaatcattacgccgcgcgcaggaaacgatcagccgaaccttccagagatgtagcgctcggcttcttcgttttgcgggttgttgaacatcgtgatggtgtccgcgaagtactcgaggtgaccgggctggcccactgccttcaggttgaagaaggcggtgtagtcggcgatacgggcggcctgctgcatgttgtgggtcacgatcacgatggtgtagtcgctcttgagctcgttgatcagatcctcgacagccaaggtcgaaatcgggtccaaggcggagcagggctcatccatgagcagcacctgcgggtggacggccacggcgcgggcgatgcacagacgctgctgctggccaccggacaagccgatgccagggttgtcaagacggtccttgacctcttcccagaggttggcaccgcgcaaagcccactcgaccagatcgtcggcgtcggacttggccaggtggtggttgttcaggcgcacaccggccagcacgttctcacggatggacatggtcgggaacgggttcgggcgctggaagaccatgccgacgtcgcggcgcacggccaccggatccacgtccttgtcgtacaggttcttgccttcgagcagcacctcgccctcgacgtgagcgccggggatgatctcgtgcatacggtccaaggtgcgcagcacggtggacttgccgcagccggacgggccgatgaaggcggtgaccttgttcggctcgatgttgatgttcacatcttccacggccagaaagtcgccgtaatagatgttctcgtggttgacgtcaatacgttgtcccatgatgtttccttatatttccttgtgttcttaaggcttaggcttagcgactggcttagcgctcggtcttgacggcgaagaccttcgccacgattcggccaatgaggttcagcagcagcacgatgacgatcagcacgagagccgcagcccacgcacgttccatcggaatcgtggtcacgcaggtggcgtcggcgttgggcgggcagttcgcgctgagcttcgagtactcctggtagacgaacaccggcagggtggtcatctggccggagaacaggttcacgttggtgctggagatgtagccggcggtcatcagcaacggtgcggtctcaccaatcacgcgggcgatggccagaatggcaccggagacgatgcccggcagagcggtgcgcagcacgatcttggtaatcgtgcgctgcttggtaacgcccagagccaaggaagcctcacgcaaatcgttcggcacgatcttcagcatttcctcgctggacttgaccacggtgggcagcatcagcagggagagagccacggagccttcgaaaccgttgatggtaccggggcccagcagaatcgtgaacatcgagaaggcgaacaggccggccacgatggacgggatgccgctcatcacgtcgacgagcagggagatcgtggtggcgagcttgccgcggttcgagtattcgaccaggtacacggcgcacatcaaaccgatcggaatggagataaccatagcgccagcggtgatttcgagagtaccgatgatggcgtgcagcacaccgccgtaaccaccggacggggtctggctaccaccgaccacaccggtcatgttgtagctcaggaagttcaggttcaggcgcttgatgccgttgacgatagtggtccacagcagggagatcagcgggatgcaggcgatcacaaacgccaccgcgatcagggcccacatgaagcggtccatgatattacggcgctggatggcggaacgggtcgggcggaaacgatcgaagtcgatttcgggcgtgccgtccatcggagtcttttcagtgttctcagcagcagtcatcacgcagtcgctttctcggtaagcttacgggcgatgaagttgaccacgaacgtgatcaggaacagaatcagaccggttccaatcagcgtggagacgcccagatcgttggcttcagggtactgtgcggcaatattcgcggcgatggtctggttctgcgaggcctgcagcagcttgatggagtagttgaggcccggggacaggatcatcaacacggccatcgtctcaccaagcgcgcggccgagagccagcatggaggcggacacaataccggacttgccgaaaggcagcacggccagacgaatcatctcccacttggtggcgccgagcgccagcgcggcctcttcgtgcaggcgcggggtctgcatgaagatatcgcgggacatggaggtgataatcggcaaaatcataacggcgagcaccacagccacggtggcgacggtgcgcgacgggttggcggccgggccctcgaacagtggaatgaagcccaggtggttggcaacccagttccagaacgggtagatggccggcaccagaatcaggccgccccacaaaccgtagataacggacgggatggcagccagcagatcgaccacatagctcagcgcggtggcgagcttcttaggtgcatagtgcgaaatgaacagcgcaatgccgatggacacgaagaaggcaatcagcagtgccagcaaagacacgagcacagtaccgaacaacagcgggagcacgtagccccagaagctgctggccttgccgccggtaaagctggacacggtgtcgctgttggcggcctgatcgccaccgatgagtggccaggcgcggaaaaacaggaacaggaacacagcggcaagtacaaccaggatcaggatgccgcaggcgtatgccacaccgcgaaacaccttgtcggcggtcttgcctccaactggctgcacagccgttttgtcttgcgaactcacggattctccttatatagggtggttatcaagtattcaagtggtgcggttttcgtctgtgactttgccaaaccgttcgggtcctgacccgctttaagccgcagccgtatggtttacgactgcggcttaaagttggcggcgactgctcttactactacagtctatcgttcagttgtcaggtccagtccacacgacccttgcgggccgacgtcatcacttggtcttgatggcctcgatggacttggtgatcttagacttcagggaggagggcagcggagcggtgccggcggcatcctgagcggccttctggccctcgtcggaggtcacgtaggtcagccaagccttggcgaactcagcctgcttggtgtccttgtaggccgggcagacgatgtcgtaggagaccaagacgatcgggtaggcaccctcggcctcggtggcgtggttgatcttgatgacgatgcggttgtcgcccttaacggtgtcgtcctgcttggagtcctcgatgaccttggagccggcctcggcggaaatctcgttgtacttgtcgccgaccttgacggccacggtgcccaggtcgccgacctgggagaagtcagcgtagccgatggtgccgtcggcctgcttgacggtggagatcacgccggaagtgcccttggcgccctggccaacctcgttcggccagttctcggagaggtcgtaggtccagttgtcaggggtgacgtccttgaagtaggagacgaagttctgggtggtgccggacttatcggagcggtgcacgacggtgatggcggtgtcgggcagcttcaggtccttgttctgatcggcgatggccggatcgttccacttggtgatcttgccgtcgaagatcttggcgatggtggcagcgtccatgttgatgtgcttgccggcatcggaaacgcccttgaggttgaagaccacggcgatcggggagatgtagaccgggacatcgaaggcggtgccttcagtgcacacggacttggactgctcaacttcgtcatcggcaagggccttatcggagccggcccaagcggtggcaccggtcaggaaggtctgcacgccagcgccggaaccggacgggttgtaggcgatcttggcttcagggttggtgccctggaagccggcgatccaggcttcaacggcggcctgctgagaggaggcgccggcgcccgagaagttgccggagaccggggtggacttggaagtggaatcggaggaggagctgttgtcggtcgtggtggcggtgttatcgccgcaggcggccacggaagcgagcatcacaatgccggacagagcggcaatggagcgaatgaggatgttcttctgcatgattattacttaatccctctatcaactattcgcgggcggctcagcgctgcccggtcaattcatgacaactacaagcgtattggtggtttcaagggcccaaaaccgaaatcagtaaacagaagatgaacacttggatgtttgtgggctacgttgaggctacgtagtttttggagtggactcgcctgcggcgagcccacaatccacaacaaaaaaggcggcccgaaggccgccttccatttactccgcgggagtatcgatcttgtatccgagaccgcgcacggtagtcagatacttggggtgcgccggatcttcctcgatcttggagcgcacgcgcttgacatgcacgtcgagcgtcttggtgtcgcccacataatccgaaccccagatgcggtcgatcagctggtgacgcgtcatcacacggcccttgttctgcatcaggtattcgagcagttcgaattccttgagcgggaagaacacggtttcgccgcgtacggtgacctgatgctggcctacctgcatggcgatatcgccgcacaccagcggaatatcgtcatccacagtgccggaagcctgggccgtggcctgattgcgacgcatcacggcacggatgcgggccagcagctcacggaaagagtacggcttggtcacataatcgtccgcaccaatctcaaggccaacgaccttatcgatttcggcgctcttggcggtgagcataataatcggcacacggctctgctcacgaatgcgacggcacagtgcagtgccgtcaatgcccggcagcatcaaatcaagcagcaccaaatcgatgccgcccttggtgaacagttccagaccttcctcgccagtggcggcggcggacacgtcgtacccctcgcgtgtgagctggtataccagcggctcgcgataggattcctcgtcttcgacgataagaatgcgtgccatagtagcctttcttgggtatgttcccgtgcgcataggcgcaaagttttccgatactatcgtaaccatttgttctccgttagcctgctgtttcctgaaagtacgtaattgcgtaattgtgctacgcacggtgtgcgcacctcgcccactgtgtgattgtgcggcaatggaatggcaccatatcgggcaccaaccaaggccctacgcttgtgtcgactcgtccggccgggcctcgtcgtcatcctcatccggggcggccggcagctcgatggtgaacgtcgacccctcccccgtacgcgaccagaccgaaatccgaccgccgttctcctgcacgcagtgcttggtgatggccaagccgagtcccgaaccgccggtctcgcgcgaacgggccgggtcgacccggtagaaccgctcgaaaatgcggtccagtgatttggcggggatgccgatgccctgatcgaccacgcgaatggtgactttgccatcgcgctcccccacgccgaccgccacagtggtgtgttcgggcgagtaatggatggcgttctctacgaggttcttgacggcggtttgcatggcctctttgtcggccttgatcatcggaccgctcgtggccgggctgcctgattcttccaaggaaccttcgccatcggccagctcctcgaccttcgtgggcactgactgtccgttgacactcagtcgaatatccacatggcgggagtcggcttgggtctgattggcggcgatggcagcgcgtgccacatccagcgcggaaatgcgccgcgcatcaatcacactttgcgggctttgggctttctgcaagtcgataagatgatgtaccagttcggtcaggcgcgcggattccttggagatacggccggaaaaataccgtacggcgtccggatcatcggcggcgtcggtcacggtttcggccagtagcgagatggcaccggccggagtcttgagttcgtgcgaaacgttggtcacaaagtcacggcgaacggcctcgaaacggcgctgctcggacatgtcgttgatgaagatggcgtacaggtcatcgccgatatcgccaatgcgcacacgcaaatacagcatgttggacgggcgtgactggccggcctccagtcctcggccattagaggacggataggaattgcgattgaccggcagctgaacctcacgctcacgcacgccaccgtcggcggcggcctgagtgaggatgtcctcgacttcgcgcgagttgagtcggtcgccggagaccaggccgaatggcactgagccggggcttgaatattggaccaagccgttgcggtcggtaacaatcagggcttcgggcaggacttcaatcaggcgacgctcggtggggcgcacgggcgcatcatcaccgaatagagaacgcgtatcctcgtcgccggacaggtcctgttcggcggcgagccgacctgaaacgcggcctttgttgtaggcgatgacggcaacccacgccagtatcagcgcggcgagcaccacaatcacgacgatctgccagatatccatgatttccagagtaaaacgtgcaaggcgtagtgagatgcccaaactacgtaagttcgtctattgttcatttttggtgggacgacataacaaaatgctcccgctggcgggagctgtcgaacgcagtgagactgagggtggtcaaagaaccgaaatcccattggccaccctcagtccgctttcgtggacagctcccgccagcgggagcataatatggggagctctatttacagctcgtagtccttgtccttgctttccttaatcaggaacagagcgagcagagcgagggcggccatgatggccatgtaccagcccacaccggcaacgccgaacttggaggcgaccagggcctgggcgatggtcggagcgaatgcgccaccgaagatggcggcgaggttgtagctcaggccggcgccggagtaacgcacgtgcaccgggaacagctcaggcaggtaggcgccgcaggggccgaacaaaccacccatgatcatgaagccgacgcacaggaagatcatgatatgggcggcggagtgcacgagcagcatcggcacgaagaagctgaacaccaaggcggcggcggtcacggcaatcatgaccttcttgcggcccaccttgtcggcgtacacgcaggagaccacgatgaagatggcgaagaacaccacggagcacatctgcatgagcaggtactcgccctgctggaagcccaagcccttgacgccgtaggccagcgaccaagtgccgagtacgtagaacagggtataggtgatacccatggctacggtgccgagcacgacttccttccagtacggcagcaggtcgcgcagcgggtgcttggaggtgcgcttctcttcagtggccttctggaacactggggtctcggacatgcgggcacgcacgtacaggccaatgatcaccagcacggcggagcacaggaacgggatacgccagccgaaggcaatcatctgttccttgctcaggttggattcgagtagcaggttcaggccgtaagcgcagaagaagccaatcggggcgccaaggttcgggaaggaaccgtacagggcgcgcttgtcggccggagcgttttcagtggcgaccagcgcggcaccggaccattcgccggcgaggcccacgccctggcaggcacggcagatgcacagaatcacgacggaccatgcgccaatctgctcataaccgggcaggcagccgaccaggaaggtggcgatacccatggtcatcagggcgataaccagcgtcttcttacggccgagcttgtcaccgaagtggccgaacagcatggagccgaacggacgggcgaggaacgaaacggcgaaggtcacgaaggccatcagcgtggcgagggtctggttggacttggcgacgtccgtgaagaagatcatgccgaagtagctagcagcggcaatggaatagcagtagttatcgtagaattcgatggccgtaccgaccatggaagcggcgatgatctcaggaaccgaatccttcttcaccggtttggtcacagccgcggttgcgcttgcagtcattttttctctcctcatgctgcagataaaccccagtgcagcgtgcgcattgtgtattcaatgcttcgcgacggtgttgtcgtcgcttaacgaattgagcacagcgaccggcatgcgggagaagaactggtacggcttgtggccccagcgatgaaccccgcacatcgctgtgccgaacaccgagtatggctcaggttataagcaatagtttgaaaacgctcatattgtggtcatcatacccaaaacgtggatggtgagatgggccagcccgccgactacaggcgcttgacgatgtcgacagccagacgggcggcggtatcggcgtactcggagatgtcgaactccttgaatacctcgtaatcggtgtcggcgttgtcggaaagggcacgaatcaccagtgccggcacgtcattgcgggcggcgacctgtgccacggcggcgccttccatctccacggcgtcagccccggtgagtcggatgacctcctcgaccttttggggcgtgtccacgaagtagttgccagaggcgatgatgccggtgatgtgggtaatgcccgcattggcaagcgcctcgtcggcaacttccagcagacggtcatcagagtggaattcctccaccggagcgtccgcagtgccgggcttccactggcctacgagccgcatgtcagtgtcgaggtagcgcagggtgccgccgagcaccacgtcgttgatgtgcaggtgggtgttgaggttgccggcgatgccgctgaaaatcacggcgtccggggcgaactcgtcaatcagcagctgcgtggtggcggccgcattgaccagtcccatgccgcctaccgttgcggcaaccttgatgacgtcagaaccgaaggagtcgaccgtgccggacacgatgtcaaggctgcccttggcggtgtgcgtcacatgcgtgagcgatttggcgatcagtgccacttcttcatccaatgcgccaataatagctacagttttcatacccatacgtaagttcctttcacaacactttcggttccccttgtcaggggagctggccgccgaatggcgggctgaggggtagtcagacgtttcgtcacattgcttcccccccgagagagccgatgacgcaactcagtgccaacgccgcgtggccacggcttccgcaagctcgcgcagcaaggcctcggtttcttcccagctgatgcacttgtcggtaatcgacttgccatagaccagctgatcaagcggcgcggccttctgattgcccccttcaataaagctttccatcatgatgccggtaataccctgttcgccagctgcaattctgctggcaatattgcgcacgacttcggcctgacgatgctcgtccttgccggagttaccgtgcgagcaatcaacaatcagaccgtgcgaggctgcggattcggcgggcatttcggcgcgtacgtcttccatggctttggccacggactcggcatcgtagttcgggccgtgaatcgagccgcgcaacaccacatggcagtccgggttgccaagggtctcgactgcgcaggcacgccccagatggtcaatgccgaagaacgtgtgctgctgagcagcggcgaagcaaccgttgaccgctgccttcaccgagccgtcagtggcgttcttgaagccgaccggcatggaaagcccgctggccaattggcggtggatctggctttccgtgttgcgcgcaccaatggcgccccaactcaccgcgtccgagatgaactgcggactggtgggctccagaaattccgtggcggccgccaatccttccttcagcacaccaagcaaggttttgcgggcaagcaacaggcctttgcgaatattgtggctgccatcaatatccgggtcgttgatcaggcccttccagccgatggtggtgcgcggcttctcgaagtacacgcgcatgacgatgagcagctgctcaccgagctcgtccttcagcttggccaatcggtgcgcgtagtccagcgcggccttcgggtcatgaaccgaacaggggccgacgatgaccaacaacctgtcgtcttggccgtacaggcacgcgcgaatctcatcacgcgagtaggcgacgatttcctgagcctgatcggtcagcgggagttcagcgagcacttgcgcgggcgtgggcagcggctccaactccaatacgcggcggttgatgatgcgactgacacccacctgatcttcccagcgcggcacatcagtggcaacgagcgggttcttcccctcccccatcgcctgacgaatggcgcgaagctcttccggggtgttcaacggctgcggaccgacttgcaacggatgcagcgaatgtgctgcttcctcctgctgctgcataacatctctccttgggtcagtatctttcccaaggataaggtgtcacgggaacaaactgacatgaccaccgttattggcaaaaatgctcactgagtgggtctcagtgagcatttttacaaagacaaagctatttagccgcgcggcgagtggcgacggcgtcggctagggtgtgcagcagctcgttggtgcgttcccacggcacgcaagagtcggtgacggactgaccgtagaccaactggtcgagcggggccggcttttggtgaccgccgaccaagaagctttccatcattacgccggtgatgccttgttcgccgtgcgccagacgctcagcgatctcttcgatgacttcggcttcgcggttttcgtctttgccgcagttgccgtgggcggcatcgatgacgaggccatgctggctcgggccggacgctttggaaaccttgaggtcttccagagcttgacgcacggattcggcatcgtagttcgggccgtggctggaaccgcgcagaaccagatggcaatccgggttgcctttggtttcggcggaaatcacgcgaccgtccaagttaatggacaggaagtgatgctcgaagccggccgcgaagcaggaatcggcggcggccttgatggagccgtcggtggagttcttgaagcccaccggcatggacaggccactggccagttcgcggtggacttgggattcggtgttacgcgcgccgatggcaccccagctgatcgcgtcgcagatgtactgcggggtgatggggtcaagccattcggtggcggcgggcaggccgaggctcagcacgtcggtgagcaccttgcgggccagccacatgcccttacgaatattgaagcgaccgtccagatcggggtcgttgatgaggcctttccagccgatggtggtgcgtggcttctcgaagtacacgcgcatcacgatcacgagtcggtcttccagctcgcgcttgacggcagccagcttttctgcgtactcgtgcgcggccttcgggtcgtggattgagcaggggcccacgatgacgagcagtcggtcgtcgcggccgttgagcacgtcgcggatttcctgccgcgagtggagcacgagctcgctcatctcatcggtgagcggctgctccctgaggaaggcacgcggcgcgggaatggggtcaagctgacgaatgttgacatcgacggtctcgggaaagacggcctgctcccccaaacgacgttcatcctcggaactatccggaccacgtagtgctgccattgctcgactcctttccttgtatacgtaccgtcggtatggcgctatagacgcaaaagcccaactatagcagtctgttacggggactgcttgttgggccggcggttatggactttgggtgaactcgcctgcgtggactcgcctgcgtggactcgcctgcggcgatgctgtgttgttgtgcggcctgcgaccgcggcctcccccccgtcagcggcttcgcgctgacagagggagagaccctagcagccggcaggctgcgaaaaaacacagcatcggccgtcaggccgattccgggaggctggcgaagtcaggccaaggcgcccatcgggtcccatgcggggagcatggtggctggctcttcgagggccttctggtattcctccggcaacagggccttcgggacggctacctcgtagacgtattcggtgaaccagtcgtcggacatggtgaagtagcccttgtcggcgatcttggtgccccaagagttctccactcgccagcggcgggtggtgccgtcgtcggccacgtcaacgccggcaaaagccatggcgtggttcatggcggagtcaccgaagcgcacgcgggcttccttgtccaaatcgaagtccacgtcgtacacgcggccgtactcgaacaggtcggtggcccaagcgccgttctcacggtccatgaacgggtggcagtcggcaccgaaccataccgggatgccctgctcaacgagaatctgcttgacacagtccttcatgaactggtttggcacgttgaggtactcggtggcgtcgccgccagccacattgccgaggtgctcgatgccgatcttcttgcccttggcgtgctcggtgcgcggatcatccaccaggcacacgtagtcctcaagaccagccggacccacgtacttcttccagaactcaaccggcgtaatctcgccgtcgcggtggaattcgccatccttgtcggtccattcccagtcgaaggagaccggcggctcgcccaggtggatggtcagaatacggtggccggcagcagtggcgtcggcaataatcgcctcgaccttggagacatcgccgtcagcggcgtacatgtgcgccacggcggtgtgcagcatgtggcgcagctgggtgttcatttcaccggtgttcttggaggattcggtctccgggaacaggtccttgggcacagcgccgtacttcttgtacacgttcatggccatggtccactggccgccatcgcccatcacgtcggcgagcaggtgctgcatcaggcgggagtcggaaggctctccggcagccaccagagtggccacatccttaaggaagtagttgacgcgctccagcttgtcgtagtacatcgcgtagttctgggagaactcgaactccttcaagttcatgttcttcttggccacgaaacgggccacgttcagggagctgaacagccagcagcggccggagcgatcctgatgggtggcttcgccattgtcaacgatggtggagaaacggcgctgcatcagacgagcgcggtcataattgcgagccaccttgtcgatgccggcggcggtcaccgcgttcatggccagacggttggtgccgctctgtgcgaaatcgccgcgcagggtattcaatgcttcgccggtcagaggcgtcaattcactcatgtcatactccttctgtgatggtgcgcttgtggcgcagatccaaacgaatacggcacctggctcgaaagcgcaggtgccgtaattcttaccgctagtagtctaatcgaaggcctgtcattcgccgttctgctcagatacggctggattctcctgagtcggggcctccggttcgccctgtgtctggtgctcggacggctcagacgattcggactgctcattctgcgcagctgaatcagccgaatcagccggtgccgcatctgtctcattgtgatcgtcggcagccgactcgtttccgctcaactcacccggctgatcatcggcctcgttgtgtacaggcttgacttccgggacgggcgcgaccaccggcaatgacgccacggcagcggcttcctgactctgaccagaggccgccgcattaccaccgaaagcgaatccggagaacgcctgcgagaacatagaacgcagttccgaaacacgctgggtgatgacggactcgcgttcctgcagatcggcgatgcgcttggacagaccgtcaagctcgctttgggcggcggcacgacgctcctcgatctgcgcatcggcttcctcgcccgccttatgcacgattgcggcggcctggatgtccgcctcctcgcgcttggacgcggcatatgaatcggcttggtcgcgagtgttcttggcctggccgaccaactcatcggcttcccgcttggccgccacacgacgctcttcgaggtgctgcaggagttcgttgaccttcttcgtggcctcatcctgctgagcggcgatgtcgtgacggatctgctcgacttcggcgttgacctggctcatcgtgctggtgcgcttgacctcggcctcatcagtgatttcctgacccttggtcttggccgcatcaatgatttcgctggccttgcgctgggcttcggtcatcatcttggacacttgctcgcgcacgtcggcgagcttcttgttggcctcggcgagtgccgcctcaatctgatcgttggaatcggacttaagcttggtgatctcctcattggcgcttttgcgcattgcggcgacctgctgggtagcttccgccttcatatcggcgatttcgcgctcttgggtggagcgttcggaagccatcttcttggtgtgctcttcgcgcgcgttgctgagctcaagctcgacggtctgacgctgttcggtgatggtcttggcggtttcggagcgcagttgtgcggcgtcctcgttggcggaggtggtcactgattcggcctgattgttggcgttcgtcagaatcgaggcggccttggcattggcgtcgtcaacaatatgctgggcatccagcttggcgttgttgatcagtgtttcggcctgcgcctgagccgtggtacggatggaggacgcgtcctgcttggcgcgttccagcagttcggtactcgtctgttcggcggaggcaagcatctgctgggcgttcgcccccagggaagcgaagctgttgccttccggcttcttgttcttctcttcctgaagttgggcctgcagttgcagaatacggtcgtcatccgccgcaatctgctcacgcatgctggccaacgtctgctgcgcacgcttcacactctcctgagtagcgtcgaaggcagcatcaaccttctccttgtcatatcctcgcagcaccaccgggaaacgatccaccatcgctgtttattcctttcgcacacgcataaagctcttggcacatccttgaagcactgtagcgcatcgcactagcgctgggcgttgagtgacgcgcaatcgttacaatgcgtgcgaaccatgttctattccggcgtggcgcgcagcgtgctaggcgatgaggatgccggagctggagggcttgagatagtagcgcacggcttcgcgcaccacatcacggccagcggcgatctgctggtcgagtggcagaccatgctggctggaatccgccggcacgaccggcgggaagctgacgaatccgcccagcacccgctcctgggtggcggtccagttcagcaagttgtagaacagcgaattacatacgaacgtgcctgcgtccgagctcagggtggccggaatcgaatcgtccgtgaaatcattcaggatcgagcgcaacggcaggcgggtccaataggcggccgggccattggggtcgatgggttcgcggcgtggggtcacgttgtccgcgtccggcttgatcgcgtccatcaggttggtggcgcatcgttcaagcatcacgcctcgggctgcgtgcttgagcccggtggcgatgacgatattgggcttggtggcctcaatcgtctctttcagcgtgggccaggctttggcgaagctcaccgggatgctgacggcatggacggtgacggcgacctgctccaacggatcgtccggagcagaggagacgcccaacccctgctcggcgatggccttgggcacttcgacggcgggattgacctccacgccgtcatagtggtcgaagccggagatcacaacattgagttcacgcataatgccagtctagcgatgcatctggccggccgcttgggccagcagggcgtgcatgcgggcgcgggcctcttccttgggatcacgaccgagaatctcctcggcgatacgctcagctgtgggaatatcctccagcgtggtgatcttcaggttggtttccgcaccggagacaatggcgacgggttcatcaggcagataatcgaccacaacgcgcgtgtcgtcggtgggatggaagtccgggtcggcggcagccagatcgtaagcgtgacgaatcgtcgcgaagcggaaggattgcggggtctgcgcgcggaaggtgttcgggcggtccggcaccgacttgaccactttcaaatcgcccagatcctcggtcaacagcacggtgtcggttgaggtgtaggccacggtcgcggccgtgaactggtcgagcgcatcaatcgaaccgtcgatggcggactgttccacgaacggacggacggcgtcatggatcagaatcttggcatcgtccggaatgccagccgtagccagcatgtcgagcgcggcggcggtactgtccacacgttcgtcaccgccgtcaatgatgacgcggaccttggtgtagcccatctcgccaaccaacgtttccacttcaccgcgcaccttgggattgaccaccaccacgatgtcgctgacgcgatcgcaatgttcaaaggcatcaatgctccagcacacgatgggcttgccgcccacggagacaagctgcttgggattgtcggggtcgaagcgcgtaccgaagccggcggccagcaccacggccaccaccggcacggtttgtgccggtttggagccccgagcgggggccggctggacggtaggcgtctcgacgggggtatcgaaatctctctcagtcataggcaccaccgtagggtgagggctggccgtccgtgaactgcatcacatcttctccacggaatgtgctcgcattctccgtttagtcacgcacgatgagggcaaggaggcggccttcgtgtgttttgttggcgagcgcggcgcggcggtgcgagtaccacagtgggttttcgagcgtgcacatgctgtggctgatgttgtcgatgcgctccgcgagctcggccgggccttcgccgtccgtacggcacagttcggcgagttccgggtcttcctcaaggtactgggtggcggcgtgcacgcgcggcatcgaatcgaccacctggtgtacgccggcgaaggcgaggtcgatcatcgcggcttcggcgatgtcgatgccggcaccaccgaaacgggtcttcgtcttggtcagcgggaagcgcttgatgaactggtcggcgatctcgtcgcccacttcatagcagtcgccgcagatgcgcgggccgagtgtggccacgatgttcgccggatcggcacccttgctcttcatcaggtctaccgtggcgccgatcacaccacgctccagaccacgacggccgcagtgggccgcaccgatgatgccagtgaccgggtcgcccagcagcaccggcaggcagtcggccgcgaacatgcctagggcgatgccggattgtgcggtgacctggccgtccgcctcgatgacgtgcggagtgtcagtctcaccgtgtgtgccggacacgtcgaagccgaagggggtgttgatgacgaacgagtcgtccacgtccacagccacgccggaatgtacttgggagaccagcgataggcgggcttgcaccgcttcggcgagtgcgatgcggttcgacagtacggcctcaggttcgtcgccggacttgccgccgaggttcaggttgccgtaatcgccggcgctcaggccgcccagtcgcgtggtgtacaccaccttgatgccgggggccagtgcgatggggatggtcaccggaatagggcgaccggctttatcggtagagctgatgctgttggaatcgaggatttcttcgctgtattcaggcataaggcattctttcttgggtgcgggcggtgttcatgattcccatgaccacccccagtcagcgggggcggagtggtaggttattcggctttgagggtgggctttttggtgcgcgagcggatggcggcgttgatgggcacctggtgcgggcagggcatcgagaacacgtgcgccggattattgatggcgggtactggcgcgccatcggcatcgcgcaggccggtttccggcacggtaaagaccaatggtctctcgccaggcagcaggaattcaacctgttgaccgggctcgatcttgttacggctcatcagcgtgacacgtccgccttcgtccgcgctccagctcagcacttcgcccactaccagccatgagcggaagtaggcggagcggtcggtgttctgtgtgaccttgtgctccgggtaatagaagccggtggagtagtcgcggtgggccaccttgtcggtttcctcgagcagccattcgggcagttcgacgtgcggggccgggcgaacggccgcatgcttccaatcggtctcgatctgttcgaccgcggtgttggacttgcggcgcgtggagcgggcgtgggagctcatgccgtcgggttcgacggcggtgccggccgacgtaccagaggcagttgagtcggcggcatcagcaaccgtcacgcggtcacgttctgcggcaaccgagccggtgaccgaatcggcaaccgcagtatcagagccacggtcatatccctcatcggccacaccggcgaacgcggcatcggcattgctcatcacttgatcttcggttccttggccaaaatcggggtcgcccgggcgaatcacacggtcacggaaaggcttcagaacattgccatcagcgtcttcaaaaccgcgttgaatcatgtattcattaaccgcggttttgtaggcgttggtcatggcggcgatatagtaggcgcttttcgcgcggccttcgattttgaggctggtggcaccggagtcaatcaaatcatccaagtgccccagcatattcatgtcctgcgaattgaacagataggcgccgttctcggtctgctcgatcgggaagtactggccggggcgcttctcttccacgatcgaatacttccagcggcatggctgcgcgcattcgccatgattgccatcacgcccggtcagatagttggagaacaggcaacggccggagaacgccatgcacatcgcgccatgcacgaagcattcgatgtcgaggtcaccgggaatgttggcgcgaatatcacgcacggcctgcaagtccatctcgcgggccaacaccacacggcgagcgccaagctcatagaaggcgttcgcagcttggtaattggtgacgccggcctgcgtggagacatgcaattccaggttcggagccacttggcgggccatcatcatcacgccgatgtcagagacgatcagcgcgtccacgccggtgtccttgagctggccgacgtactcgcgcatggcttcgatctcgttgttgcgcggcagcacgttgcaggtcacgtacacgcgggcgccgcgttcatgggcgtagcgcgagccttcctcaaagtcctcaaggcttaggtttttgggggccgatcgcatgccgaaggctttgccgccgcagtagacggcgtcggcaccataatcgaccgcggttttcaggcccctcaggttgccggccggggacaacacttcgggctttttgcgggtggggaggttcatcgtcgtattcatcaccgcaatagtgtagtggtggccgtgtaatgcgggcggggctaccgttaggctggataacatgaagatcgatatcgtgagcgtgttccccgaatactttgaggtgatgaacctcagcctgatgggcaaagcccaggccaagggattgttggagatcaaagcgcacaacctgcgcgactggacccacgatgtgcatcattcggtggatgatacgccggtcggcggcggggccggcatggtgatgaagcccgaggtgtggagcgaatgcctggacgaactgctgggattctcgcggccgtctgaatcctccgccctatccggcacaccggtgctcatcttcccgaacccatcggccccgttgtttacccaacgcgacgccaccgagctcagccatgccgaccatctgctgttcggctgcggccggtatgagggctacgatgcgcgcatcccggactactaccgctcccagggcgtcgacgtacgcgaatattcgatcggcgactatgtgctgaacggtggcgaagtggcggtgtcggtgatgcttgaggccatcacccgcctgatgcccggattcatgggcaacccagattcgattgtcgaggaatcctacactggcgaggacgcactgcttgaacatcgccagtacaccaagccggccgtgtggcgtggtattgcggtgccggacgtgctgttgtccggcgaccacggcagggtggaccgttttcgccgcgacgaagcgctggcccgcaccgccgagatccggccagaccttatcgcggcactggattgcaaggcgctggataaggccgaccgcaagaccctgatggccttgggctgggaggtctccgccacccatccgcgccggctcgccgattaattcaccacacggtgggagattcactacgcggcggaatcgtcggaacgctctatatccgagtcgtcatccgcgggctcgatgtagaagacggcggtttcgccgtagttgcggctttcagtgatttgccagccttcgggggcggtgggggtgtcggagcgtaccgagcgttcgagcataatcacggtgttctcgttggtggcgctgcccaccgccagattggccaacaactgattgcattcagcggtctcataggcgtagggcggatcaatgaatatcacgtcaaaggattcaccaaagccgccagccacttgctcggcctttttggtgaacacacgggccttgagcgaggcatcccacgaacgattcttctgtaactgcgacaaggtcttggtaatcagcgccgccgcaggccgggaactttccacggccacgagttctcgcgcgccacggctcagcgcttcgatgcccaacgcaccagtaccggcgaacaggtccagtacacgggcgtcatccagcactccccatgagtcgaggtgcgagaaaatcgcctctttggtgcgatccgtggtaggccgggtacccgttttcggcgtagcaagcgccacacccttgaatcgtccagaaattacacgcatagctttcactgtacaggttcatctgcgcataccaatcgtggaaaatggcggaatctcctttcccatcaaaaaaagattgcggaccgtcctcctctattaggaaagacggtccgcaacatttagtaacggatataacgcaatacgttaacgccggatggttcccttgaatggcttatccggagacaatgcgacacgtcccatatcagtccccagaacgttcagcgtaatctccgtgggcttcgaacagcgcaacgtatattccactgtctgatccgtccatgtcgcatccacttggattccacctcttgc

SEQ ID NO: 1655 - DNA, 13764 bp, Unknown
  R221_24m  MAG No. k141_118419
ccgtgtaatcgggggcccaacgccgtactggtcgcatgtcattgtctgcaagccgatgcaatgaccgttctacgccatggtatccatgggcttggcggtgctgtcccgaatcaccagtttcggggtgaggattcgccggttgccgctcacctgctctccggcaagcactttgagcagcagtttggccactttggcaccgtattcgctggcatcacgatgcgcggcggtaattgacggatacgccgcctcacaaatgaaactgtcttcaaaactgacaatggcgggcagcccattcggatagacttccgcatggccctcccccgcctccatctgccgagcggaataatcttcggccatggcgtgaagactggccgcggcgaggatctccgtttcatagatgaacgcggtaggcggcttcggtgaatgcagcatctccaacgtgagcatcgcggcctgttccgcaacaaaatcggtgaattcgatgttgatggattccagctttcgccgtttggcaaatgcgcggaacgccgtgacacgcccctgtgaataatccaggttcggatcgccggaaagataggcgattcggcggtgtcccaatgacgacaaatgttcgagcacggttcccatcgtgcgtgaatcatcgatggacagtgacggcacataattgttcgggtcgggtcctccggcaagcactgcgcgcacacccagattcttcaacaattccgggcgtggatcatcggctcgcaaatcgacgaggataacgccatccacgcgcttgcgcgacgcccaatccttgtatacgctcatctcctcgttcaggaatcggcatgggcggtacagcaaaccatagcctttggggctgagcgaggcgtgcacacccgccatgaagtgcagcatgaagctttcatccgtgagcccctgcgtggatcgtgcgggggcaaagcctatggtcatggtcttcgaggatcccagtgcttgtgcggcgtagaccggcgtccagccgagcctggctgcagcctctttgacccgacgtttggtttccgcggaaacgccgggccgatcattgatggcgaaggataccgcggtctgcgagatgcctaattcatctgcgatgtctttcaggctcacacgctgcgtgccgtcagacgatgacgatgcctcgcgagcagatctcatgaacactcctttttacgaccgcattgcgactattgcgatacggttgacggcacccccgcattgggccatatgcatcaaccgtgcgctaactcttatgatatcaataattttagtcaaataactaaagcattttagtcactgatctcggcatatgtcttgcgacaaaacaaacgggatttaggggggcacccattgggcaacccctaaatcccgcttatggcacgagtatcaacacccgtattgcgacgaactactccgtcttgctacgagcgcgaagtaccaccgcacccgcgccaagcagcaccaccatggccgccacaatcgcaatgaccgacgaacccgtggcactcaacgaagcgccattcttgtcattgttcttgttgtcgttctggctgggcttgttcggcttggtatcgccaggcttgttctggtcgccgggcctgttcggcgtcaccgcgaccttggtgaattcgacggtgacgcccttgccgatggcattgccgttcagcacggccttcaccgtgtacttgccgaccttcgtggacacgacgttcagcgaagccacgccggcggcatcggtcttgacggtggtgtttccgccaatggccgagacgccttcgggcagttcaaacgccacctcggcattggccagcggattgccgaacgaatccttgaccgttgcctgcaccgtgcggatggccttgccgtcggccacggccgaaccgtcgaccgcggtcagcgtggacttcttggcatccggctgggtggggtcggcgaccgtgcacttggccagttcgtcggcggtcggaatcttcaccggatcggtcttgttgccgctgtaatcctcgacctgcacccacagttcatggccgtcgggaatggacttggtgtacgactccggagtggtgcggccacgaataatgccggtaatcggcggagtgttctgcgaataggtgtacttggcacccagctgcttctcctgctttttaccgttctcgtcggtccacttctcggtcatgtagaggtaacgccaatcctgagtctcggggcgaatcagcgacacattgtcgccattccacgtcactgagcaagccgggtatggctcgatggtggcatcggcgaatgcacctgctgccgtggtggtagcgccacctgcgttgtcgacagtcaccacataacgggaaccgtcaaccggcgcattcggaatcgtcacgtcgctcttgtcggcagcgaccttgacggtctgggagtatggctgaccggcgtaacgccacgaaccggtgtcggacttaacggttacggttttctcgccggagacctgcgggttggtccaggagaccttgacgttaccgtccttgccgggctcaaccttcacgctggacacggccgccgcttcgttcagcggcgcttcggcagccatcgagcgcgaaccgtccgcgcccacggcgtacaacttcagcgtgccggtcttggcaggcaggtgcttgacgtacagggtgtcgtcgtagcggccaccgaggaaggtgttgtccaagtacagcaggtagttcttggtggtggcgtagtcggcgagatcccacttgacggtcaattcgtcggaatccgcgtaggcgcgctcgaccttgaagccggtcggggcggccggcgtgtaggcagcaccgtcggtgacggtaatcttgccgatgttcacctggtagttgtcgatcgggttcgctccggccttgacgatcaggcccagcgtagcgattttcttgcccgcgtactgggagaggtctacggttgcggtcttccagccgttgctcgccgcgccatccgccacgtccaccggcactacggtattggtgtcgtcggcgaagatgaggccgagttgcagcttggaatcgtcactgttgagcttgttgtaggtcaattcgatcttggagccggcagtgacgctcaagtcggtcttgtagagacggacggtgttgtcgctggagagcttgccgctcagcaccagcgaatcgccgccttcgtagccgccgaccttggtgtagttgaagcgcggtgccgtctcatagtccttgccatagtcgaagtcggcttgcagcgggtcggaatcggcatcaatccaccactgccaagtcggcagaatgtcttgcaggttgatgttgccccactgctggttgctggtctgttcgccattgtcccgccattcaagaccgtgaccggtgttgaatgccgtggagaagaccgggccaccgatgacggagcgttcggcgatctgtgaggcgaagcccttccagccgtcgctgctcgtaccatcatcgatatacggatcagagatatccgtcgtgcccttctctccggtggatgaaccagtccacaagcgacgttcacggtcgaacacctggttttgatacttcggatagaccttcttgtcgtcacccagctcatgggagacgaagtcggtgccgagcgcggcaaggctcacatacggtttaccgtcagcatcaaggttgacgttcatataatccgcgttgctaccgatactgccgaatttctgctgtccggcctcgatgcctgcgaacaccgcatacttcggatcaatgccaaggctcttagcgtggtcggccgaatctttcagcatgtttccgctgaaccaatagttcaggaagatcgaatcggagattttgccctcggccccatcttgcacccacggtgagtttttctcgttaaatctgttctggtagccgatattaccacccgggtatgttgcagagtcataccactggatgtaaatgccctgattgacgatctgcttcatgaaatcccgataggctggaacatcatcggagtttacattggattcctgattgacgaagtaaccatcaaagccgtagtacttggcaatttccaccaacttgtcggccaccggataggtgccatcggcacgcttgccttgaagcaaatccttataggtctgttcaccacggtcgttgcccgagtagaaaatcgtcgcaatcgacttcgcgccattcttatgcgcggcgttcgtgtacgctgcatttggcaagttcagcgtaccgaattcaaaccatttctgagtccaatcagactgggccttctcatcgtagaggctcttcggcacgttcgcggtcggctggccatgccaggtgccgtaataatccgtgtactgccagtagttgaacaggtactgcgagaacacattgttgtcatggaacgactcaaagaacgcgttgccatagtcgccggcaaggttgaacatctccgtatcggccggaaggttcgggtccttctgcgtcgcggcgttggcggcgatgcgggtctgcaacggcacgcgggaacgcaggtactccgaatccttatccactgccggattccagttcagaatatctagaccggtgtaaccatgctgatacggctggttggctcccgcagcctgctccggatgactggtatcggcatactggcctccccacggcatggtgtcggtagcgcttgccggtgcagccagtgccgccagcgtggccatcgacagcaccgcggccaagccagtccgcagccatttcctgtgttgagtccaagcagaagcacgcccagcgggatcgcctgatgacaatctcatctataatctcctttgatttcctccgactcacgccggaaatcaaccgtctatgcggcttgcgtagacggtggctcaaaccggtaggacggtttgagccacgggatacggcgatatctcaccaacgccatatcccacattctctttttctctcacccgccgaccatatcggccgcaatgagtaggtcatgagacttacggaacatacccctctccgacttgtctcatgcacatcgtcagcgatgtatcacgatgcttacgctggtatcgcagtcgtctgtatgtcgggtatcatcgctattcaaagcggctgtcagggcaaacgtcacacgcacattgtcatcagcttcgtccatcagccgttcaaagggtaccgagaacgataccgcgtggctttcgcccgcctcaagcgtcagagcaacggaatcgaccagcactgccaaacgtgggatacgacgaccgccactgacgtgtgcgaagaggttcaccgaaccggccgtcttatggtcgccggcatatgctgtcacctgcaccaacacctcattcgtgcgggattcggcatcggcatgcatcccactaaacgtcactccagccaaagaaccggctccgtagccaaactcgcgcaataccggttccgccgcatccttgtatacatgggcggcactttgccggtcgttgtatcgaaccggaatggctgcgggatgcgcaggcagcgttacaggaaggcagcccggcaaaccggcaccgtcaatcagcacatcagccacggcctgcggaccatactggccagcatatccggcccaaatcgtcacagcggattgacccattacatgagtcagcacatgcgccctgccgcacaccgccaccgaaacaactggagcggtggtcaatgccacgacttcgtccagcatttcatcctggtgccaaggcagacggatgtcagacaagtccacgccttcgccgcaggtggcaccgtattcggttacggccttcgccgcgccattgtcgtcgaattcactgtcatagctgcgttcgctggtgctgccgcatacgaataccacggtcgacgcacgcgcccattgatcggccggcgcatcgctcggcttggcggccaagagaacccggtcctccccgagacgtgccaccaattgccggtagacgcttgactgttcatcggcgggcagaggggcggtgtaatcgcccaggaagcagccgaaatcgtcggcgaacgggccggcgacaatcacagggccggcttgagcatcagctatgacgctgcggatatcgtcgagcgtggcggcagactggccatcattgatcagcgttatcgcctcgcgggccatgcgcttggcctgctcacgcccatccgcagtggcctgcgcgatggcgtcggcgctcggcatggcaattgcggcggtatcggcaccgtcttcgggcaagagaccgaacatggctttgagttccagcacccggcgcaaggccgtgtcgacagcggccactacctgttcgtcatccgcatattcttcgaggcgggtgaatccttcatcccacagggagacgtccacgccggcgagcagtgcggcacgccctgccgcgggaatggagccggccatgtcttcgagccgatccacggccaggccatcggccatcacgatgccgtcgaaaccgagctggtcgcgcagataatccttgagcagccacgggttggcgcagcaaggtacagaatcgatatcgttgtaggctgccataaagcccaaggcaccggcgcgcacaccggcggccaccggcggcagatgaatttcatgaagatcgtgcgggcccagtacggcggactgtccgttgcggccgcccacggcctcgccttgcgccgccagatgcttgagcaccacggccactcccccgtggccgaccttgctgcgatgctcaccctgcatgccggtaacgatggcctcgcacatgcgggcagccatcagcggatcctcgccgaagcattcctcgcaacggccccagcgtgggtcacgggcgatgtccaaaccggataccaatgcgatatgaatgccgctggcggccagttctgcggcaaccgcggcttccgcttcctgcaccccctgcgggtcaaacgtagcgcccaaacccagattggtgggcagcaccgtgccgcccagcgcctgatgcccgtgaggcgcctcttcgctgagtaatacgccgatgccgtgcgcgccacgttccagcacagtttgctgcaccacggcaatcgcctcagtccgctcctcagggcgtatgccgttaccccaatgttgaccagaccatgggtcggctcgcaatagaccgtacagggtgccgagtccaccccatcggtcaatctcctgcttgagctcgtccgaggccaccagccgtcccgcagcattgcgttccacggacttccaaccgagcagacgctggttcaactggccaactttctgcgtgaagctcatcgaatcaatgagtcggtccactgcggggcaattgatgctcattgagcgctcccccttctcgtatattgtcttctcgttcttctcgctcttcggcgagtaccgggtcttatgttttgccctgcgcactgcaattgtgcgcactgcaattgaaaatatccggctgtggaacaaggagtagatgattccacaaccggatatcggtttaatcagccgtttcgaacgatgggtccgaaaccgcagtgtagtaacgggcggcataggggtgttcgtcagcgtgcaattccagaatgccacgctgcgcgagcgcctcttgattggccgccacctgcgaggtgatgatggtcgggcgctggcccgccacctgcagcttcatccacaggtcgcacaccgagcctcccgggccgagcgcactgcggttcaccgggtttccggcctcatccacatcaatcaccacggcgacggtcttcggctgagccggcaatgcggaacggtactgtgcggcgagttccccgaacgtacggccgatcggcttcagctggccttgctcgtcgaacaagcccagagagtgctcgaagaacgggaagtcttccatgctggcgggcacatcgtgcgagcaccaccacgtcacaccccacaggttccggcaatccatggcacgttcaacggtcttgcggcagaattccggcgtgtagtcggtttccagcacattctccggcgcaccgacttcctggagccacaccgggcgctcggaatccttgccgaacgccttggccagctcggccaggtacagtgcgtacgacgagcactcctcactggtggcgccgtatccttgcgcgatgccgttgaacacccaggagtgaatcactgtcatatcacccttggtggcggactgcaccggagtgaacgggtgcccatcgatgaaccaggtgccatcgttgacgctgtacagcgcgttgtgcccttcaccggcggcggtcggaagcagcgcgtccagccatgcgtcgatctgccggtccgtggcgctcatcttcgtgggatgcggcctgtcagacagctgattgacctcgttgcccaaggtcagacccttgaacgcgggttccttggacagctcatcggtcatggtcttgaccagttcacgctcggccgcaacggcgtccgcatcggtgaacatgttgcccgcatgccaggtgaccagccatgaaggcaggaagtcgaagctggacagatgcccttggaacacgtccacataggcatccaaaccgtgctcgccggcgatgtgcaccatgcggcgcacatccgccacgcccttcttgttgatccaggtgcgattaggttgcagatacggccagatcgggaagatgcgcacatggtccatacccagttcgctgatctgcttgagatcattgtcgatgccgtcccagtccgggtcgagccatgcgtggaaccagccatgcgacggcgtgtagttgactccgaatttcattggagtacctcctttttccagtccgctcagcccttgagtccaccctgttccaggccacggaagaagtagcgctggaagcagcagaagaagacgatgatcgggataagcgagacgagcgcaccggcggcgatcagtcgcggatcttggatgaacatgcccttgagtcggttcatgccgagggtcaaggtgtacttgctttcatcggagatcgcgatcaacggccacaggaagtcgttccaggcaccgacgaatgcgaagatgccgacaacggtcatcgtgcctttgacctgcggtacacagatgtggaagaaccgctgccataggttggcaccgtccaccatggccgcctcttcgagttccattggaatggatttgaaggcgttggtcatgagcaggatgttgatggcgccgcacaggccaggcagtgcgactgccagcagtgtgttctgcaggtggatggagcgaatgatcaggaactgggagatcatcacgccttcgatcgggatgaccatggtgcccatgaacatggtgaacaccagtccgcggccacgccacttcaggcgtcccagtgcatagccggccatcgtggagaagaccacgttgccgaagatggagatcaggcagaccaccagcgtgttgagcatgtagtggaataccgggacctgcttgaacacggaaatgtagttgtccagcgtcggggtcttcggcatcaggtagggaggcacggcgtagacgttgtcgcccttgcccttgaacgacagggacagttcccagacgaacgggccgacgagcagcaggaacatcagaatcagaatcagatactggacgactttgccgacggtgaccttatgcgtgttggtattcatcagtcctcacctcgtttttgtacgatctgctgcacgatgagcatgacgccgacgatgacgagcacgacgatggagatggcgctcgcgtaaccagtgcgggcctggataccggtgccttcgcgcttgataagcatcgacatcgtcatatccatgccgccggggcctgcggagccgttggtcaacacgtagatttcgttgaagactcggaatgcggcgatggtggacagcatcatgatgagcatcatcgtggagcgcacgccgggcattgtcacgtagatgaactggcggacagggccagcgccgtcgagggaggcggcttcgtaaagggattcatcgatgttggcgagggcggtcaggtagatgaccatgtagtagccgaggcccagccagattgtcacgaacatcgagctgaagagcacgccccatcgatcggtgaggaatggaaccggcttggagatgatcttcaatgccttgagcacggagttgaccagaccggcggaatccagcaggttggtccagatcatacccaccacaacggcggacataaccaccggcatgtagaaggcggtgcggaagaagcccatgatgcgggagttgcccttgaccagataggccaggatcaacgggaggatcaccatgaacggcactacgcagatcacgtagagtgtggagttcagcagtgccgtgaggaagtactcgtcatggaacagtttgatgaagttttcgagtccgacgaaggttcccggacggagcagtgtggagttggtgaaagcaagcctgaaagtgttgagtgccgcaaggacgatgaatacaaacacaatcgcgaacgctggcagaacaaacaggtagggggcaatgatggtgccgaagctacgattctgcttcttgccgtggttgaggttcatcggttcaggccggtcggaggccgtgcgggcctccgacctgtcagcggcgagtgccgcgttgctcactgtgcgagcttctcgtttgcgaactcgacggacttgtcaagggcttccttggcggtctgcttgccctgcatagcgagggcgatctgctgctggaagttcttggagccgttgttgtcggtgaactcggacggacgagagccgtagccgtccttgacctggtcgagcgtgatcttcagagccttgccctcaagggtgctttcgtcgatgctcttgtagtagtcgtcatccagaccccccttggcggacgggaacacggaggccttcttgtcgaactcgatctggttcttctcgttggtcacgaatcgggcgaagtcaatggcaacgtcggggtgcttcgagttggcgctgatgccgagcatctcgtaggccacggaagcggacttgccgtcgttgctgatacgcgggccgactgcgaggttcttgtaaaggtccggagcgttctgcttgaagccgtcagcggagtaggcggagccggccatggagaccaggttgccacgctggaagagatcggcggcctggctccaggaggagtcgagggcctccggcgggatgccgcccttcttgtacagctcaacgaagcggctgatctgcttgacaccggcctcatcattgaaggtgtacttgctgtggtcatcgttcatgaaggacttgacgcctgcggtcatcagatcttcggtgttgtaacccatcgtggtgcccaggtagacatccttgcagttctgcacgatggtgtcgccggcggcgaagtactcatcccatgtggtcggaatcttgttcggatcaaggccgcacttctgcatcagctcggtgttccagtaggtcgggccatcgttgacataccacggcaggccgtaggcacccttctcgatgccattgccctgcatggtcacggacttccatgcgccttcgtagtagtccttttccgcatccggagcctgcttggagacatcgagcagcgcgccggccttggcaagaccgtacaggatggagttgccgccgtcgacgatgtccggcagttcgccggccgcagcctggctggacagcttgtcttcgtaaccatcggacggggcgtcaagccacttgacggtgacgtccgggtggtccttctcataggccttgatcagcgcctcgaaatacggggtgtacttgtcgttcttgaggttccaggtctggaaggagatctccttcttgccgccgtcatcccccgcagttccgctaccacaggcagccaccgatacgagcatcgcaccggcaccggcgatggcgaggatcttcttcatagaaaacatgatgttttcctttccttttgattcctttttcatcccgccctgctgtggacggagaaacctaatcgttgtgctccagcacagtcacccgtcgcggtgattgacgtggtatcacaacctttattcagttctcatcgctgagactaaaccgttttagcttccggccagtcgcgaacctgttaactaaatcggtttagtaaaaacataacacaatcgaaacatgcacgcaacgaattcatcgtcgcgtgtcgcattgatatttgcccaacgggatcgctctccctcttctcatacaataatgggccgcgcccaaccgtatggcagagccggtctgttccggttccgttacggttgggcgcgacccaaaatatcgagcctaggcccaatatcccttatcggcgaatacgcagcgtggcgagctggaatggcgccaacgaaacgaccgcaccgtcggcaggcattggttcgtcaccggcgagcgcgcgcggcagttcggcatccagctccggctcctccatgagattcacctcctgcacgctggccttggcatcggagagagcggcgtcaaggcgcagtgtggccgtggcattgccgccggcggcctcgtacaggcgcacgatcagatcgctggaaccgtcatcggcgagcttgatccagtccaatacgatgacgccggtggcgtcggcgagcgagaccagcggcgccatatcaggcaactcccctattacggggctgttaagtcgcgccgcttcgtccagcaccgcattcatatcggcgtcagcgaccagagaccacgcgaaggagtgtgcgccttggtcggtgcgtgggtcggggtacagcggtgcggacagcagcgagagccgcaccatggtgccgcggccggtgccatgtgccgcatcggcgtggatggggctgacgtcggagccgtaggtggaggcgttgaccacagcggcggcatagtcggcgtcggcgatccgcacgaagcggtgcgtgcagctttcgaatttggcatcatcgctgcgcgtgttcttgttgatggggcgttcgaccagaccgtattggcattcgtattgcgcgttcaccgcttgcacggtgaccggcatatccactttgaggaactgttcgacggcatgccagtccacatcggcggtgaagtccagtgtggcggagcccggccttaaggcaatgcccgtacgaatttcaacgcccttcgcgcgagtgacagcatgcacgacggccccaccgttggcggtttcgtccacgcttgcaatcgatgcctcgctgagcgcgttggcggtgaggaacgcatcgcgttgaatatcccaggcgtcccagtggaagggttcgtctttgagcatttcgtagcggcccagtcgggtgccggcgggcaccagttcacgattggttcgctgatcgacgattgacgaaacggtgccgtcggcttcaatgcgcacgtgcagtcggccgttgtcgagcacaatcgtatcgccgtcatgggtaacggcgacccgagccatggatgcggttcccgcttcggctcggctcgaagccgggcgtaccacccacgtctcacaggcttggcgggaatatggggcgattacggcgtcggttatggttgcgtcatcgggttccacggctgcgatcgcgcgcccggcttcaagggcgatctcgttcagccgagcgatgtcacgcgcgtattcggtccgcgcctgacggtgtacccatgcgatggccgaaccgggcagaatgtcgtggaactggttcaggagcagcgttttccaaatacggtccagctcttcgcgcggatagacatagtccgggttcttgatgcgggccgcggcgcacaggtattcggtgacgcgcagcatcgactcctcctggcggca

SEQ ID NO: 1656 - DNA, 15587 bp, Unknown
  R221_24m  MAG No. k141_120369
acatctccgcctacgcactgaccgtggagccgaccacgaaaatgggccgtcagattgccgccggcacgttgcccaaacccaatgacgatgacgaggccgctaaatacgagatcgctgacgacctgttcgccgccgccggtctcgaatggtatgaggtctccaactgggcccgccccggatacgagagccagcacaacctcggctattggcgcaacgtcgattgggccggtctagggccaggtgcccactcccactacaacgcggtgaccgaggctgaccacccccagtcggcttcgctgacagcccccgccagcgggggcaagtccgaagccattgcctctgcctcagctgatggacaggccaacgccgaacttggagaaaccaacgccgaactaggtatgatcaacgcgcatgggaacaactcccaagaaattcatgcccccgctggcgggggctgtccggcggatgccggactgggggtggtttctgtctcacacggtctgcgcagctgggacatcgcgcacccgcgtttgtggggcacggccatcaacgagaaccgtgtgccgtgggccgatagcgagacgatcactcccgaggaaaacctcgaagagctcatcatgctcgggctgcgcctgcacgagggccttggcctcgaccgcatcaaccgcgccatcaacgatgcaggtatgagcagcacgccccagactctccgaaccgtttcggttgaccaactcgcccccatgatcagcgaaggcctgattaccgtatccgataatcatcgagtggtgcccactcgtcgtggccggttgctcaatgactcggtaatcgaacagttcttcgattacgtcggtgtatgagtcggtggtatggtgcgcggcagtcgccattacccgttcgctagttgtggttacaccgtcagagggagcttttttgttttaccggcgggggagggaaccgcgtaggactacgtccggggcgctttgcacgtagatcaggcggttggcagtgccgccggtggcctccgcgtcatcgcggttggacaggatgctgtccacggcggcctggcccatttcggccagcggcagatgcacggtggtcagtggtgggaacacgtcggcggagtaggggatgtcgccgaaaccggtgacgccgatttcctgacccggctcgatgccgttggtgcgcaacgcggtcatcgcaccgatggccatcacgtcgttgagcgcgatgattgaatcgatgcctttgccgtcgtacagtgcgccttcgcccggcttcagcagtccggatcgggccatttgcatgacggccgcatagccgtcggtgcggctgaacttaccgtttgccacggctttcgggtccacggtgatgcctgtctcgtccaacacttccatcacaccggccagtcgttctttggaggagcggtgtgcgtcatcgcccttgagaatcgcagggcgcgtatacccggaatcgacgataagctttgcgatggcacgcgcgccgacgtcgttcgccacgtccacggccgggaagggcaggttgcggttgagtacgaacacggcatgtccgccggacgattcgtactggatgagttccgtctgcaacgcctggcgttccggcgcgtcggtgtattcgctttcggagatgatgatgccgcgcggcctggtggatacggacttacgcaccgcctccaactcctcgtgcggggtggctgccacgccgatggtcacggagatgccgcgttcggccgccgccttgaccacgccttgcgacacggatgcgaagtagggatcggagatatcggagaccagcagcacgatgttcggtgcagtgcctttggccactgcctgagcataggcgttgggacgatagttgagcttggtggctgcttccatcaccttgacatacgattggttgcgtaccttgcgggtgctgccgttgagcacacgggatgcggtggcgatggagacctgggcttctttggcgacgtccatcaatgtcgctggcgattgcgccttatcgttctgtacggccacgatcgaatcggtccttttcttccctgaaacggaaaacatgtctaaacgcttaccgcaatgataccgcagttttgcttgcaatagtagcattgtggattggaaagcctgaattttgaacaaaaataatcacgcgaattacggaaagcgcttaccgttccgcgtgtcgtgcggtatgctcgaagcatgacgcgatacttatgtgcccctgactccttcaaagagagcctgaccgccatggaggcggcccgggcgatggctcaggggattgagaatgccgaccacgatgccgaggtccgttgcctccccatggccgacggcggtgaaggcaccgcacgtgcgcttgtcgacgccactggcggatcgatgcacgccgtgccggtccacgacccgctcggccgacctgtcgaaggccacttcggcctgctcgccgacggcacgaccgccgtggtcgagacagccgaagccagcggcctcgcactgcttgaagccaaaaaacgcaacccgttgattgcctcctcctacggcaccggcgaactcatactcgccgccgtccgttccggagccaagcgcatcatcgtcgggctcggcggcagcgccaccaacgacgccggtgccggacttctgcaggccctcggcgttcgtcttctggacgggaacggcaacgaccttaagcacgggggagcggccctcgctgatctggccaccatcgacatcagcacgatggacccggctctcaagaacgtctccatcaccgccgcctgcgacgtgaccaacccgctgaccggtcccaccggcgccagcgccgtgttcggaccgcagaaaggtgcctcccaggccgacgtcgccacactggacgccgcgttggcgcacttcgcgcaggtcatcgaaagccggctcggcgtcgctgtgaacgacgtgccgggcgcgggcgccgccggcggtatcggcgccgcgctgaaaggcttccttgacgccgaattccgtccgggcatcgccatcgtcatcgaacaatccggacttgatgcggccgcgcaatgggctgacgtggtgttcaccggcgaaggctccatcgacttccagaccaagttcggcaaaaccccggccggcgtggccgaaaccgccaagcgccacggcaagcccgtgatcgccgtcgccggacacatcggcacgggcatcgacgaactgcatgaggtcggcatcgacgcggtattcggcatcgcccccggtgccgccagcctcagcgaactgctggccgacgcggccgccaacgtgacccgcaccaccgaacaagtcgtacgaaccctacaactgaagcagcttcacaagctccctctgatgggccgagccgtgaaggaaacgccggaggcgtttccaggcgagggcttgacgacagtcaagccagccgaaggctccataattgcgggacgagctgccgcggcaaagccgtgactgagggggagacttgtggcgcagccgcaaaaaatggcatcggctttcagccgatacagtcattcgtctgcttctctccctcagtcagctgcgctgacagctccctcgtcagagggagccacacaattcggaaaggaagatatgcgcaccatgctgtacaccaaggtgaccagcatgctgagcaccacgggcatcgccagcgagagatacgccttcggaatcggcgccttttcgaagagttcgttatccatttccgtcccttggtgttttcgtccttcagtcactgcgcgggatgccgttcggcgtgcatcacaggcattgtagaggcaacagtgtggacaacgggcgggggagtatctcatgatgcggtgagggcgttgatgatgacgcatcgtgtattggtggccgtgtgcatcgtatgtgaacctgtgctggcacggcgtacacacgatgggaaaagaaagaatatatggaccccgttgtcccggttattgttcagttattactgtgttgaattattgcgttattcaattattgtggtgtgccggccgattgcggcctgcgggggattgccttcgtatgtgtcgtgcaatctcatgaatgggatcgttcgctagattcagcgagcgtccttgttggcggcgttgatgatgtcggcgaacatcttggagtcggcatagccggcgcgggcgatggcgtccataccggagagggtgaaaccgcgaatcatggaatccatgaatgacataatgtgttccttgtcttgacttacaaagccgtgggctttgcgatgtgttgttgtttacgttatgagacgggccgtgtgtgagcggcgagtcagggaagaggctcagcgagcgttcttatcggtgtcgttgatgatgtcgagaatcatctgggagttggcgtgaccggactgggccagggaagtggcaccgtacatagccagaccgcgaatcatggaatccttgagagacatcatgtttcctttcgttggtcaaaaccttgtggctttgagttttgtttatcggtttctttctgaaaccggtttcagaataacgcagtccgatgacaaacgcaaggggactattccgctctcggcgtttctggcggaatatcgccgttctatagataccgttcggtagttaagaggctgtctagtcgactttctgacggtcttgttctgggcgcatggttttcacgaaatggcctcatgtcgcggaaatcgtacgctgagtcgtcgtaagcgtacggtcttcacgaaatggggtctcatctcgtgaagaacgtacactgagtcgttctgggcgtacggttttcacgaaatggggcctatcttcaccggattttgggcacaccggccttgagcagcttggtctcaagattgatggggcgtagcagatcctcatagaacacatggacgatttcggtgacgccctgttcccggagatgccgatcacgtctgcggtcgtactccattttcgcctggaggcttgcgcgattcttgttgctggtgtcggcgtatttggccatgccgtcgtattctgccacgatgatgcggccgtctgcgagcttccaacagaaatcgacgcgatatggcattgcgggattgtcgggattcatgaactgcacctgcagcaggggaatgccgaaagacaattcggtgatctggccacgcatcaatgattcgccgccgttttcgctcaggggatccgcgtacttcagcagcttggtcacggagacctcgtcgcagacgctttgaatcatcagcgactgcacctcttcgatggtcgtcagggactttctcagagccgaatcgtatatgggcagcgcctgtgggaatgggaatgccgcgcagtcgagcagcgttcgcgccggagtcgtcaagagaatgccattatgcttccgcgtcggaatccgattgatatagatgcggttgagacgcgcctcgtctccgccgccgatgccggacttcgaggcgatgtgcactgtgccgtcgtgcagggaatagttgtgctgcagtccgtatacgcacgccgcactcaaccccgcaaatacccactgagggtggattgcggacagcgcacgtatgacctgcaatgactgttgctctctggtcatggtgttccaaagtattcggtcggcgtacaggttcttatacggtgacaccagctccccggcatgcaggcgacgtttcagggcgcgccgttgcgcatcactggtgccatagcagcagcgacgctcctgcttcgcctgctgcagcagcgcagaaacttccttgtgttctttcatatctcgacgctaagggtgattttgattgttgcacaagctcaaccggcaaatgtgaatactatgtcacgcgaattgttggtgtggataacttgaatcgacgtcgacggctttgccgacggtcttgtcggaggcgatattagcctaggacaccttgctgcgccgccttccataccgagaacagtcatcagtgacaccgagggcatcttcagcgtatgttcttcacgaaatcagctgccatttcgtgaaaaccgtacgctcagaatgactcagtgtacgttcttcacgagatgaggccccatttcgtgaaaaccgtacgttgacgacgattcagtgtacgttcttcacgaaattagggatgatttcgcggaaaccgtacactcaccgcaactcagcgtacggttttcgcgaagttattgatttggatataggttccccgtcatgaactacaatgaatcgcggcgaaaaacggggaaccgaagtcggagcgcggctgaacggatatgggtgtgactggatgactgccatggtgatgccggttctccttgacgtacgcaataacaacaactgacaacaacaggggagacaaggatggcgagaagtgcgggccgcacccgaccggtgatcaaggacgtggccagactggccggagtctcggcaccgaccgtctcccggtatctcaacggcaccgtcaatgtcaccgaagacaagcgtgaacgcatcgccaaggccatcaaggagctgggctatgagccgagcattgtggcgcgcgccctgtcgaaccgggagatggactccgtggtggtgttcgcggccaatccttccgccttctccacgtccgaaacgaaccatggggtcgaggccgccgcccgtaaacgtcggttcctgctcaatatcgtttctttggatgagtccgacatggactccgtcaaggctcgtgtgcgcatgggtttgtcgatcaggccggcgggcgtgatcgtctacgagtacgaccgggccggcatcgccgcactggaatacattcccaaagatatgccgatggtcgtggtgggtggcagcttcggcgacggcgaataccagatcatcaacgccgaaagggatggtggccgttggatgaccatgcatctgctggatctcggccatcgcaccgtgttccatgtggggcgcccggaaggaccgaccgataacacccgcaccaatgggtggcgtgacgcgctcaaggagcgcggcgtcacggtacctgacccaatcatcgtgcccgacgatgatttggaggagtcggtcaaggctgggcgcaccttgggccgtcgtggtgatgtgactgcgattttcgccggcaacgacgagaccgccatcgctgtgatccgaggtctaagggaggttggtcgccgcgtgcctgctgacgtgagcgtcgtaggctttgacgaccgcaacttcggtgccatgtggaatccggcgctgaccagttacacccagaacttcctggacatgggggagcggtccttccggatgctgttcgaacagattcaggccaagcgtgccggcgatgacgcgccgccctcgcaggtcgaagtggtgcaaggcaagccgtgtctgcgtgcctccgaacgcgcgtacggcgacggcgaaatcgcgtagtcgatggggcgtgcgtatcaatcgatagtgactgtagcgcattcatatcgtgacgaggagtctcccatgccgaactgtaagcgcttaccttaaatagttcataatgtgatttacgtcatactaatagatgttctgaatcatagtgttctgtaaggattccttgcggaaaatggctatttatcaacagttttcgaaaagtccgcatgatgggcgactgtgagcacgctttatggtaatcgctttccgtagtgttattgttacagtgtgacttttgaacaatcggtaactctgaagactcagccccagacctcgggcactatctcagcggcagacgccgcgatgcaatcggcccgcgacgaacgcatccccggcaaactcatctgcgcgatcgtggcccattcttcggcatcctgaccgaaaccgtgatgaatgtgctgttcccgcagctgatgggcgtgttccacatcagcgaggccaccatccaatggctcaccaccggctatctgctggtcgtgtcgattactgtgccgctcagcgcatggctgcgccgtcgcttccgccagcgcagcatcttcctggcggcaacgcgatgttctccacgctgcagcagttcacgggtgcggccggcaccactgtggtgggctaccgtgatctccgtgttccagtccggctcgggcaaggtgggttccgccgactatgccgccgccaccgtgaccggcgcatagattgactacgcgatcatggctgtggtcatcgttatcgttatcgttatcgtgttcgtcgccatgctccacgccctgcgtaaccggaagtagatggtaagtcgagtggcaccatgctaccgcgcaacggctgggcatggagttttggctaggaatcgttcgacaggcgttggcgcggccgctgagagcattcgcgtcgaaaggtttgccggagctcgttcggcgtggaatgggccgattcaccggtgattgttggtcaaacagccaatgctgacccttctgccaatggttagcgaggttcctatcataagcatttcggagagcgatctcgaaaaaggcgacatccttcacgaggatttgaccaaggtcaacattccactcgtataaagtaaggctgtaagcgcatcttggtggcaagcgtcaaggtatgtacggaatcgcggggcggaaagccactcctcaatccactgcggattggtaataacggatgattgtaacgcatgaatcacgaggcccccttacctcgtattgcaatgccccggtgacatgaaaaacggcggtcaacacggggcttgtacattaaggatacaggaagggtagttataagttgctgatatgccgtgttttttacgatagtcatcggcctctcccatacggcggaacaggaactgacggatgccgagatgccgtgattcggcgggaggacctgtactggcccagtccttctgctcggtagcggtaccgctacgccgactcttcccgacgctccagtgccgccgatatcagtgaatgcccagcctgatgtcggtagagttaaggctattggcttggtctcgacggtgagacttctccgatggccaatatgcactgttgcaaaggagtatgcggtatgcaaccaatcaaagccattcaatacggctgcggcaaaatggcgaagtacacgattcgctatatgcacgagaaaggcattcaaatcgtcggtgccatcgacgtgaatccggaagtcgtgggcatggatgccggtgtgtttgcaggcatcggccccatcaatgtgccgattcgcgccgatgccgaggctgtactcaacgagtgcgacgcggatatcgcggtagtcacgctattcagcttcgagaacgaaatcgccaccatgtgcgagcagtgcttggcccgcggcatcagcgtgatcaccacctgcgaggaatgcatctacccgtggaccaccgatccggccaccacgaaccgtctcgacatcatcgccaaggaagccggtgccaccatggtcggctccggcatgcaggacatctactgggtgaacatggtctccaccgtcgccgccggatgccacagcatcaagaagatcaccggtgcggtgagctacaacgtcgaggattacggcctggctttggccaaagcgcacggctgcggtctgaccgccgaggagttcgaggccgagcttgcgcatcccgaaaccgtggtgccctcgtatgtatggaattccaatgaagcgctggcccagaagcttgggcttaccatcgcatcgcagacccaggccagtgtgccgtatttcagcgatgtcgacgtgtattccgagacgatggacgagacgattccggtcggcaaatgcatcggcatgtccgccgtggtaaccaccgaaacgaatcagggcatcacgttggaaactgcctgtatcggcaaggtgtacgggccggatgatggcgatatgtgcgattggaagatcgagggtgaaccggacgtggagttccacgtggtcaagccggcgaccgtcgaacatacgtgcgccacaatcgtcaaccgcattccggacgtgctcaacgcgccagccggatatgtgacggtcgatcagctcgatgaaatttcatatctcacgtatcccgccgcgctgtacgtggcatagacccatattttcagggatgaaggccggcactcataagggtgccggccggtatcaggcggccagagtcgacgtgcgtggcatcacctggaactggatatggtcatgggtgatgtcatcgggccgttcatgccgtaggttcgactcgatcagcgtcaccatgcgatcgataaccgtacgagccattgcggggacgtctatcgccacagtgctaatgggtgggttggcgcagtcggagaaggggaggccgtcgaatcccatgagccgtacgtcgtcgggcacgcggatgccatgttcggtgagttcgcggagcgcgccgatcgctatggtgtcagacatgcacaggatgccacaatcgcccggggcaggcgtcaggaccgcaagcagcatcctgctcggcatcggcggcgacatcgccaacttcaaaagcgcggcccacctggccgcccacgccggcatcgctccggtcaccggccagtccggcaccagcatcaagggcgagaaaccctccagacggggcaacaaacgcttatagactttgcgccttgtataaatgcgaactgccagtcaaccttaccgttgactggcagttcgcatttatcgctcccgctggcgggagctgtcatgcgaagcatgactgagggtggtccacagccgccaatccgtaacatcacccaacgcagcatttcacgatacggacgtttccgtatcgtattttcgtgtggccaaatagacatttcgggcgaaaaagttcgaaatacccccataactggccataaaaacaattgcttgagaatcactattgacttttatggcgactcggtatatggacacgcgaaacgaaaatgacatggagcaacggtactgtgtcaacagcaatgaacgaagaggcacgattcccttacgtgcccacaagcaattgaggtgattccggtgacattcaaagccccgctcgatctcacggtccacgctccggacggtatgtatgatcccgccaacgagcatgacgcctgtggtgtgggtatggtcaccactttgaacaagcgtcctgaacgcaaaatcgtcactgacgccattgaggtactggtcaatctcgaccaccgcggtgccgtgggtgccgaggagaacacaggtgacggcgccggcattctgatgagcatgccggatgagttcatgcgtgccaccgtgcccgccgaactgcccgaagccggccactacgccgcaggcatcgccttcctcgaccgcgacatcgaaacctccggtcagcaggaacaggccatcgccaagatcgtgcgcgaggagggccttgaagttctcgcatggcgcgtggtgcccaccaacccggacggcctcggcctgcaggcccttgccgccatgccgggattcaagactctcgtggtcgcctctccggacggtgctctggccggcgtggacttggatcgcaagaccttccgcatccgcaagcgcgtcgagcatgaggtaggcgtctacttcgcttccctgtccgcccgtaccatcacgtacaagggcatgctcaccaccatgcagctcacccacttcttcgaggatctgaacgacgagcgcatgaaggccaccatcgccatcgtccactcccgcttctccaccaacaccttcccgagctggccgctggcccagccgttccgtctgctggcccacaatggcgagatcaacaccattcagggcaaccgcaactggctctccgcccgtgaaggtcgtctgagcagcgaactgctcggcgagttcgagccgctgctgcccatcaccactccgggctactccgattctggcaccttcgacgagtgcctcgaactgctgcacctcgccggccgttccctgccgcacgccatctgcatgatgctgccgccggcttgggagaagaacccggatctcgatccggacgtgcgcgccttctacgagtacaacaacacgcttatcgagccgtgggatggcccggccgacatcgtcttcaccgacggcacccaggtcggcgccctgctcgaccgcaacggcttccgccccggccgctggcagctcaccgacgacggctacatcgtgctggcctccgaggccggcgttctgccggagatcgcgcaggagcacatcgtgtccaagggccgtcttgagcccggcaagatgttcctggtcgacaccgccgaaggccgcatcatccccgatgaagagatcaagaagaccctcgcctcccagcacccgtaccgcaagtgggtggaaggcaactcggtcgagatgagcgatctgccccgccgcgagcacgtgagccactccggacagtccgtccagcgccgtcagcgcgccttcggctacaccgaagaggatctgaagctgttgctcactccgatggccaacaccggtaaggaaccgctgggatccatgggtaacgatgcgcctatgcccgcactctccagccgcagccgcatgctgttcgactacttcacccagaagttcgcgcaggtcaccaacccgccgctggactgggagcgtgaggagatcgtcacctcgctcgaatccgccatcggccccgagcctaacctactggccgattccgagctgcacgccaagaagatcctcatcccgctgcccgtggtcaactctgatgagatggcccagctcaagcgccttgacaaggcccgcatcctcggcggctactatcgcccgtacgtggtcaagggcctctaccaggtcgccggcggcggcaaggccctcgaagagcgacttgacgagatctttgccgaaatcgacgaggccatcgccgacggcaagaacttcatcgtgctctccgaccgtgaatccaaccacacgtggggcccgatcccgtccctgctgctgacctccgccgtgcagcaccacctgctgcgccgccacacccgtacgcagatctccatggccgtcgaggccggcgacgtgcgcgagattcaccacgtcgcactgctgatcgcttatggtgccgcctgcgtgaacccgtacctggccttcgaatccgttgaggatttggcccgtaacggctacctcaaggtcgacgcggacaccgccgtgaagaacctcaccaaggcgctttccaccggtgtgctcaagatcatgtccaagatgggcgtctccaccatcatgagctaccgtggcgcacagctgttcgaggctgtgggcctgagccaggaagtcatcgacgaatacttcaccggcaccacctcccgtgtgggtggcgtgggccttgacgagatcgccgaagaagtggccatccgtcaccgcgtggcctacccgaaccagtggagcgcatccccgcaccgcaacctgcgcacgggcggcgactacaagtggcgtcgtaccggcgaggaccacctcaacgatcccgaggccatcttcctgctccagcagtcgacccaccgtggcgactaccagatgttcaagaagtattcgcaccacatcaacgacacgtcgaaccgactcatgaccctgcgtggcctgatgaagttcaacaacaaccgcaagccaatcgacatctccgaagtcgagccggcctccgagatcgtcaagcgcttctccaccggtgccatgagctacggttccatctcacaggaagcgcacgagacgcttgccatcgccatgaattcgattggcgcacgctccaactccggtgagggcggcgaatccgacgatcgtatcaacgacccgcagcgctacagccgcatcaagcagatcgcgtccgctcgcttcggcgtgacctccgattacctcgtgcacgccaccgacctgcagatcaagctcgcccagggcgccaagcccggtgaaggtggccacctgcccggtgccaaggtcccgccgtggatcgccaaggtccgtcacgccaccccgggtgtggagcttatctccccgccgccgcaccacgacatctactccatcgaggatctgaagcagctgatcaacgatgcgaagatggccaacccgaaggcacgtatccacgtcaagctcgtttccgagttcggcgtcggcaccatcgcggccggtgtggccaagtgccatgccgacgtggtgcttatctccggctatgacggcggtacgggtgcagccccgctcaacgccatcaagcacgccggcaccccgtgggagatcggcctgtccgaaacccagcagacgctgatcctgaacggcctgcgctcccgcatcgtcgtacagtgcgacggcgagctcaagaccggtcgtgacgtggtcatcgccgccctgcttggtgccgaggaattcggcttcgctactgcggccctgatcgtggaaggctgcgtcatgatgcgcgcctgccagaagaacacctgcccgcagggcattgccacccaggatcctgagctgcgtgcccgctttaagggcaagcccgagtacgtggtcaacttcttcatgttcatcgctgaggaggtgcgcgagatcctcgcccagctcggcttcaggactcttgaggaggccatcggccacgttgagtgtttggatcaggacgaggccatcaagcgctggaagtccggcggcatcgacctgaccaacgtgctcaagcaggccggcccggtacccggcacgatcctgcaccagaccatcgagcagaaccacgagctggagaaggcactggacaacaagctcatcgaacttgcccagccggccctcgaacacaaggaacccgtgcgcatcgaaatgccgattcgcaacgtcaaccgtacggtcggcaccatggtcggctacgagatcacccgccgttacggcgaggaaggtctgccggacgacaccatcgacatgaccctgcacggttccggaggccagtccatcggtgcgttcatcccgcgcggcgagaccatgcgcatctacggcgaagtcaacgactacgccggcaagggcctgtccggcggtcgcatgatcgtgcgcccggaagacaacgtcaccttcgacaagcacagtaacgtcatcgccggcaatgtcaccggtttcggcgccacgtccggccagatgttcgtggccggtcgcgccggcgaacgtttcggcgttcgtaacggcggtgccacgttcgtcgtcgaaggcgtgggcgaccacggttgcgagtacatgaccggcggcactgttgtggtgctcggccccaccggacgcaatttcggtgcaggcttctccggtggtaacacttatgtgcttgacctcgatatgaagaaggtcaacccgagtgccatcaagtccggtgcactgctcttcaagtcgcttgatgccgaaacctccaagctggtgtacgcactggtcaagcagcatgccgaagagaccggttcccagttcgccgcggccctgctggaggactggaacgaaaccgtcaagcggttcactcacgtggtgccgaagcagttcgtggccatgacgaaggccatggaagaagccaaggccaacaatgtagatttcaatgcgcccggcgcctgggaaaaggtgtacgagcaggttatggaaggagcgcgctgacatgggcgacccgagaggattcctgaaggtccgtac

SEQ ID NO: 1657 - DNA, 9786 bp, Unknown
  R221_24m  MAG No. k141_122401
actggcgtacaggtcccactgccatgcgtcgccacgatttcaatccacgcaccccagtggggtgcgacgttcgctttccgccgccatgatcgcttccgaagaaatttcaatccacgcaccccagtggggtgcgaccgttttcctccttgccccacgcgcaatccagagtatttcaatccacgcaccccagtggggtgcgacgaccgtggacgcaaccatcaccccaattctcagatttcaatccacgcaccccagtggggtgcgaccgcgagaatgggcatagcattccataatatggaagctccgtctgttctcaaaactgattttatcgcgaaaatccatgtacatcgctcaatacacaaattctcgaaccaaaaacatcaacagaccatccacttttgagttatcaaacgacgaggagaacataatcagtctccaagcattcattaatctcagtgcgaaagaacaagtatttcatgagaactcagagttcgcgctggtcacatggctgcagcatcaagcatcgatgctcagccacgattttaatcgtatcgtcctatactgtcctacctcgttttatccaccttggtcttcatcacagtaaggttttgcattgcccagtcatcatggaaaaccgtcacacgaaccgacattagagcatcatcacgtcatcgattggcaggtgccgctgtcttccgcgatgctcaatcttcgaagaatacttcgcccctaaattgtagtaacgcaggctatcttgcgattcgtccattatttccgccaaatcatgtttcaaaatcagatagtcagacggtgacaccgaacattcaaagacgctattctgcacgcgttggccgtatttcatgcaggttttagccacgttccgtagtctgcgtttgccttcaggcgactccgtattgacgtcataggccacgacaaccatcattccaacacctcatcccggtttccatctctagttggctcaaactccaatgcccctcggcaagaccaaagtaccctcccaagaagaactacttccacatgaacggcgggtaagcgtccaaatcgccgcgaatcgcacggttgagcagcaacgcctgtgcatggggcaccaatccccacggtatcttctcgttgaagaacgggtgggtgattgtctcctgcttgcgtttctgccaagcagcaagcacggttttgcgcccgccctcggaaagaaacacgccgccattctctcggatctcgaactgggaaggcttgaccgctccagtgttgatgagcgtcagcacgaaacggtcggcgatagccggacggaattcttcaaccagatccaaggccagggaagcacgtcccggtcggtcagtgtgcaggaatcccacatagggatcgagcccgactccctgcaaggcagcgatgcaatcgctggtcagaatcgagtacacgaatgacatcaacgcattcgtccgatccaatggcggtctgcggctacgctgctggaagaagaaatcgtccttgttgcgcagaatcaagtcgtcgaaagcgaagaaatagtctttggctgccagcccttccacgccgcgcagctcatcgatggacgtgcagtcgcgcgcgttcagcagagcctgccgcagtttctcgctttgctccgcgatacgctcgctgttgacgcgcagcgcatggtcgcgcttggtccgctcaagaacccaacggcagttgtagatctttcctataatgaacgactgcgcaaaaggcagggccgcgtcttcgtcgtccgcgaaacggaactgctcgcgacgaagtagtacgtttcgattcttctcaccaagtatcgagcagtagtaacggccgtgtggagagaagaacgaaaggccgacgccaaattccgaacacttgcccatcaacgccggcgacgagcccttataagaaaaactcatgatgccttctagggagcgcagtggaatcctcccgagcgtggtatctccttgctggacaatgacattgtcgttcttcaacgataggtaagcgtcatcgctggtgacatacagtgtgttaagtaactgcttcatatgtggtctgacttctccccgatttccacttccccacgcacggcttcctcaatgaactgtctcgccgaacgcgtcctgaccagtttcggtagacagacatcgtgcagggagcacgcccgacaggccttcgacggtctgaccttcggcgtatgacctcgagcgaataagtcgtgcatctcccccgtcatcgtgacgattcgattgcgcaaagattcgtcaaaactgacccgctcccggtgtctggtctgttggtagaacaaagcgccttctggaatcgcacaggccagcatctcctccagacacatggcctccgcgcaaagttgaaggcgatccgcatccgtctgcttgggcgcaccatgtttgtattccacggggtaaggaagccaagtgccggatcgtccatgcaacggtacgccagcctccgattgccggaactcgaccacatcacacgcaccggtaattcccaaccgccgcgaaaacacacgcagatcacgcataatcagcaagctgccgcgcgtttccgattcactgtaatcgtgggccctatcgtgttcaagagaaccagccgtcgtgagatagttatcctcccactgctgctcgatatgaattaaagcccactgccgcctgcaaaacgcaaaatgctgaaggccagaaagagccagccaatcatcctctggataatccgattgtgcatgcatacgcttcctctcgcaaacaattcgtgcaattggttttttgatgcgcgtaaatgaaggccagggcttgctgaatgccaaccccggcctgagtggagaatcacagtgtatgatcgaccatttcacttacgttgacggagtctggaatggtctcacggttcacatggacttcataatcaccaaagctgcgagcaacgtccaccccatcgcgcttatgaacgtcgatactgtcaaaaagtttccacgaaggagcgtcaccaagtgcgctactgtgtttgaatacgtacagtttacgaaccgccatattgccgcgtgccgcagaacgatcgaactcgaacatgttcagaattgctcgccatagcatgtcaagatcttcattgcagaaaccggtgacgttctgtgcgagcttggcagaaatgtagccgttcatgcgatacaggccatagggaatgatgaatttgttgcccatggtgttgttcttgtcggcggcatctgcctccgtggtgactgcgatgcgggtgatggaaatttcttggacattaaccggatcaatggaacgggcaaacccgagctgcactggaccccgtacctgaccgcatgacaggctgcctttgacgaatgtggtcatcactgcaccgaaagttcggatatcgaagaattggctgcacatataatctcgtagacgcaaatccaatgtggggtcagatttcttcaatgtcttaatttccttggcaaaatctttgctctctggacgagcatcgatatgctccgcttccaatgcctcactatccagacggttgagcgtctgcctgttctggatgtagattcgccaaggggcctgctcgcccatggccgtctgcacatagtcgcgaatcttacgcttgatgcacacatccgtcgtcaggccattaccggtttcaatgtcgactcgaggcatgttgccggagtccgggtcgccgttgggattaccgtccttcacatcaaagaggatagtgaaatcataacggttctcgatgggtttacggtcagtcattgttctctccctgttcgctgttgttcttgttggctttgtcgaatcgtttctgattttcgaaataatatccgagttggaatgcgccgcgttcctccagggaaagacgggagggataacggtcccccactctcccggtcagctcgcccagggccttgtccaacttgactttcagccccttcgacttccaggctttccgcatgtgcttcgccgcgagatctcccagaatcgggaagatgcgggccggagtcgtggatgcactggtgaaatacttgtccttgatcgtggtattgatgtcgggtatggcggccaactgaatctgctcgtagatggagaacatgcggccgagcacatacggcaggtagccgttctcttcattgatgtccatccgtagcacctccttgaattgtgcattggttgttgcgcgtaggtaatacgctttgatgatcgccgccttatccggcgagacatcatgttcggcattgatccgacgctccaccgcgttgatcagagtcatcggatacggcgtgtcttcaagtatcgctttcatgacggcacccgccatttgcggtgacactttcgcggttttgctttgtgttcgtatggtctgattcaacaatctccatgtaggcagggaggtcgtcgaatcgtagacggggcgccggatggcggtatctcgataatgccgatcgatgttgcgcgcgaacgccccgaacgtatcggtcagatagaaccgaaccgaaagacgtgccgcattgggggacagcgcgagaatatggaattgttcatccgggctgaggtgaattccctcgtagtcgtaaggttttccctgcgccagcgcacgcgtggcatccacgaccactttttcactcagtccgccggattgccccatgtactgatcccacacgtcacgatatgcgttatcgccacaattggcccatgatacgatggtatcgcctccaatgcgttggacccgatcacggtcggcgagcagggtgttcaacgccgtcgtatattcataggcctcccgcttgctcatcggagcgttctcattttgctcggcgccatgcgagcagaatgccggggcattgaatgatatcaatgacgcacctgatgattgggctcccgcgacacctttgattttgggatggaccttttccggaacgatgcgttcgccggaaaccaggcttgagaccagtgccgattcatcggcatcgtcctcccgcccgtaataggcatcccaggcctcttgtatgctcggaagctctccgatgaatattgtccgctccccatcgtcatattccaggacgaagttcatcgtcgctgacgacttccatgcctcgtcccccataagtcgttgggcggtctgccattgcggcgccttcgagaagaaggcgcatacggcggaggcggcacgatccttgacgccatcgagtatgcgtcgatgcaattcgccgcacgcttggaacgcctgcgccgaacgtttggcgttccctttggtgtcgcagccgagcaggtacgtgacgttgtcgcagaggaagttcgccacaatccctgatgaacgaggaaaacgagccggcaccggaatgatgttgacgggcttcttcccgctgaagtcccccaatggtcgaactctgatcaaggtaccatcatcgacgatgaccaacccgtatgaagcattgacgttgtcatacccataggccggagctttattctgagacaccaggacggcgtactcatcgcacaaatcgccgatgatcatgatctgacctccacggattcgacgtccaacacgccatcatccagttcggcgcggaagaacaacggggcgggatgagccggattgcgataatcaaagtcgtacaacatgtagcctaggtcccgatgcccatgttcgaaaccgacgggatcgccggattcctgccataactggaattccacggggaattccctcgtaccgaagtacgggtgatggaagcattgtcccttggccgcacgccgcatgaacatgctctggaatttctccgctgaatccgtagatgacattttcgcccggttgagttcgaaatgagcgtctatcacatatcggacgtcacgcaggatagtggacgagcgttgttggatggattcagcggtatatatggcgccgccatccccacgtccttccgccatcgttcgtattttgccgatattgatgacgctatcgacctcattgcggcgtatgctgtcgaatcggataggattgagcacgtgaatcctgtcgatccgccagcgcatgcccggatgccagaatatggcttccagtattccgcgcgccgcggatggcgtcatgacgtcataggtgacgcgctccgttttgaattcgcttctcgagaaaagggcgttttcaccccatacttccaagcgtattgacatcttccctcctttcatcgaggtgtcttcgtcgttgacgactccaacataccacatcattaagatagagacgaataagaacactccaataaatacagatcctaagctggtatcatggtgagggcgttccacacgccgtcgaagagaggcaccgcgtattcgttgacgcatacggtcgctcccccttagggagcgtggattgaaatttattggtctctatctgcgcggagccggaacgcccgtgtgtccggccgcatctacggccggacacacggactcctcacacgaaaatgccatcagcggtcgcaccgtccagcctcaaccccagacgcgacgagtacaagcccatgtcacgcaggacgaagcaatcctcttcgtcgctcttccccggcccgaccgccaataccgcccccaccgacttcaactgttcgagatgccgcggccatacattgaccgcgtatatgccgagtttgcgaaacagcgtgcgatccatatcgccacgctccaatcgttcgcacaggagcgacccctcaccgggcagcgggatatacaccggtatggttggcgtatcgatgagcctgaaccgtttggcaatgtccgcaaaaggccaattcgcatcacgcccgtgcagcggcaggatacgcttccgatcaagcgcatcattgccgacgttcgcgcgggcgacaccaccatttctcagacatagcacctccgcgaaatacgcgcgaaccgcctcatccgtgttcaaatcagcatgacgatcggccaccgcccggaacgccgcgatgttctgccggaggaacggggcgcagccaccttccgtggaaaacacatggaccacactctccgaagcgaggcgacgaccttcgcgattgcagcgtccggccgtctggatgacggaatccagtccggcctcttcacgatatgcgacgggaaagtcgacgtccacgccggcctcgatcaaggaggtggaaaccacgcggcatgacgctccggcatccagtcgatcccggatctcagcgaacagtcgctgccgatccgccgcacactgcagcgtggtcaggcagaaactgccttcggcgtcatcttccgccagccggtcatggagatactgggctttgctacgcgtgttcaccacacacagcacctgcttgtggcttcccagtcgctctgcaagtgcatccaatgcgatatcgccaagtcgtttgatggtcacacgacggaacgagtccctatcgtcacgagtgaacggcgaaatctcaggaacacgcacatggtcgccatcgaaggattcatcaaacagtggctgcagctccggttgcgtggcggtgcacaacaccgccgtggagccgtatcgctccacaagctcggcaatcgcccgtacacacggcctcagatacggcaccggcaacgtctgcgcctcgtcgaagacgataacggaatccgctatgttgtgcagcttacggcatcgcgaggttgcattcgagtacaggctttcaaagaactgcaccgccgtggtgatcacgatcggcgtgttccagttctccgcggcaagcgcgcgcctgagatccgtttcatccatgtcggactcgttcttgagctggtatggcgcctcggagtagtggggcaacacggcgtccgttccaaagatcgcctcgaactggcctaccgtctgatcgataatcgacgtatacggaatcacgtaaatgacgcgtcgcagattgttggtgcgcgcatgttcgagagcgaacgcgatcgaggaaatggttttgccgctgccagtgggggcagtgagcgtatataggccggtgccgtatgacggatctttgccgcagtccaagcatcgctcaagcaactcacagcgtctgatatcaatcggccgcttatcgggtgcggcaagatatccatcggctgtgttctccatgatggcggccaggcgatcgatccgggaccggtcttcggcgtcacgctcgacggacaccgtcagcgacgcctcacgcagggcatcgaatgcgggcacccggccactcgccaggttctgcggaccaaggtgcttcttcaaagattcaaggatgtgatgttccgcacggtcaatacgattcgaagtgaagaattcggcatcaagtcgatccgcatccaccaaagcggagaacagcatgcgcgtcaacatcatgtcggcgtacagcgaccatcgctcggaacgcttgcccgaggtcgtcggcttcgcggatcgagtcccgtgcaggaacgccgactgcggaatattcagttgtgtctctcccgcttgagccagagcgagtggattgcaatcccccgccctgcgcgccctgttcatgcgactcatgaacgttggaccctccagctcgccgtaactgccgaaatcaggcagccccgcgtgatgcccggccaccgccatcgccgccaacgggcatgcataccgcatcaacagcaacgcaccggccgtcgaatggtcgacgggtccgcaatgatcggggttgcggattctccgctggaaagcatccgaatatttgcccagatcgtggaccagaccagccagcaatccgtcgtcaagatacccgaagcccttggcaaaccctccggcgaggcaaccggccatggccaggtgctccgcgcaggtctcatacccgtgatcgctggttctcgcatagtacgtcgcacacattatcgtcacctcgtcaatcgctccgtatcgcaacgccatcgtcgcagcgcaagcataccacgaaacaaaaaagtggtcccgccgctaaacggcgggaccacttcatgcattccacgcgcccgtgcaccacgcatcaggcgcggtcagtccgccatggcatcacgccttggcgacctccacacccagctcggcaccttccttcacttcgaaggaggtagccagcgtctcatgggcgatcagatcgcggaactgctcgacatcggccacattggcggccggcacggtcagcaccagcgagatacggtccgcgatgtccagatcggcagccttacgtgcgtcctgcacagaacgaatcacgtcgcgggcgtagccttcggccagcagatcggcatccagcgcggtgtcgaggatcacgaagccaccggtcggcagagcggcggagaccgaagaggcggcctcggtggcgttctcctcctccacgcggttgatcagctcgtactcgccttcgaccagcgcaaggtcgccggacggcgtggagaccaccggcgcaccggacgcagcatcgacatgccagtcgccggacttggaggccttgatggcgaactgcacctgcttgccgaggcgcggacccgccgcacgggcattcacacgcagctcgtgaacaatcttcagaccgtgggcggaggcgtcctccagagtcgagaactcaatattcttgatattaagttcggacttcagcagatcatcgtacgccttgacggcgtccacgttctcgaccaccacggtgagcttggaaagcggctggcgcacgcggatcttggcggccttgcgcagggacagggtgccggagacgacctcacgcaccttctccatcgcgtccaccagagccggatcgtcgaccagcac

SEQ ID NO: 1658 - DNA, 12832 bp, Unknown
  R221_24m  MAG No. k141_124744
tcgtcgcgctctccgaccgcgctgatgtggccggcgtccttttcctctgcccacgtggtgatgccgcaggccagccgtagccagacctcgggctccagttcgatgacgtccggtggagtgaggttgtgcgggtccgattccgggccgtccaggattttgaccgcaccccacggcgcaacgcgcacctccacgccagggccgggcgcgcgccgctccagcaggaacagcgagtagcgcacagccatcgcccacaccgggcgcggcagaacgggggaggtggtcaggcgatgtggtgtgttgtcggccagttccagggctgcggcacgccattgcatcagtgcgtcgtgccctcgtttcaagtctttttcgagaattactgccatatgctccatcatggcaccggcacgcgaaaccgcaaggtatgcaaacgatggcatactgtaggatgcggaactgtgagatatgtgatacgctctcaatgagaacgtatgcaagaacgatccgccatcgtcgttacggagagttcatgcttacgtctatgcgacgatacctatcgcgcggcataataaacacgggcacttatcccggaaggaaagtcagaatgaccgaaatcaccgcaccgaagtctcctgtcacggcggaacaattcgccgacgagattcgtgaacaactgaaatacactcaaaacgtcaccgccgagcaggccacccctgctgacgtgtatgtcgccgcatccaaggccgtgcgcaaccaccttgccgactcctggttcaagacccaggccgacaccgtcaacggcaacaccaaggccgtcggctacctgtccgccgagttcttgatgggtaagcagctggagaacgcactgctgaacgctggcctgaccgaccagttcgacaaggctgtggaagcccttggcttcaagccgaaggacatcgtggacgccgaatacgagccgggcctcggcaacggtggcctcggccgtctggccgcctgcttcatcgactccctcgcctccctcggcgtgccggccttcggctacggcatccagtacaagtacggcatcttcaagcagaagttcgacgagaacggcaagcaggtcgaaaccccggactactggctggccaacgaagagccgtgggggcacgtcgactacaaccgtgatcagaaggtctccttcggtggcaaggtcgtcgaaaacgccgacggcaccaagacctgggaaccggcctggtccgtgcgcgccgtgccggtggactacatggttcccggctacaagtcccagcgtgtgaacaccctgcgcctgtggaccgccaagagctacgacgagttcgatctgctcgccttcaaccgttccgagtacatggacgccgtggccccgcaggtcaaggccgagaacatctccaagattctctacccggaagactccaccaaggtcggtaaggaactgcgcctcgagcagcagtacttcttcgtctccgcatccctgcacgatgccatccgcgtcttctacccggggcaggacaagccggacctgacgaccttcccgaacaagatcgtcttccagctcaacgacacccacccggtgatcggcatccccgagctcatgcgcatcctcatcgatgagtacggctacgactgggataccgcgtggtccatcaccaccaagaccttcaactacacctgccacaccctgctgccggaggcccttgaggtctggccggccagcctgatcggcgagctgctgccgcgtcaccttgagatcatcgagaagatcaacgcgcagttcgaggccgagctcaaggccaagggcgttgccgccgacaccatcaaggacatggccatctacaccggcgacgccgtgcgcatggcctacctggccacctacggcggctcccacgtcaacggcgttgccgagctgcactcccagctgctcaaggacgtcaccctgaagaacttctccgacgtctacccggacaagttcaccaacgtgaccaacggcgtgaccccgcgtcgcttcgtcaagctcgccaacccgcgcctgtccgacctcatcaccgagggcctgggcaccgacaagtgggtcgccgatctggaactgctcaagggcctcgagccgctggccaaggacgatgagttcgtcaagaagttcgccgccgtcaagaaggccaacaagcacgcattcgtgggcttcgccaaggaccactacggcatcgatatcgacgagaacaccctgttcaacaccatggtcaagcgtctgcacgagtacaagcgccagtctctgaagattctcgccgtgatctccaactacgccgacatcaagtccggcaaggtcaaggccgaggacatcactccgcgcaccgtgttcttcggtgccaaggccgctccgggctactacctggccaagatgaccatcgagctgatcaacaacgtttcccgcgtgatcagcagcgatccggccgtcaagggcaagctcgccgtccacatgctgccgaactacaacgtcgagatggctcagaacctcatcccggccaccgagcttgacgagcagatctcccaggccggcaaggaagcttccggtaccggcaacatgaagttcgctctgaacggcgccctgaccgtgggtacgctggacggcgcgaacgtcgagatccgtgagcgcgtcggcgccgagaacttcttcctgttcggcatgaccgtcgacgaggtcgagaagaagtacgtcgagggctacaatcccgcctcctactacgaggccgatccgcgtctgaagcaggccatcgatctggtggccgacggcaccttctccaacggcgaccgcaacgcctactccccgctcgtggccgactggctgaccaaggactggttcatgaccctggccgacttctccgcctacatggacatccagtccgagatcgaggccctctacgccgatgagctcgaatggaaccgcaaggccctgctcaacgtggccaactccggctacttcagctccgaccgctccatggaagactatttggaacgtatctggcacactgctcctctggcctgacggccgccggagcagcgcgccggctacgtgctggtttctacctcgcggctgtcgccgctcggcgtcgcctacgggaagcccaccgggcttcccgcttaacggctccgcatatctggcacactgctcctctggccgactgagttcacgaacattctggctccccctccctcagagagggggagccaggttcctgttgagagacgtaaagggccctgtatccaaccacgcgggttggatacagggcccttttgcgttgaaaaactgtgctatcaggcttcggccggggcggcttccgcctcgccatcggcctcatcctcggccttgttcagacccaggtcgaccggcgaggagctgttctcccacggctcctcccacggatcgtaatctgggttctgctgcttgtagatgtacaagccaacaagcgcggcgagcaatccgccgaacagcagcgcgaagaacttccaaccgttagaagacttgttctccatgacggctcctttccctagggatcgtctggtcggtatgcccattcagaccgactctgctccctattctaggccgctgtttgtgacgattgggtggaatgacattcgtgggcgattcatccacgcccgcatgccctcggtcggctcagcatcttcgcggcgcgtggaacgcatccgagaccttcgatacagtggactgcatgcatattcctacacagcgggagattcgataccagtgggagcgcggtggtccggtgatgacctgggcgctgattggtgcgtgcgtggcagtgtggctactggaggtattgctgggatttattgccccgggcctgagggcttggttgatgtacctcggcatggcggctccggtcagactggtggctgagccgtggacgctcatcacctcgatgttcctgcatgcgccgaactcgctattgcatatcctgttcaacatgatcgccctgtattccgtgggcccagtgctggaacgaatgatcggccactggcggttcttgggactgtatgtgatttccggccttggcggctctctgggacttatggtgtgggctgcggtggctccgggaggcatcggctggcagatggcagcctatggggcttctggagccttatttggcctgtttgcatcattgctggtggtatatcgccgtatcggcgccgatatccgctccatgttgatctggatggcggtgaacttcgccttgccgttcgtggtcgggggcgtggcgtggcaggcgcatgtcggcggctttgtagtgggtggaatactcacatggctgctggtgggtggtgtgccggcgtggcgaggtaaaagcctgaaatggcgtatgcaggtttacggctgggccatggtggtgctggtcgttgtgttgattctgttgtgcaatatggccaatccttacgggtggatgagtttcggctccctgcactgatatggcttgatatggctgtaaaaaacgattgatgccgggtattgcggaacatgcagtgcccggcatcagtgtatgtacggaaagcggcgatgtggatattagcgatgtggatatcgtcattcggtgagtgggcatgcgctgtatgaaggtatccacagtaatgaagatatccacagtaatgaagatatccacagtaatgagatgcgcgcaatgacgagttatccacgataacgagttatccacaatggtgacttgtgcacaagtgtgtagaaaagtgcataagactgtggataacttatgtggataagttaggaatgccgcggtattactgggtttgttgcagtggataactcgggtgtataactgttccctcgctgtggcgatgtatgccaagccaaagttatgcacgagatatacaccgagaaacgccgcttatccaccacttatccacatggttttccacattcggtggaaaactacatgggtgtgattcatccacaggctgtggataacgtagtggataagtcgtggataagtcgtggataagtggtggatagctgtggatgaacaggtgaaggcacgaaaaaggccggcctccgcatacgggaggtcggcctttcgcataagaactaagaacaacctaacgatagaaaaaacgatctaccgatagataagcgcaacgagtcggaactcagcgccatcccatcgtcatcaggaatccgatcatgatcagggcgaagccgatgcccaggttccacgcgccgatgttcggaatcggccaggagccggacggggagaggtagtacaccacacaccaaatcaggccgatgatcataaacgcgcagaacagcggcacgaaccaacgcgggttcgacttggtgcccttaatggtttcttcaacacgcttggtgttctccgcctgacggttcatcatgcgctgcatctgcggggtcagcgtggccttatcggcagtggcgttgagcacggcctgcacctgctccatattcacgccgtaagccgcgtcttcctcggcagaagcgttctctgcgttctgctcggtgtctttgttggcggtctcgtcagcagcggtgttggatgaggtctcgctctgccagtccttctggttgttcgagtcggtctcgtgcagctcttcgtcagccatcagcatagtctccattcaataggctaaaagtcataatagtggctacactcgaaagcggcgaccagagtcggcaagaagacaggaaattcatggccagacatgtaggtaagcacggcgcacggcactccctatggggtggtgtcgcggtattcgtcgtcattgccttgaccggttttctgctgagcaccaacgtgagggtcaatcgtacggttgccgccaccaacgatacggccgatctggtggagcaaggcgtgggcgaggccaaccagctgcagcaggacgtcagcgatctgaccaaacaggtcgccaatcttacggacgcgctcaaggccgatggcaccgacggtactgacagcacgcagaaccaaggcaaggactccagcaatgtggattccagcctgatgctgcccgcgctcagcggcagcggcgtaacggtaacgctggatgattctccgttatgggagaacgccgtcaacaacaatggcacgaccgccaatatcaacgattacgtgattcatcagcaggacgtcgaatcggtggtgaatgccttgtgggccggcggtgccgatgcgctgatgattatggatcagcgggtgctgttcaattcggcggtcatctgttccggcaacgtgctgtcgttgcacggtaagaaatactcgccgccattcaccatttccgcgattggtgacccgcaaagacttcgcgcagcgttgaacgactccgaagccattaccattcttaagcaatatgtgaccgcgtttggcattggctacaaggtggagaatgccgagggccttcagttccccggtaccgccgccttgctgcagcagttgaaatatgccacggtcgatacgtcaaagaccacagatgaggagcagactcagcaatgagacacggcaggcacaacagcggcgcaccggcgcccattgatctcgcgtccgtgtcggacgtacagcccttccccgaggacgacgccgcacgaatggcggcagacccggccaatgccagcagggcaaggtcccgtcgtgccgcagtacgcggcgcgtcttcgccccagcggagcctgatctggcaggcactcggcatctgcgccgaactgctgattaccgctgccgtgatttgcgccctgtacatcgtctggcagatgtggtggaccggtgtcgaggcggagcgagcccagaacgaaaccacccagtccgtcgactggagcgaccccagcaacaacgggggaacggtcaccatcgccaaagcccaggagggcgatgctccagtacagccgaaagacgcgaaatatggcgacttgattgcgcagatctacattccgcgcttcggctcccaatggcatcgcaacatcgtggaaggcaccacgctcgagcagctcaatcgccacggtctgggccattacgacaccacccagatgccggggcaggtcggcaacttcgccgtcgccggccaccgcaacggctacgggcagccgttgggcgatgtggacaagttgcaggaaggcgatcccatcatcgttcgtaccaaggattactggtacgtctaccactacacccggtacgagattgtgctgcccacggacgtgtatgtgatcgcgcccaatccggaagactccactgccaatcccaccaaacgcatgatcacactgactacctgtgagccgaaatactccacccccacccatcgatggatcagctatggtgagttggcgtactggaccaaagtgtctgatggcgtgcccaaagagctggctactactgattcgtccggtgcagtgaagttctccaccaccgaaaccccctcgatcgcttcccgcattggctcgctggacaaggtggtattcggcgcgctggtagtgtggctggttctgttcatcgccgctgcggtggcatggcgctggccggtgctgcgcgagattcgcgcgggtgagcgtcgccgcccggatgtcagcatctatggcggactgttgcgcctgcagcccggcgtggcaccgattcgatggctgctgctggctctgctgctgttcgcagccgccgcggcgctgttccagtggggattcccttgggccgccgccaatatcccattcctacagcagatgtcgaacttcgtggcagtgagctgacggcagcctagtactatggcttgcagtacacgtccctcaaggagagccctatgaccgattccgcgcatattttggtggtggataactacgattccttcgtctacacgatcgtaggctatctgcaaacccttggcgccactgttgatgtggtgcgtaacgacgctatcgacccagccgcgccgggtgtactggacggttacgatggcgtgctgatttctcccggccctggcgctccggccgaatccggtgccagtgaggatatgattcgcctgtgcgcggccagcggcgtgccgatgtttggtgtgtgcctgggcttgcaggcgctcgccgaggtgtatggctgcactgtgggccatgcgcccaccatcatgcatggcaagaccagcttggtggaacatatcgatgacgagattttcgagggcgtggccaaccccatgaccgccacccgctaccattcgttggccgtcgagcccgattcggtgccggatacgctggtggttaccgcgtggacgcagggcgaccacattattcagggcatcaaggtcaagggcaagccgatgtacgccgtgcaattccatcccgaatccgtgatgacccaggacggctaccgtctgctggccaactggcttaaggtctgcggccaagacaacgccgtggccaagtccgccggccttcagcccaaggttacgaagtagcttttccgcgcgcggcgacgctttcccgggaatgttgcgctgggatagctctttatacagcaaaggggaggggtgcagaagcccctcccctttgcgttgtgtgattgcgttgtgtgattgcgttgtgtgattgcgttgcgtgtttacgttgcgcatgtgttgcgctatgtgcgttgcgtatgcgcaacacacacgcccggcgctcactcactcacgggttccgccccccgttgccgttgttggcaccgttgccgttgccaccgtctccggtaccggtgtcgcctccggtgctgccggccttcgtggtaatggtgacggtcgatcccgcatctacttggctgccagcgccaggattgatgctgactaccacagcggtgctgtcggttgggccactggcctgagccttgaggcccacggccttgagcatgagttcggcggtggcgtagtcagtgccagcggtgatattcggtacagcgaccttttccttgcccgtggacacccagatggtgatggacccgccctgcgcgatggaagagcccgaatcggggcttacgcgggtaatcagaccggcctccaccgtatcggagctttcctgctccacggtgaagctgaacttgccctcatactgctgtagcacgctgtccttcgactgaccgaccaaattgctcggtacggtggtcatgccggaagaaacatatatggtgatggtggtgcccttgggaaccgactgaccggcggcaggatcggttctcgtcaccatatccttggcgatgtcggcgctgtcttcggttttgacggtggcgttcaccttgaacccggcgctttccagaatgctgcgcgcctcttcctggctgcgctccttgacatccggaacctgagtggactgcgggcctgcggagaaccacaccttcacggcagatcccctggccaccttggagccggcgtccgggctcatcttggtgcaggtgccttccggctcggtggagtcggtgtcttgcttttcggtcatcttcaagcccaatctctcaagcttgagcttgatgttgtccttggacgtggaagcgttgcacacttcagggatggtgacggtgtcttcagaggacttgttgccggagccgttcatggcgaacatgatgcccacaatgacgagcaccgcgacaatcgccgcgatcgccgaaccgatgatgatcttcttgcgcttcttggccttggccgccgccgcacgctgctgcgcacgggactgcaacgccgctgagttggcaccattggccggtggaatctgctcgaactgaccggtcaccgggttgaatgcctgggtgggctgctgctgcggttccaccggcgtggtgggcaaatcacgttcggcttccttgcgggccttcatattcgacaggtccgtcaatgggttgaacgcggctgccaccggcacgccgccgttcatgtaggtcaggatgtcggtcttgaattcggaggccgtggcgtagcggttctggcggtccttggccatggccttggcgcagattgaatcccacatcttcggcagccccggcaccacggcggatggcggcgtggcgacttcggagacatgctggtaggcgatggccacagcggaatcgccggtaaacggcgggcgcccggtaagcatctcgtagagcacgcagccggcggaatacaggtcggaacgcatgtcgacggtctcgccgcgcgcctgctcgggagaaaggtactgtgcggtgcccaccacgccctgcgactgggtcatggtggttgcggaatcgtccagagcgcgggcgatgccgaagtccatgaccttgaccgcgccctgctcggaaatcatgatgttgccgggcttgatatcgcggtggataatgcccatgcgatgcgaatagtcgagcgcgttaagcacgcccaacatcacctgttcgcagtcgcgctggctgagtgcgccgttgaccttgatgatgtcgcgcagggtctggcccttgacgtattccatgacgatgtacggcaaacgctcggtatcgccgctttcggaagaagccagttcttcgcccgaatcgtagatgttcacgatgttcgggttgttcatctgggccacggcgtgtgcttcgcggcggaaacgggccaggaagatgtcgtcgttggccagatcggcgcgcatgattttcacggccacggtacggcccagacgggtgtcaagagccacgtggacctcggccatgccgccacgaccgatgagctggccaagctggtagcgtccgccggccaatgcggtgggcatactggtgctcattgcttattccctcccaatcttgaggccggggcctccaaaacaatgcgtggcgtgctggtcactcggcgcggcagtcgattgccggacgtggccatggcggtgtcggccatttcggtctgctgatccagcagacggcgttcgatgcgtgccagcgtacgggacaccaccagcgcgtctttcgggcgatccaacgggtccttggccagcatcgacatgacaaattcgcgtaactggacgtccaccgagttcggcagcggaggcacgggattgttcacgtgcgctgcggcgatatcgaccggagtggtgccggtgaacggacgatgcccggcaaggccctcgtacgccactacgcccagtgaatagatgtccgattgcggcgtggcctgctggccctgcgcctgctcgggggagatgtattgtgcggtgcccaccaccatgccgtcctgggtgatctggccttggccggtggagtagctcacgccgaaatcggtgatcttcacttcgccggtgtcggaaaccatgatgttggccggcttgacgtcacgatgaatcacgccgtgcgagtgggccacgaataggcctcgcgcggtctgaatcagaatgggcagcagttcgatgggatccatcgcgcccttgctatggaacagatccgccaacgatttcgaggggacgtattccataatcagaaagccgatgccgtcatgctcgtagtattcgaacaacgcagcgatgttcgggtgcgccagattggcggaattatgggcttcggcacgcaggcggcgcagcttggcctcggcgttggtcacgtccgagcgcagcgccttgatggccacttcacggccgagctgaatatcgtagcctttccagacctcgcccataccgccttgcgcaagacgcgaatcaagacgatatcggcggtgaataagctgtccttcgataagtttcactgctgcaaagcctcctgcatcatcgcgcgcatgatcgggccagcggcgagcgaaccgtatacatctgtgttatgcaccaacaccgcgacggcgatttgcggatcgtccgccggcgcgaaaccgatcacccagccgtcgatggcagagttgtcggtaccgatttgtgcggtaccggttttggccgccaccttgatgccgtcgatggccagctgcggattggcctcggtcaccacgctctccatcatcgtggtgagcttgtctgcggaatccttgctgaacgcgttggccatggtttgcggtttggtctgcgaaagtacggtgagatcggcggcgcgcacacgatcgaccagcgtgggctgcatcagtttgccattgttggcgattgcctgcgcgaccatcgccatctgcaacggcgtggccgtggtgtcgccttggccgatggatgccagcgcaagcttgtcgtcggtcggatcagaggggaatgtggacgcggtggccgtcatcggggtgcccgtggattcggtgccgtcaatggtgatggtgctgccgaacccgagcttggtggccatgtccgaaaccttgctcgcgccgagtttcacgccaagctgggcgaaagcggtgttggacgaccatgcgacggcctcttgcagggagatctgtccgttgacgccatcgccctgtgcctcgtcgttcggcagctgtgtggcggttcccggcaaggtatagctggagcctgcaggaatcttcgtgtccgtctgatattcgccggtttccagcgcagccgaggcgacgatggtcttgaacgtggaccctggtgggtacagctgcgaggtggcgcggttgattagtgggctatttagtgggctattttggcccgcagaaagttcgttgtaggcctgagacgcggctttggtgtcatgggtcgccagtttgttcggatcataactgggcgtgctcaccatggcgaggatacgaccggtgctgacttcgatggccaccgccgcaccatcgcgcgtaccgagctgatcgtaggcaacctgctgcagcttggggtcgatggaggtttcgatggacgcgccctgattcgtagtgccggtgagcatggccttggcccgctgccaga

SEQ ID NO: 1659 - DNA, 25519 bp, Unknown
  R221_24m  MAG No. k141_125064
cagcacagatctggtatgagaacgacggtgatctctctgttctcgaaggcaagaaggtcgcaatcatcggttacggctcccagggtcacgcccacgcactgaacctgcgcgattccggtgtcgacgtggtcgtcggcctgcgtccgacctccaagtcggtcgacttcgccaaggagcagggcctcgaggtcaagtccgtggccgaggcttccgccgaagccgacgtgatcatgattctggcccccgaccagtaccagcgcaccatctggaccaacgacatcgagcccaacatcaagccgggtgccgccgtcgccttcgcccacggcttcaacattcactacggctacatcaagcccaccgaggatcacccggtgttcatggttgccccgaagggcccgggccacatcgttcgtcgtgagtacgccgctggccgtggcgtcccggtcgtcgtggccgtcgagcaggacccgcgcggcgacggctgggctctgaccctcgcctacgccaaggccctcggtgccctgcgcgccggcgccatcaagaccaccttcaaggaagagaccgagaccgatctcttcggtgagcagaacgtgctcatgggtggcgtgaacaagctcgtcgagatgggcttcgaggtcctcaccgacgccggctaccagccggaaatcgcctacttcgaggtctgccacgagctcaagatgctcgtcgacctgatgaacgagggtggtctgaacaaggctcgttggtcctgctctgacaccgctcagtacggcgactacaccaacaccgtcatcaacgaggactgccgcaagcgcatggaataccacctgcagcgcatccaagacggctccttcgccaaggagttcatcgacgatcaggatgccggcgccccgcacttcaaggaactgcaggagaagtactccaacgagcgcatcgagaccgtcggcccgaagctgcgcgccatgttctcctggaacaaggatggcgtcaaggatgccgacgaggccaactccttcaccggcaagatcgcccgcgcccaggttcagtgattcttccttgggctcccctcgggtgaggtgcgaacggacagcgagccggcaatcgcagccttcatgctgtccgtgtttgcaggacgctggcgcgtaagcgcctgagggtggtccccagtgcataccaaaaggccgccgctccgattcattcggaacggcggcctttcgcttattccaagggatctacttgataacccacgcagaagtgtcggtggggagctggccttcgggggtcagcgggccggacgccagcaccacggagccatcgggcagcgcgaccggggcattgccgaagttggtgattgaggtgaacgcccgcccgccaaccgccgcgcgggtgtacgccaccacatcgtcgcccatgtccacctgctcggccgtggtgtcgcgcgtggcggtcagcgactcctggcgaatcgccagtgcggcgcgatacagcgcgagcatcgagtccgggtcggcttgctccacgtccaccgcgtaatccttgaaccacagcggttgcggcaggtgcgggtcggcggccggcgtcacgccctcagcgcgcgtagccggcgagaagccgaaggaagcgcccgtgccgaactggccggcggcgcacagcggcacatggttctcgccggtaccgtcatcggccggagtcggacggctgaaatcggccaaggccggctcatcggcggcggtccacggcagcggcacgcggcagccgtcgcggcccttgtccatcgtggcctgagcagtgtggaaagcggtcggatcctccaagtgatcccacggaatatcggccacctcaaacaggcccagctcctcgccctgatagatataggcggcgccgggcaggccgagctccatcaaagcggcggcgcgggcgcggcgagtgccaagctcgcgatcctcgggataggtagtgccgttgcgcagcagccagtcgtgcggcagctggtggtagggcgcgcccttgatctgcggcaggccgtaacgggaggggctgcgcggcacgtcgtgattgttcatgacccacgtggtggtggaaccgccggtttcggccgccgccttgagtccggcggcgatggcctcgcggaactcgtcggcataccagttggcttgcgcgaagtcgaagttgaaggactggcccagctcgtccatcgaagcgtacaggtgctggtgctcgggcaccacccacgcctcggccacggcaaagcgcggcgggttgtactcgttgaacaccttgcgccattcgcggtagatatcgtgcacctcgcgacggtcgaacagcgggtggctgaagtcatgattcagcacgccgaccacgctgtattcgcggccgagctcttccaacggcttggattcgaggtccttggccaggccgtgcgccacgtcgatgcggaagccgtcggtgccgtggtcggaccagaaacgcagggtcttcttgaactcctcgtggatgtccggattcttccagttgacgtccggctgcgccttatcgaacaggtgcagataccactggccgtcggccacgcgcgcccaggccgggccgccgaagaaggattgccagtcgttcgggggcagttcgccatgctcgccgcggccgtcgcggaagatgtagcggtcgcgcgccggggagccgggctcggcggcgagggcctcctggaagaacacgtgcttgtcggcggtgtgattgggcacgatgtccacgattaccttgatgccggcctcatgcgcggccttggccatcgcgtcgaagtcgtccatggtgcccagtcgcgggtcgacgttgcggtagtcgatcacgtcgtagccgccgtccgccagatcggaggggtagaacggggagagccagatggcgtccacgccgaggctcttcaggtagtccattttctcggtaacgccggcgatgtcgccgatgccgtcgccgttaacgtccttgaagctgcgcgggtagatctggtaaacgacggcctgcttccaccagtcgtcattgaggttatttgcggtcatgccgattctctcctgttccgggtgcgttgtggttgggttgttccggtcgcggccgaactgctgtgtgaaggcccgaccgttgtattgatgatgacaacgatatcatgtgaattacacatgcaaaaatcgatttatcggcgttttgcggtggtaacgtggtcacgcctgcgcgggcgctgctgtcgcggcaggcggcgcggtggtttcgcgcagtattagcggagtgtccggccgtacgaatgccggttcgattgacttgccggcaatggcatccaataccatgtgcccggcagtcgcgcccattgcgaacgggtcctgatgcagcgtggtcagtcccacggcggcggacagggtggaatcgtcgaagccgatgatggaaatgtcctgaggtacccgccgcccgtattgacgcaggcgatacagcacgggcgcggccatttcatcatcctcaaaacagaaggcggtgatgctgggggaggcgttcagtacggcgttcaatgccgcgttgctttcgccaagaccgcgttgaatgctcaggggcgttagctcgatccccggatgggcggcagcggcatcaatgacgccctgcaaacgagcctcggcactgtagcgcatattggtttcggtcggtgcgctgccgacgaacgcgatatgccggtggccgagtgcaatcaggtgctcgatagccgaacgtgtggcggcgtaatcatcaatgctcacgcctgcgtcgaacccatcggtggaggggatgttgatgccgacaatcggcacgtgcatatgcttcagtcgctccacctcagccggttcgatgtcgaaggagctgacaatcaccgcatccgcattgcgccgcacgggcaaatccgcaaagaagtcgtggcgctcggcggcgttgcgcatggggtagggcacagtgtcgtagccggaggggcgcagcgccgagtcaagaccggcgaagatgttcgaattgaaccaactggcgatggtctcgctggcaagtagtgcgatacggaacgattggccggattttagggcggcggccgagcgtgagactgagtagtcgagcttttcggccgcggccatcactcggtctcgagtctcgggaagcaccagatccggcttggcgaaggtccgggacaccgtggatacggaaacgccggcctcgcgggccactgcctgaatgcttgccttggtcatatgccgtcgctccttcgccgtcgcgaacaatcattgtcatgacaacgataacatgcccataacaagtcgtcgtcttcggctatctcgattacgaggggctgatttagggtgtcccggacatctacttccgtttcaaggggctccttgccggtgaaaccacaagtgcaaacgactttgtgccaacgtcattccgccgttctcgcgctgggtctacttgggcaccagccccttgaaacggaagtagatgtccgggaaaggccaaatcagcccctcgaagccgatttagaccaatttcccattgccggaatcgatcaccgcttctctcggcgcatcacggcggctagggactgcacgcgtggcaggtcgaagacctcgtcggtatgtaccacgtggcctgagctgtccgccagcggcacgcgccagttcgaatactcgctggaagtgcccggctgattctgggaacggcattcgcccacgccgtccaccagcgctgcctgcagcagcagcgacggcgtatcggtgagcatggcgtgcatcgcctccacgatctcctgcacatggccttccacatcatccgccacggtctgcgagatatagccgttctccaccagacggttcatcatggccgtgcgttcggccatcgccgaggcggcgaacgcctccaccggctcgctcaggagatgcagctcctcgcgcagcttgacgtgttcgaagttcaggtagccggcggtgggtggcagatcgtgcgtggtcaccgaggccaatgcctgtttgcgatagtccttgggtgcacggtacgggtcgccggcgttcggcgaatcgtccacgcggttgaaccattccacgtcagtgccgagcacgccgtgatcggacagaatgcggcgcacgtaatccggtacggtgcccagatcctcgccaaccaccatgcctccggcgcgcgtggcctcgatggccagtactcccagcatcgcctcgtggttgtacgtcacgtatgcgccgttgagggcgccgagcccctgcggaatccaccacaggcggaacaggcccagcacatggtcgatgcgcaccgcgcccgcgtgctcgtacatcgaatgcaccatctcgcggtacacctggtagccggtggcctccagatagcgtgggctgaacggcggctggccccaatcctggccctgctggttatagaagtccggcgggcagccgaccgtgacgccgccggaggcgaagcgttccggattggcccaggcatccgcgccgagcccgtgcacgcccacggccatgtcttgcatcagacccagtgtcatgccgtggtccagcgcctcctgctgcgcggcgttcacctgctcggcggcaatccactgcagccagcggttgaactcgaacaggtcgtggtgctcctcgacgagctggcacacggccgggtcgtcgatggtcttctcgaagaaccaacggttctcgccccacggcgcgccccatacctcgaagcacaggcaccaggtggcgaaggaatcgaggtctgggccggcggtggtcttgaaatgctcgaattcgagctcgcgcttgttgttgcggcccgcgtcgaagatcagacgcagcgccgggcgtttggccgcccacgccgcgttgatgtccatcgggttcgattcgtcgttgcgtgcggccactgaatcatgcagcgcatccacctgcgctcggatatcggccggcagcgtgccgtattcggggatgtcctgcgggcggatgtacgtcacgttgaggaatcggcgcgattccggtagatacggcgatggctcaagcggcggaatcggcgcgccggcgtgaatcgggttgatgagcatgaagtcggccttggacttgtcggccgcgtccgccagcagcagcttcagatcgccgtaatcgccgatgccccacgattcgcgggaccgcacggaatacatctgcgtcatccagccccaccgctggtgctcggcgaccgcctccggcacgggaatgcgcgcgggggcggcgatgatggccgccttgccctcgcgcccgtccaccgtgacggtcagtgtgtggtagcccatcggcagatcgggagcgatggtcaagtccggcttgccggaattgaggtgcggcagcagggcaaagtggccaaacgcggtgccgtcctccagctcgatggagacggtgatgtccgcgtccgacgaacagttcagggtgatgccggtcggtttgccggtggtggcgacgatggtggaggggagcaaacgtttgctgttttccacctcaagttgggtcatggagcgtgcgatggcctcgtcgctggatgcgtccacgtcgagggcattgagtacggcgaccaaggccgcgtcgctgatttcggtgtaggtgccgagctggtcgatgaacgaggtggaaagcccgcatgctttggccagcttgaccagcggacgggcgagtcgttccgcgctttccgcgcgctgcggggcaccggaagcggcgtcgttggtggtgtctgcgatggtgccggtgctggtcgctgcgtcgttgccgtacgcgtcagtcatgatgactccttgcttacagatcgggtactgctagtcgtttgcattgctgttcgagggccgctctgcgttgaggttccggcaatctgacagaccaatgttcgagctgttctatctttaccgtaactcatattgacaacgattgcaatacattcggtgagttgggcaattagcgggttatccgagcacgacgaacgactgcggggagagcgtcgggtggccgtcccagcgccagtcgaggtagaagtccatgtcgaatccggcctgcatcgattcgttcggtcggcccacattcggcgacgaacgccgcctcggggaattcggggcggattttcgagaacatgtactgccaggtgcggatcgtgtatggcttgccggttcatgcggcgatgatgcctcggccgattcgacgaagaatgttcacccggcgttcttccggcggtatccggacgttggcttgtgaggcctaccgtgaaatccggaatcgaaagatccaagcaatgcaggtgcggaacggttccgcgaagctggaaggcatgacgacgacggacgtggccaaacgggtgcggccggagaagtgcgggccggacggcgcagatgacactgcatggaagaaggaagaacaatgggcaatcacaaggctttgaagagcgccgtcgcggcggtcgcctccatcgcgacgctcggcgcgctcgccgctccggcgtttgctgtcgatgccgcaaacggcacctacagccccaacggcaagtcggtcgccgagctcgccaagcacggcgccgcgcagcgcatcgccgccatcggcaacaagagcgcgaagaacgtcgtgctgttcatcggcgacggcatgggcgattcggaaatcaccatcgcccgcgactatctgaagggcgccaacggccacttcgatggtctggacgcggtcggtcagcccggcgcgcttgacgacgtgcaggcgggcaccggccagtacacgaccttctcgctcggcgacggcagcaaggacagcgccgtcggcaaggatggcaccggcaagctggtcgccaaccccaacccgggcaagctcacccccgtcaccgattcctccgcgtccggttccgcatgggcgaccggtaccaagacctacaacaacgccgtggatgtcgacatctacggcaacccgcagctgaatctcttcgagcttgccaaggccgccggcaaggccaccggcaacgtgtccaccgcggaaatccaggacgccaccccggccgtgctggaatcgcactccaccgagcgtgcctgctacggcccgcagggcaagaccgacggcacttccaacaacgcctccaagcagtgcctcgccaaccagctcaaggagaacggcggcatcggctccatctccgagcagctgctcgacacccgcgccgatgtgaccatcggcggtggttccaagtacttccgccagaccgtgcagggcggcgaatacaagggcaagaccgtgtgggaacaggccaaggacatgggcttccagaccgttgagaacgacccggccgcgatgaacgccctgcagtacaaggatggccagccggtgctcgccctgatgagcgacggcaacatgccgaccaagttcaacccgtccaaggccaccgccaaggatccggccaaggacgccaacccgaccgtgtgcaccccgaatgacgcctggctcggcaaccgtggcgcctcgctcaaggacatgaccaagaaggcgctcgatctgctcaacgccaacccgaacggccagaagaacggcttcctcctgcaggtcgaaggcgcttcgatcgataagcaggaccacgccgccaacgcctgcggccagatcggcgagaccgacgacttcgaccaggccatcgcctacgccatcaagaacgtggacctcacgaacacgctggtgatcgtcaccgccgatcatgcgcacacctcccaggtcctcaacgcccagccggcttacgcgctgtccaccgtgctcaagtccgccgacggcaacaacatggtcgtctcctacggcaccgcccaggaagcctccaccgacgccgaaggcggctacaacggcggcgacatggagcacaccggcacccagctgcgcatcgccgcttccggccccggcgcccagcgcgtcatcggcctgaccgatcagaccgataacttctacaccatcgccggcgccctgggcctggccacctcccccgacgagcagaacgcgctctccaaggacggcaccgtgaaggtcgcccgcacgcaggccggcaagtacgtcgccaatgtcgacggtttcaacggcgacgcgctgctcagctacgagctgaaggacaaggacggcgccgtggtgtccaagtccgattccagcaccccgctgtccggcgtgcgcgtcaagcccgcgcagaccacttcgatcgcgctcgacaagatgtcggaaggcgccgagtacacgctcaccgtcaccggtcgccagtccggtaaggtcgcgaccgtcgccatccaggcgccggccgccggctccgccgacaagaagccgggcgccgacaagaacggcgtgatcgcttcgggcaaggtgccgaacgattccgcggtctccggtccgttcggcgccctgggcgccaccggtaccgccgtcatggccatcgccatcgcggctgtgatgctggttgcgatcgcgatgctcatcaaggccgcgcgtaacgccaggaacaattgattcggccttggccgaccggtaatcccgagtcgtccagccgccggaaaacgatcgcccgccgagccgatgcccggcgggcgatggttttccggcggcttttggctgtgatgcgatacgtgccgtgtgccgcgcttcgcagaaacctgagtgagaatcgctcaagttttttgccgaatccgggaatatgcacttgcggtttaaagttgagtggtgtaggctcaagtttcggaagcacgggaatgggcggttgcgaacgcaaaccccacaaccgagaggaaccgcacaaggaaccgaccgaaacccgggcgaaaaacgaaagaatgaacacgtgcgagacggctcgcgcacaccgcgcgtcacaacccgaacaggtcgtggcgaacggcggcgccggccgggcaatcgcaagtcccacaaaggagcacacattatggcacgcgcagttggcatcgatcttggtacgaccaattcctgcatcgcaactcttgaaggtggcgagcccaccgttatcgtcaacgccgaaggcgcccgtaccacgccgtccgtggtggctttctccaagtccggcgagatcctcgtcggcgaagtggccaagcgtcaggccgtgaccaacgttgaccgcaccatctcctccgtcaagcgccacatgggcaccgattggaccgtcgacatcgacggcaagaagtggaccccgcaggagatttccgcgcagatcctgatgaagctgaagagggacgccgaggcatacctcggcgagcccgtcaccgacgccgtcatcacctgcccggcatacttcaacgatgcccagcgtcaggccaccaaggacgccggcaagatcgccggcctgaacgtcctgcgtatcatcaacgagccgaccgcagccgctctggcctacggccttgagaaaggcaaggaagacgagcgcatcttggtcttcgacctcggcggcggcaccttcgacgtttccctgctggagatcggcaaggatgacgacggcttctccaccatccaggtccaggccaccaacggcgacaaccacctcggtggcgatgactgggatcagaagatcatcgattggctggtttccgaagtcaagaacaagtacggcgtcgacctgtccaaggacaagattgcgctgcagcgtctgaaggaagccgctgagcaggcaaagaaggagctctcctcctccacctccaccagcatttccatgcagtacctggccatgactcctgacggcaccccggtgcacctggatgagaccctgactcgtgcgcacttcgaggaaatgacctccgacctgctgggccgctgccgcacgccgttcaacaacgtgctgcacgacgccggcatctccgtgagcgacatcgaccacgtggtgctcgtcggtggttccactcgtatgcccgccgtcaaggacctggtcaaggaactcaccggtggtaaggaagcgaaccagtccgtgaacccggatgaggttgtggctgtcggtgccgccgtgcagtccggcgtcatcaagggcgaccgtaaggacgtcctgcttatcgacgtgacccctctgtccctcggtatcgagaccaagggtggcatcatgaccaagctcatcgatcgcaacaccgccatcccgaccaagcgctccgaggtcttctccaccgctgaagacaaccagccgtccgtgctgattcaggtctaccagggtgaacgtgagttcgctcgcgacaacaagccgctgggcaccttcgagctgaccggcatcgctccggctccgcgtggcgtcccgcagattgaggtcaccttcgacatcgacgccaacggcatcgtgcacgtgtccgctaaggacaagggcaccggcaaggagcagtccatgaccatcaccggtggttccggcctgccgaaggacgagatcgaccgcatggtcaaggaagccgaggctcacgaggctgaggataagcagcgcaaggaagacgccgagacccgcaaccaggctgaggccttcgcctactccaccgagaagctcgtcaacgacaacaaggacaagctctccgacgacatcgtcaaggaagtcaccgacaaggtcaacgctctgaaggaagccctgaagggtgacgacaccgagaaggtcaagactgctcagactgagctgatgaccgccgcccagaagatcggccaggtcctctacgcccagcagggtgccgagggtgccgcggccggtgccggtgcggctggcgctgccggcgccggcgcttccgctggctccgcctccggttccgacgacgacaccgtcgaggccgaggtcgtggacgacgatgacgacaaggacaacaagtgatgtccgagttcaacaaggacgactacctgaacgacctgccggatccctcagatgctgaggctgccggccaggccgctcaggcctcttcaggggctgacgcctccgccgagtccgactctgcgcaggattcggctgcccaggctccttccaatgaaggagccgacgcggctcctgccgcagctgagggagagaagtcggatgccggagagaagaccggcgaaggccagtccgattccgaagacaccctcacccccctcggcaaggccaagaaggaagccgcagactacctcgaagccctgcaacgcgaacgtgcggagttcatcaactaccgcaatcgcacgcagaaggagcaggagcgcttccgtcagcacggcatcatcgacgtgctgaccgcgctgctgcccgccctcgacgacatcgaccgcattcgcgaacacagcgagatggacgactcgttcaaggccgttgccgccaagatcgacaaggctttcgagaagttcggcgtcgagaagttcggcgaaaagggcgaggacttcgaccccaccaagcatgaggcaatcctgcacaagccggatgccgatgccgacaaggaaaccgtcgacaccgtggtggaagccggctaccgtatcggcgaccgcgtaatccgcgccgcccgagtagtagtagcctccccgcaaaactgataacggccagctcgttaacgagctgacattaccttggctcccgctggcgggagctggcagccgaaggctgactgagggtggtcaaacattgaatataaaccaccctcagtctcgcttcgttcgacagctcccgatgttttatgcgacgtgcgcaattgcgcactgctatgaacagcccactgggctgttcatccaacgggagccaaccataaagactcttcaagaaaggagacatgaatggctgaaaacgaatggctcagtaaagacttctacaaagtccttggtgtctccaaggacgcttcggacgacgacatcaaaaaggcgtaccgcaagctcgcccgcaagtaccaccctgacgtcaacaagaccaaggaagccgaggagaagttcaaggacatctccgaagcctacgacgtgctgagcaagaaggaagatcgccaaaagtacgacgcgattcgccagttcggcatgggcggcgcccgcttcgcaggcggttccggcgccggcggcttcgatgcttccggtttctctgatatcttcggctccatgtttggccagggtgccggtggcaacggttcgcgtatccgcttctccacttcgggcggcggccccaacaacatcaacgacatcttctcgatgttcggcggtgctgcaggtcagggcggccagtcgtatggcggctacggccaatcgccgtacggcaatgccggcggctatggctatgaggaggccccgcgccccgaaaacggcgaggaccgcaactccaagatcagcctgaccctgcgtcaggcggtcaagggcgctaccgtgtccctgtccgtggacggcaagaagttcaaggcccacgtgcctgcgggcgtcaaggacggccagaaaatcaagcttgccggcaagggcaagccgggcatcaacggcggcaaggccggcgatttgtacctgcacgtcaccgtcaagcccgatgccgcgttctcgatgcgcggccacgacatcgtcatggacctgcccgtaactgtgggccaggccgtggccggtggcaaggtcgaggccaaggatatcgacggcaatcccgtcaccttcaaggtgccggcaggctccagctccggtgccgaggtcaagctcgcgggacttggcgtccagcgcggcaaccagccgggcgacctgatcggccgcgtgcagatcatggtccccgccaagccgggtctggccgtcaagcacgccgccaaagaattcgacgaaaaagccggcgactatctcagcctgtaatcaggaggtgaacaatggcgcggttagccaaccaaatgaagcagttgtacgcgatgtgcgcaaccgcgctggtgatgggcagggccgatctcgacggagccgatgacgtcggcttcgacatcgaactgcccatcttcaccgtcggccaggcagccgaactgggcaacatccacccccagaccctccgccagtacgaccggctgggtctggtccgtccgcagcgcaccgatggcggcgcacgccgctactgcctgcgcgacatcgcccgcctgactcgagctcagcgcctaagtcaggatgagggcatcaatctttccggcatcgcacgcattttggccctcgaagaagagaatcgccaactgcgccgcgaagtcaaacgcatgcaaaccggcgaccaggagagcgttttcgccgcaggccgtgacggcaatatcgtggaggtacaacgctccaaccgcgcccgcctctggcgcaacgccatccgccgcgaaacccgcgaactgcccggccgcgataccgctgctgacaccacgcgcgaatccgactccacccccgccgattccaaatccatggtcctgtggggttggtgatttgctgttcggctgtcgtgcggagttggtgagataggtatatcgaatacgaatagttgaggattcactgcgacgtacggaggtaaccatgctgctcaaggccgtgttttgggatttggacggaacgcttatcgattcggagccgctttggcatgacggtgaaatcgagatcgcgcacaacaatggcggcgagtggaacgaggacctcggttgggagtgctccggcactccggtgccacacgtggcagaggtcatgattgcgcatggctgcacattgagcgttcccgaaatcgacaaacagctcaaggattatgtgttcaaggcggaggtcgaacgtctgccgtggattcccggcgtattggacgtgctgcactcgctcaaggaggccggcattccgtccatgctggtcaccacgtcgccgcgccgtatggcggagaacatcatgaagcagtccgagggactgttcgccggctacgtctgtggcgacgatccgtacgaacacaagccgaaccctgcgccctatctggccgcagccgacaagcttggcatcgcccgtgaagacatggccaagtgcgtggtgctcgaggattcctcggttggacttcaggccggtgcggcatcgggcgcgactctgatcgcgcagaccggctggattcgcacggatacttccggcctgggccagttcgcgtccatcgaatcgtatgacggtatcgatgcggccgcgctggacggtttcgtgcgccagcgtcttggtgagtaattgattacatcaccgcgcatgcagttctcctcatgagcggtggaatgtgttgacgatataccagcgaagcacgccatatttgtaaagaagatggcagtaatggctgctatgaggttccggtggccccctcttgtatcggggcgactggtagagtggttgacggttttcagacgaatgtctggttattggacagattgttcacacatatagacgtataggactcataggaatcacatgggcttcgttaatttcatcctcgaactgctgaaggatccgcgtgccgcgattgccggttggattgccatgggcgtggcgccgaccctcggcttcatcttcctcatcgtatttatcgaaacgggtgtggtgttcttcccattcctgccgggcgactccctgctgttcgccgccggtgtgttcgccgctcccgatgccgcgaccggcaaggccgcgctgccgctgttctggctgctgccggtggtctggtgcgccccgattatcggcgaccagtgcaattacttcattggtcatttcttcggccgtcgcatcatccagtccggcaaggtgaaggccttgaccccggagcgtttggccaaaaccgagcacatgattgagaagtggggcccgctggccgtgttcctgggccgtttcttcccgttcattcgtacgttcatgccgttcatctccggtatttccggtatgcgttggagccgtttcacgccgttctcagtgctcggcggcctgtgctggtccacgttgttcacgctgctgggctacttcttcggtaacattccggcagtacaggaccacttcgagctggtgatcgtgctgattctgctggtctcgctcgccccgaccatcatcggtctgctcaaggccaagttcggcaagaagaagccggccaaggtgaccgatgctcagttggatgctatggaagacggcattaagaacctcgataagtaagcaagaaatgtagattaccgcataaggaatcgtcgtgaaaatgaaggccctgactgtgcatgtgaggtcagggccttttctgcatgagatgggcgtgaaacagcagcgtggttatccacatttgtcgtggacgacatgccggggtgtggataactcagcaagctagaaccacaatggtcgattcgtgttgagcattgaactcggacacgtttcaatcggcttatgaatagcaacaccacaccccgcgtggcgcgtaggatcacctcgccagcggtagcacctccgggcattccgctgcccacggacgatgcgccaattccagcgtatcgctactacactccgccgcccaggccgttggcctcatgcgaacggcagagatcgggcgaggctccggcactcgccctaactacagacaccagcttccataacattgtaacgatgacgtcaggtcatggaggcgtggggttgagtgtcatggcttccatgcttgcatggacattggcgagacgtgaacacagctgcgttctcatagacgctgatttcgtggccggatgccttgacctgctgcttggtgtagaacaagagccgggcttgcggttcagccaagtcgacgcgcccctcggccgtatcgagggtgaggcgatgaaccatgagctgatgatgtgggagggtgtgcgagtacttccctatgacccttggagcgcgcgccagcctgactggtgggaagttcaagcggccattcgggctttggcggaaacgaacgacgttgtcatcgtagatgccggtcagggtggactcattgagaccgtacccgatctgcgcagtggcctgcaggtgattgccgcggaattgtcggtaatggggctggccagagccaagtcgcaccggtccagattggattcatggggctgtgaagcgccacatatcgtaggtgtggaaccacgtggcgctccacgtgggagaggccacgtgggtattggcgaggcgcaggactatttgactgccacggtattggggcccatcaagccaagtgtcaatctgtgcggagacgtactggaaggcctcggcatcagatcggtgaccaaaggcagtcgcaaagccatgaacttgcttgccgatctcgtagaacaggccattcgcccggtttcgggagcttctcacaaggaccagtgatgctatggctgccgtcagcacgcgagccaatgaggctggcacagcgctcagaaccatattcttcggtctgctggatgacgtggcatctgacccgcaggttaccgatttggcggtgacctgtgatggccgcgtttgggcggaccgcggcaatggcatgcgcgaaacagtattgcatgtgccgttccgctcgccgcaagtagttcgagaatacgccgtccaactgtgcgcgcagctcgggcgcagactggatgatgcctgcccgatagcggatgccgccagtccggatggcatccgcgtgcatgcggtgattgccccattggtgccacaaggtgccgcgatttccatacgattccctgaccgaaccatggcatcgctacagcacctgagcaaattaggcgtattcccggctgcttggctgccgacgttcgtgggattggtgcgcaaacatgccacagtgctgattaccggcggaacaggcgtgggcaagaccaccttgctcaaggcgctgctggcgcaatgcgacgtgaacgagcgcatcgtcaccgtagaggaagttcgcgaactgggggaactgggacgcgacgatcatgtctcgttggtaacacgcgaggcgaatgtggagggcgtcggagccataagcctggcggacttggtcaaagcgacgttgcgaatgcgccccgaccgcgtggtgctgggcgaatgccgtggcgcggaaatcgtcgacctattgcgcgcgttcaattctggtcatcacggtggcatgaccaccgtgcatgcggacggcgtgaaccgagtaccgtccaggctgatttcgcttggattactcgccggagtcagtccacaggcgttgaccatgctggcggcaggcgctttcgacgcggtggtgcatttggagcgagtgaacggacagcggcgtatcacgcagatcggcgaactgcgcgtagcacatggtgaactggcaggaacaccgctggcggtatggaatggctgccatcctcctcggtatgccgccgaatgggggcacttcattgaacgatggggcatcgttcccaggccgagtggtggtgggtgatgatgtggtgtgctgttctggtggcgctcgccgtgctgatatggccggggaacaagtccgggaggctgtaccggctggcttaccgcgggcgcgcggtcgattccgcagccataaacgaacctcgatatgccgactcacctcgcgtgggcgttgcgcaggtgattacgtccgccatcgcgcgattgcgaggtggcggcacattggttgaagcattcgaggaacaatccagcagacgcttcgccactcatcgcattactgtggaacggctcataacggtgttcgaacagcggcgtctgcccgacgaatcaccagcgcaggtacttgaagctgcacgcggggtcgccgccgcagcggttttgagcgatgagctcggttgccaagcggtgccatgtctggaagcggtattgactgcttaccggcagatgaggctgatgcagaacttgcgatcgcaagcatgtgccgttcctaaagccactgtggggctgctgagcgcgcttccggccgtcactgtggcattgggcgagcttctgggagctagaccattggcgttcttgcttggatcgccacgcggtgtggtctgcttgacattgggaggatgttgttatgctgccggcttggcatggatgcgggcattgttgaaaggcagcggattatgagtacggtgtgggtacacgccgcggcaggctgtgcggcgattgctggttggctgtataaggctctgtctcgtcatgacagccgcttgccgggcgaggagccggccgtagcgcatgattgcgggtcgtcatggaccatactcatattgcgtatgttgcaggtgtccttgcgtcagggctcctcgattccccgggcgcttgacatggtgggcaaagccgtcggcggcgactgcggcgctcgcatgagcgaggtcgggaactccctgaccagaggggttccctgggctgatgcgtggcatgccgctatggctgttcagcatgagggtgcgccagctgatagtccatccaagggaaatacgaataccacgcaacgagatcttggcctgctgcaatcggctttggaatcgtcatggacgcatggcgatatgcctggtgtgcgcctcgaatccgccattgaacagctggaccgtgacgagcgtgctgctatcgaacggaatgccgcgaagctgtcggtaaagctactgatgcctacagggctatgttttctgccggcattcgtgctggtaggagtcattccggcgattgcgtccttcatgatgtgaatataggcgtgaactgagtgcgcttaggctgaatcttgttgtattgctcggtattgtacttggctgcgtttggttatccacatttgtggtggacgacacgtcgaggtgtggataactcggcaagctagaaccacataccccgtttttcctggtgcatgaagcgttgatagtccacagtggtatgcaccccgcgtcaacccggcgcgggggccaaccactcacatacgcatggggaaggtgcgaagccactgcgcagcttcccctccttaccgaaaggaacgccaatgaatacccctatccccgtcatcgtcgacgggcaggccggcatctttgcgcacagcaaggctcgtgtggccacgctgaacgccaaggcgaaagaacggctatgcctcatggacgcacgcatccgcgccctcatggctgagcccgaagaaggcgcagccactgcggaatacgcagtcgtactcgttgcggctacaggctttgcggcggtgctggtcgccatcctgaagtcggatgccatcaagacgttgctgaccaacatcatcaaacaggctctgaaagtcgggtgacagccatgaagaccatgagatgccggtggaggctcgccagactgccgccagacctatgcacgggatcggccaccgccgaattcgcgatcgtattgcccggcgttatcgccatcgccgggctgatactggcaatgggacgtgtggtcatcgtttccatggactgccaaggtgccgcgacggcggctgcacgcgagtttgtggttaccggtgacgaatcatccgcgcgcagcatagctgcggacgttgcagggggagatccccgcgtcagcattgcccacaacggccaatcgacgagcgtgatggtcgaatgttcggtactgcccggcccactggatgtcactccaacgcgggtcaccggcaacgctacggcgataagccaataactggtcggctgctggctgggcggccgcaatagaaaggaactgcggtgcagggaatgcgttatgaggagggatcgggcacgatggccggagccatgctggttatggcggtgggcattgcgctcgcggtggcggcaagtgtgggcaacctcatgatctgccagaatcgagcgcgttccctcgccgatctcatcgcctttgacgccgcgtatgcgctgtggcatgtggatatcggtgatccatgcgcgcttgctgcaaacatggctgaagcgaatggcgtcacgctgggctcctgctccgtgcgggatgaagacgtgttggtaaccatcaaggtggaaaccatggttccggtggcatcatccgtggagcggatggctcgggccggaccggtgaattgtacggaaggagacaattatcacaataatggaccgtaagcactgatgctctggcgggcttctggacctttggttaaggtgagagcatgagcgagagtgaacgcacagaacgccgtcgcgtggtggccatggtgggcaatcccacttccgataagggccgtggtgccaaggtggatgcgcgagtattgggactgctggaggacgccggccgtgcccataacttcgacgtcatcgacatcaccggcgtaagtttcgacgattccctgaaccaggcgcgtgaacgcgcgcacgagtacgactatctggtggtggtcggcggcgacggcatgatcgcactcggtgccaatgccgtgggttgcggcggtaagccgctgggcatcgtggccatgggctcgggcaacgatttcgctcggggacttaagctgccggtcaatcgcatcgaaaccgcagtggaaggtatcgtcggcgctatcgtgcgcggatcacacattgatgtggacatgggacgcgtgacctctttggatggtggctatgccgtgaacccatccaccggcggggaatacgagtaccgggagaacaagtctgccgagcacccgattgaccggtactatgcgggcatgctgtcttgtggtcttgacgcaagtatcaacgaccgtgcgaatcattcgcatctgccgaccggcaccatgcgctactttgcggcggtgctggtggagctgacgcatatgaagcgttatgggtaccacgtcaaggccacgctggcggacggtaccacggatgaacgagacatcatcacgccgttgctgacgattgcgaattcgcgtcatatcggtggcggcatcgaggtctcaccgtactcctgcttctccgacgggctgttggacctggtgtggatgaatcatgtgccgaacttcggcgaatgtgcggtggccatctcgaacgcctataacggcaagctgctcgcctcaaaggtgttcgggtggaagcgcatacgcgagatcgaagtcacgcgagccgcagaaggcgacgagccaccggtgctgatggcggacggcgaatacatcgggcatctgccattcagggtagtggccgaggactgcgcgctacgcgtgctggtaccgccggccgtagccgcccgtgaggtggactcccgacaggaagtgctcgacgccatcgcccgagacggtcgcgaccccgtaaccggccagttcgcctgacctgattatattggctcccctcattaggctgagccgtaaagcaaacagcccagtgggatgtttgtaggcgagggttcgacgatagtcgaaccaggagaaagtcagccgtaggctgtccgcgattgcggacgagctggccgcgaagcggactgaggggagtgcgggagagcggtaccagagccaatggccgtcagacctcagacgacatagctttcgatatgcagcgtctgcgccatgacctctttgatggttcggtcgctgatgttcggatgcgagcgaaccagcgagataagccccacgattagcgtgaagaatgtctcatggacgttggtgattggcagaccatgcatctgctcgaaatcacgtacggtggtctgggcaatgtagtcggcaatacggtccgccgcgcggtcaatgaacttgatatacagttcggcgttgccatcttggatcatacggtttgagaaggggctctcgtcggcgattagggaacggagcacatgcacgatgtcgtctaatgccttgttcacgttgcctgtttcgcgcgcttggttccactgcttcaacgtggtgaggatttcgtcgatgacgtcatcgagtactgcgtcggctacggcttccttgtcttcgaagtagtggtagaacagcgaacgcgtcataccgacttcgcttgcgatgtcggaaacggtgattttggagaagcctttttccagacacaccttgcgcgcggcttgcacgatggcgtcgcgccgggcatcgccacgggtggggcgtttctcgtcgaggatatcgctcatgggcacctcctgactacaaccgttattgacactatgttaatacaaagaaagcggttaataacaataaaaatgcggtaaccgttgtcagatgaatgtcgttggaatataaagagttttcccgattcggcagctatgagcccggtttatcttgactttttatcggttaattctgagggcaaaggtaggttagtagctatggcacttgcactgtatcgtcgctatcgtccggacaccttcgaaggggtcatcggccaggaccaagtcacggtcccgctgatgcgcgccttggacgaaggcaagcttacgcatgcctatctgttctcagggccgcgaggatgcggtaaaaccagctccgcgcgtatcctggcccgttgcgtcaactgtgccaaagggccgacttcccacccctgcggcgaatgcgaaagctgcaaggacctggccaccggcggtccgggttccatcgacgtggtcgaaatcgatgcggcctcgcacaacggtgtggatgatgctcgagaattgcgagaacgcgctggtttcgcccctgcgcgcgaccgctataagattttcattctcgatgaggcccatatggtcacgcagcagggcttcaatgcgctgcttaaaatcgttgaagagccgcctgaacatgtgatgttcatcttcgccaccaccgaaccagacaaggtgatcggcaccatccgttcgcgcacccaccactatccgttccgtctggtgccgcaggaagtcatgggtccctacctggagacgatctgcgacaaggaaggcatcaagcccgagcccggtgtgctgaaactggcgatgcgcgccggtggcggctccatgcgagataccctgtctgtgcttgaccagctgatggttggttcggtcgaaggcgttatcacccatgatgccgctgtagccctgctcggcttcacaccggaggcgctgatcggtgaggcagtggatgcggtaatcaatcacaacggcgaagccctgtacggcgttatccagaaagtcgtggtcggcggattcgatccgagacgattcgtcgaagacctgctggctcgtgtgcgtgatctgctggtgcttacgttggccggggaccgtgcggaatccgtgctgtccgacacggctgaggccgaggatatggacgatctgcaccgccaagccaaggcgctgggactgggcgcactgaccgccatggcagacatcatcaacactacgttgggtgccatgaccggagccatttctccgcgtatgcgcttggaactgctggccgcacgattgttggccggcagtgaatcaggctttgcaacagccgctcccgcgccagcttcttctggcatgccgcctgcggctgcttcttcgacttcgactacgtcagccgcttccggtacgggtgccagtggttttgccggcgcatcgcgaggcgggtttgccggagcctcacatggtggattctccggtgctgcacgcaaccagcaagcagccgcgcctcagagcaccgcttcccatgaatccgctgtgggagacaatggccctgtcagcagcccagtcagcgaccggcccgcgggctctccgtctgcgcaacctgccgcagcaactgctgctgccaatgcctggggtgctcccgccacgtcgccggccgtcccggcccaaccggtgacctcgcctgcggcatcggataatcggtccatcgacgagaagtgggatgcagccgtcgccgctttgccggaaaccattcgtgaatatgtgtcacgagacaaggtgccgaccgtaaaattcggtcccaaccgtaagagtctgccttgcctgtcgatgacgttcgacaagtcgctgagccagcacgctttcgccttggccgtggacaacagcggtaagaaggcggcgtccgtggtgttggatgccgtgcgcaacgagttcggtgccaatgcggttattgcaccttctgcggtcgcggcgaatggcgagcgagtcgaatccgtcaaacgtatgagcccggagcaattggccaaggtcaagcagcagattgccatggccaaggccggattggccgcgtcgagtttgggcgcgggtctgggcattcatatggggagcgagccgaaagctccgaagccgactgcaacaggccaagccgaggatacggacgacagccatcgagccggccaatccagtgcatccacggcggcgaagagctggagtgacgatgacccttgggccaagccggccgtaagcaacgcttcaccgcaatctgcagacgggttcgcacctaacgagcccgctgctgcgcctgcgcccgaagagcatcacaagaagcatgttgcggttccggacatcagtgatggtgttgatccgtgggccgctccggctgctcctgttgcacccgctgcgtccgttgcgtccgctggactcactggacagtccacggggcagccagccaccgcagctcccgctacggcagttgccggcgcaagcgatgatccatggaatcagccgcaatctcaggctacggcctcgctggcactgcaaccggtcgaagccgacccgtggaaccagccatatcagcagtctcctcacga

SEQ ID NO: 1660 - DNA, 8428 bp, Unknown
  R221_24m  MAG No. k141_125583
cggggcgggcacgtccatgacgatctggtcgagcaggtcggccacgccttcgccggttttgccggagacgcgcagcacgtcgctcggctcgcagccgatcagacctgcgatctcctcggcatgcttgtccggctcggcggacggcaggtcgatcttgttgagcacgggaatgatggccagatcatggtcgatggccatgtacaggttagacagggtctgcgcctcgatgccctgggtagcgtcgacgagcagcaccgcgccttcgcaggcggccagtgcgcgggacacctcataggtgaagtccacgtggccgggggtgtcgatcataccgagcgtgtattcggtgccgtcaaaggtccatggcacgcgcacggcctgggatttgatggtgatgccgcgctcctgctcgatatccatacggtcgaggaagcgatcgcgcatctcgcgctcgggcacaatgccgcttaactgcaggatgcggtcggccacggtcgacttgccgtggtcgatgtgcgcgatgatacagaagttgcgaatcaccgactgatccgtggaacccggctgattgtgttggacgaccaacgcattcctcctcttggcatatactcaaacttcacctagtgtagccgagggactgtattcggcgtggcattgcgcgggtttttccggggctcatgctatcctctaccttttgtatgtccttataacacacatcgtttggagtaaacgtggcaaacattaagtcgcagaagaagcgcgtgctcaccaatgagaaggcgcaccttcgcaacgtggctgtgaagtccggcctgaagaccgccatccgcgccacccgcgaagccatcgccgccggtgacaaggctgccgccgaggccgcctacaaggttgccgcccagaagctcgacaaggctgctggcgctggcgtgatccacaagaaccaggccgccaaccgcaagtccggcctcgctgttgcgatcaacgctctgtgagcataagcctcttaaggttttagcaagtcccgcaagtcatctggcttgcgggactttttatatctccgttcaaagaggtacattggcggtcttgcgaaatgacatctccgttcagaaaggtaccgaatccgagaaagcccaagtataaacgccgtcattgcaacgcttatactcgacgtttcgtgcttcaggcacctctttgaaagcagttgtcattttgcagaaggccaaatgtacctctttgaaggcagttagccctgaggcggtcttgaatcatcctgaggcttgtcttcttcgtccttggtggtatcgccgggatcgacggtatcggcgtgcggatggatgaccgggcgcttgagatatcggctttcgctgggcaggtagacgcgatgacgctcgacggctccgggcaaggtgacgttgaagccgaccgagagcaggcgcagcgccaccacgatgatgacgatcagcacgtcgagcagcatttccgagcacatgtcgaaccaaccgtagtgcacaccacgccatacaagcacggtcagaatgcaaccgatgaacgagggcacggcatagaggtgtttgtctcgaataatcattggcacatcgccgatgaagatgtcacgaatgaggccgccggccagtgctgtgaacatgccaaggaatacggctgtcatgcctgaggaaccgtaggccagagcttttgcggtgccgctgactgcgaatagtccgaggcccagagcatcgatgacagtcatcgtccatttgagtttggtgatctccgggtgggccaccaccgcgatgacgccagagaacagcgtggtgagcacatagcctttgtcggtgatgccgaccggcggcagggcaccgagcatcacgtcgcgcacaagaccgccgccgagtgcggtaagccatccgcacagcatgatggtgaagatgtcgtagcccttgcgaatggcggcaagtccgcccgacaatccccaacacaggattgctaaatactcgatgaccacaaaaacgatgttgttctccaacaccacctgcatgagccgctcccctctggtaccgcttcggttcgtctcagtccgtcttcgttctgttcccgttcatccttattcggcgctacagcccgtcgtacccgagcctacaacaggccttgcctgacgcaattggactagagaacaaaccgaataaatgctattgccggttcgactccacacttttttcttacagcgtcgccagcgcgccaaactttgagcagccaccgacgttagtccttctcatttgtcggaggttggccaaagtttggcacggcaccgacgatcacgcgctccagtgtcgttgccgtgccaacttatgtacagctaacgacgctaagcccctttttaccgtcgtttgatcgccagaacctgacccgttaacgacgctaagctgtctcagcgacgtcagcagtccaaaccttgaaccattactgacattgaacatcccccagcgtcgccagaagctcatgtcttgtctcaccaccgacgcaacgccgtcgctgcctctgccaccggcttcagtttcgagcaatgctcgaagcctgacggcaaacggtaggctgaagcatagtattccgtcatgtcactcatcttgctcataggtttgctcctgttctcatctggatgaaccataaccaacccccgcaacgtgcagaagacctaaatcatattatttgttgcgaaatgttgctaaatccatctgtacctctctagccaggaacatttccaatacgccaagaccccttggaattgttgacattctaaggggtcttagtcggaaacaaaaggtgctagttcagcacaccttccacatccagttgtgcgggtcctcgacttcgccgagctggatgccgagcagctcgtcgcgcagttcgcaggtgagcttgccggagccgccgtcggcgacggtgacgtcgaacttctcggacttgaagcgaccgatcggggtgatgatggcggcggtaccgcaagcgaacacctcggtgacttcaccggacttgatgtcctcgagcagctggtcgagggcgatcatggtctcgaccacgtcgtggcccttgtcctgcagcagctgaatcagagagcgacgggtcacgcccggcagaatgttgccggtcagggacggggtctccacgtggccatccttgtgcacggccatcatgttcatgccaccgagctcttcaaggtaggtcttggtggcggcgtccacaaagcacacctgctcgcagccattctcaacacccttgtactcgccgagcagggaggcggcgtagttgccgccgcacttggcgaaaccagtgccgccagggccggtgcggaaccacttgtcttcaacccagatgctcaccggcttgacgccgcccgggaagtacgggccggacggagaggcgatcacgcagtagtcgacctcctgcggggcgcgcacgccgaggaacggctcggaagcgaacatgaacggacgcatgtacagcgtgtactcgcggcgggacggcacccagttggcgtcgcgcttgaccagcgcggccacggaaccgaggaagtcgtcaatcggcagctcaggcaggtacagacgcttggcggagttctggaaacgctcggcgttcgcatccgggcggaacagccaggtggagccgtcggcatgacggtaagccttgaggccctcgaagcactcctgtgcgtagtgcagcacggaagcacccgggtccatcttgagcggtgcgtacggttcgacgcggcggtcggaccagccttcgcccttggtccaagtcatgtgggtcatgttgtcggagaacacctggccgaaagccggcttgtcgatgagggactggcgcttctcatcggatgcggggttgtcgttcggcagtacggtgaacggttcggtgagcttgtcgagtgctgccggatcgtggtgcgtgttttcagtcatcactagctacttcttcttgactttggcggcccgaaagccaccatatggggtgtgtgctgtgcgcttgtggcgcgaactctgttgcatacttttgcacacccatgtgttactcgtgtggcagagttcacatggtgaaaaaacgaagaagcccacaccgttctcaacggctgcgggcttccacgtttcagttatgttctgaattgttcgctatcgaagcgaccgactcacttggcgtcggcagccggagcagcggcggcgtcagccggggcggcagcagcttccggagcggtggtggactcggtggcatcctccggcacctcgacggtgacgacggactcttccggatcctcgacgtccagctcgacgccctcaggcaggacgacatccttggcgaacaccttggtgccgtcggtcaggccttcgacgctgaccacgatcttctcgggcaggttggtgacgtcggcgcggaccttgagctcctgaatgtcgacgaacgccacggcagcacccttcggggtgccttccacgaacaccggcacctcgacgtcgatcttctcgccggccttgacctcgaggaagtcgatgtgctcgatgatgcgcttgaccgggttcttctgcacgtccttgacgacggccatcttggtgttgccgtcgaaggcgatggtgaacagggcgttggtgtgacgcagggccagggtggtctcgcgcatcggcaaggtcacgaaggcgggctcttcgccgccggcgtagatggtggccggaatcttgttggcaacgcgcagacgacgagcaacgcccttgccgaactcggaacgggcctcgccctcaagcttaatggtggtagccataatggatactccttgtatcttcgtttcgtactgtctcgctcagacgccacgacgcgccgaaagacaccctacaaggagtgaaatacgccgagtcgataacggaatctgtgtcatgtgtcagcatgcacacttccctcgccaaagcaacaattgtcaagtatacgccaaccccggactttgcgtaatgatgcttcgatgacactgcatataggccgtcccagctacgtcaacgtacggtttccgcgaaataatccctaactttgtgaagaacgtacgcttacccgttctcatcatacggttttcacgaaatcgttcgccatttcgtgaaaaccgtacgctcagcgacactcagtgtacggtctttcacgaagttggggatgatttcgaaaaataacgtacgatggtgagtaccgtatcgggaggttgatatgactcgttcggacgacgtcatcaatgaggatggccatgacgtcatcgccgcacacactcgcgttgtcaggggtatggctgcggcacttgccgcgatagccgccaccggagccggcgtcacagccgcggccgccaacgtcatgttcatgttcgcgctggacaccaaggccaaacgttcgatgttcaacatgccgcacgaggagacgccgaaaggcatcgaattcgacatgtccgagcagcttgaggccacccggtggttcgaggaggccaagcaatcggtcacgctgcgcagccatgatggattgaaactccacggctggctgttggacccggattgttccgacctacagccgcatctatacgcgatctgctgccatggctataccggagagcccgcggaaatggccaaatgggcgcatcgctatgcgcaactcggttttacggtcctgctacccgcgcagcgcgcccatgaattgagcgaagggcgttacgtgggtatgggattgctggaaagcgacgatctgttgggctgggtttcgctgatcaccgcagctgatccggatgcacgcattctgctgcatggcaattcgatgggcgccgccacggtgatgatgacggccggcgatgcgcgactcccccgcaacgtcgtcgccgcgatttccgattgcggatacagttccgtggtctcgcagtttacggataatgccgaggcgatgttccgtttgccgcactcgttggccgtgctgctggtcaaagtggccagtcatgtgtctaaacgcaaggctggataccggtttgaggacgcctcctgtgtgaaggcattacggcacgcgactattccgatgatgttcattcatggcggagcggatacttttgtcaacccgaagtatctggacatcaattacaacgcctgcgccagcatcgaccgcgagaagctgctgattcccggcgccgaccacacgatgagcgccagcaccgatccggaccactattggcgtcgcgttaacggctttgttaagcgggtgtttgggctgtagtagatatagaagcttggctcccctctgtgaggggagccaagaatggttacgcgagcagttccttgacggcggcgatgacggactgcagactcttcttcgcgtcaccgaacagcatctgggtgttgtcctcgaagtagagttcgttctggataccggcgtagcccatgccgcggccacgcttcatgaccacgacgttctgggacttgtcgacgtcgagaatcggcataccggaaaccggggtgccaggacggcgagcagccgggttggtcacatcgttggcgccgacgaccagagccacgttggcctgcgggaactgcgggttgatctcatcgagatccacgagctcctcgtagggcacgttggcctcggccagcagcacgttcatgtgaccaggcatacggcctgcgaccgggtgaatggcgtaggagacttccacgccatggcccttgagcagttcgccaaggtcagcgagctcgcgctgggcctgagcctgagccagaccgaagccgggcacgaagatgaccttctgcgcgtagacgagctgaacggccagatcgtccggcgtggtctccttcatggtgccttccggaccgtcgccagcagcggcggcgtcagcaccaccgccgaagccaccggccaagacggagagcagcggacggttcatggcctgagccatgaggatggacagggtcacacctgcggaaccgacgagtgcgccggccacgatcagggcaacgttgtcaatcgccagaccggacatagccacagccgtaccggtgcaggcgttgagcacagagatgacgacgggcatatcggcgccgccgattggaatcacgaagaccaagccgtagcacagggcgaacacggtggtcagaatcgaccacagcagacgctgttcgggctggacgcacagcatgaccagcgaggcgacagacagcacggcgaacagaatgttccatacgcccttgcccggcaggttcagcttcttgacccacttgatgccctgcagcttgccggcggcgatgagcgagccggtgaaggtcacagaaccaatgagaataccgagaccagcggtgatgagcaccacgatgtccggggtgccttccttggtcaggatgtcgttcagggccacgagtgcggcagcgccaccacccacggtgttgaacacggaaaccagctgcggcatgtcggtcatcttcaccttcttggcggagacgacaccggccacggcaccgatcaggatgccgacgaccagcaccaccacggcgacaatgttcacgaagcccttggcgaaaagcacgatgaacgccatgagcacggccacgaccatgccgaacgcggagatctggttacccttgcgggcggtcttcggagagttcatgaagtgcaggccgaccacgaacaggacggcggagaacaggtagacgaaccatgcgacgatgtcgatggcgccaacggttgcggaggtcattacttcgactcccccttcttctcgttcttgctggacttgaacatctcaagcatgcggtcggtgaccacgtagccaccaacgacgttcatggtgcccagcacggcggccaggaagatgaacacgtaggccagtgggctattggcttcggctgccacgatcacaacgccgacgatgacgatgccgtggatggagttcgcgccggacataagcggcgtgtgcagggtggcgggcaccttgccgatgacctcgataccgatgagcagcgcgaggacgaacagggtaatggaaacgacgagagtaggcatggtattccttcttccttacttctcggacttctcggcatcggcagcagctgccggggcggcggcacgaccggcaaccaccagcgcgtcgtcgagttcttcggtgagatcctggccgagcttgccgtcacgcacgaagtgcacgaggatgtcggccacgttgcgcgaaagcaagttggatgcggtcgtggagacgccggaggccaggtagggagcgccgatcagcttgacgccgccgtcggcgttgccgccgaggtcggatgctgcgcagtccacgatcacggcaccacgcttgagacccttgacgccggctgcggtgagcagcaccgggggcttacggcccggaaccttggcggtggtgatgatgatgtcaaagccggcggccttctca

SEQ ID NO: 1661 - DNA, 18740 bp, Unknown
  R221_24m  MAG No. k141_126422
agaaggtggtgagcatcgcgccgccgacaatcgagccgatggcattgccgaagttgaaggccacctgcacggctgcgccggcgatgagctcgccgccgccttggccggcttcggtcatcagcaattgctgtggagcggaagtaaagaacaatccgacggcgatccagaacgtcagtacagcggtcatcggctgattgcccggagtgatcagcaccagcaacaagccgaggcaggagatggactgacctattgcggccgcgccggcatgcctccaatggtcggtcagacgacctccaagcagaccgccgatgaccataccaaagccggcaagcatcatcagcatcggcaccagggaagacgaccatccgccggttttctgcagccagggggagacgtagctccaccagcagaacacaccggcattgccggtgaacacggcggccaaaatcacccacgggccacggcgggtgaggaacttgaactgaccggcgatgcccgcgtctttaatcggtgcaacgtacggaatccacgccaacgccagcacaatcgtcattgccgcccaagcggccaaaatgccgaaggcaagacgccaggaaaggaactcggccatcagggtgcccgccggtacgccgagcatattggccacggtctgtccggtgaccatcacggatacggcctgcgcttccttgcctttctccgccagagtcttggcaatgagcgtggccgtgccgaagaacgcgccgtgcggcaggccggcgacgaatcgcgcgacgaccagcatggcggcattgacggaaaacacggaagccagattgcctaccaaggcaatcgccataaacaatatgatgaggttcttcggcggcaccttgcggccgaacaccagaatcagtgtgccgaagcacacgccgatcgcatacgcggaaatgtaatggcctgcggtggggatgtccacgccggtggcggccgcggcctgcggcagaatacccatcatcacgaactcggcggcaccgagaatgaacgcgcccgaagccagtgcaagcagactcttcttcatggttcctctaattacttcagtattacttacaaaaacagtgcggcaatcgattgattcgagcgatatattacggtggtccgccaacaaatacgggccttgccgcgacgcggtttgtcgctgtgcgcggcgggttgtttaccgctgtccgatcgcttggtctgattgttgggttaggaaacgaaaaaccggattgctgatttctcaacaatccggtccagttgtcgggctggcgggatttgaacccgcggcctcttcgtcccgaacgaagcgcgctaccaagctgcgctacagcccgtttggcaacagacgtagatattacattgtggtggtggacaatgcaaatcggcatgtcgcgagtgttgcgtgatggtggattcgccgtgtgtacaggtctctcaagccttgtgcagagccggttttgcgtcatgtgagcgggtgttcagatggccgtacggtctgccgggctcataatcgccggccttgcgtacactgatgaatcatggctgaagttgtcgaaaataccgaaaacactgagaatgaaaccccggccgtcccgcagatgagcaccgtcgaacgtgcggaaatgctgctcgagcaggacgccaccatccgcgagaagatcaagtccggtgccacgctggacgaagccgtggacccctccaacaaggagttcggcccgctggctcaccccgagcaggtgcagatgcgcgtggccaagcgcgcgatgatgcttgaggccggcatcgccccctacccggtgcacttggacgtcaccgacaccatcgaggcggtccgcgccaagtatgacggcaagctcgaggctggcgaagagaccgaagacatggtcggcattgctggccgcgtgctgttcctgcgcaacgcgggcggcctgtgcttcgtgcagctgtccgccggtgacggtaccaagattcagggcatgatctccaagaaggagattggcgccgactcgctcaagcagttcaagcagctcgtcgaccttggcgatcacctgtacctcaagggccgcgtcatcgcctccaagaccggcgagctgtccgtattcgccactgagtgggctatcgcctccaaggccctgcagccgctgccggccctgcacaaggacctgaacgaagacacccgcacccgcaagccgtacatcggcatgatcgcggacgagaacatccgcaacatggtgcgcaaccgctccaaggccgtggcctccctgcgccgcacctttgacgaccacgacttcctcgaggtcgaaaccccgatgctgcagaccctgcacggtggcgcggccgcccgcccgttcaccacgcacatgaacgccttcgaccttgacctgtaccttcgcatcgccccggaactgttcctcaagcgctgcctggtcggcggcatcgatcgcgtgttcgaaatcaaccgcgacttccgcaatgagggcgtcgacgccacgcatgcccccgaattcaccatggtcgaggcctaccaggcctatggcacctatgattccatcggccagctggtcaaggagctcgtgcagaagaccgccatggacgtctacggctcgcacaaggtcaccctgctcgacggcaccgaatacgacttcggcggcgaatggaagaccatcagcatgtacgattcgctgtccgaggcattgggcgaggaaatcgtgccgaacggcggccctgagcatcccggcacctccgttgagcatttgggcgccatcgccgacaagctcggcgtggagcgcgacgacgtggagaaccacggcaagctcgtcgaacacctgtgggagcacttctacgaggacaagctttacgagcccaccttcgtgcgtgacttcccggtcgaaacctccccgctggtcaagggccaccgcaccaagcccggcgtggtggagaagtgggatctctacgtgcgcggcttcgagctggctaccggctactccgagcttaacgacccgatcgtgcagcgtgagcgtttcgtggcccaggccaaggacgcactcgccggcgacgaagaggcctgcgacatcgatgaggacttccttgaggctctcggcgtgggcatgcctccggccggcggtatgggtatgggcattgatcgactgcttatcgccttgaccggtgccacgattcgcgagaccatcaccttcccgctggtcaagccgctcgttggctgattaggcatactctggctcccctcagagaggggagccagagttatatatgaaagggattgcttatgtctatcggcttgtgggttcggggcgcgcgtcccaagaccttggccacttccatcgcgtcggtgatggttggggcggtgatggcgtacgtgcatatcgagcggtcgggcacctgcatcgcaatatatccagaaccggcctcctgcgccacggcccgtgaacagcagaccctgctgatggaccgattctggccggtgaccatcctgtgcctgctagtcgcgctgttcctgcaaatcgccgtcaactatgcgaacgactattccgacggcatccgcggcactgacgccgggcgtgacacggacgaatcgaaatcaggcaaaccccagcgactgaccgcatccggactagtaccggccaagcatgtactgttcgcggcgatgatttgcgccgccatcgcctgcatatgcggtgttgtggcggtcgtgctcgcccaagcatggtggttgctggccgtgggcgcggcctccttgctggccggctggttctacaccggtgacaagcatccgtatggatacgtcgggctgggagaagtcggcgtgttcctgttcttcggcttggctgcggtattgggcaccgaatacgcgctgtgcggcacggtggacgtcggcggactattgggtgctgtggcggctggcctgttctcctgcctgatcatgatggtgaacaatatccgtgacatcgacgaggatcgtgagcatggcaaacacacgctggccgtacggctgggggagtccggcgcgcgtacgttgctgattgtgtgctgcgtcatcgcatggatcatcgccctgctgatgtgcggtacattatggtggccgtggggtgcggtgctgttgctctcgggcaccggaatacctgtgcgcatggtctccagcgtgaataaacgtcaattccgcccggctctgcccgccgccagcttccagaccttgctgtttgcggtggtgctggcggttgccgtggcgctatgagagcgaaataataagacgaatactcgtgtttgggcgcacgcggctgtagactgaaccgtatgacttataaactagtactgctccgtcatggacagagcgcatggaataaaaccaaccagttcaccggctgggtcgacgtaccgctgaccgagcagggtgaagccgaagccaagcgtggcggcgagctgctcaaggagaagaacgtccttccggacatcgtgttcacctccctgctgcgtcgcgccatcaacaccgccaacatcgctctggatgccgcagatcgtctgtggattccggttcagcgtgactggcgtctcaacgagcgtcactacggcgctctgcagggcaagaacaagaccgagatccgcgaagagtacggcgacgagaagttcatgctgtggcgccgttcttacgccaccccgccgcccgagatcgacccgaacgaccagtacgcccagaacaacgacccgcgctacgccggcgatccggttccggaagccgagtgcctggccaacgttgttgagcgtgtgaagccgtacttcgagtccgccatcgagccggagctcaaggccggcaaaaccgtgctgattgccgctcacggcaactccctccgcgccatcgtcaagatgctggacaacctgtctgaggaagagatcgccaaggtcaacatcccgaccgccatcccgctgctttatgagctggacgagaacttcaagccgatcaagccgcgtggcgagtacctggacccggaggctgctgctgccggtgccgccgctgtcgccgctcaaggccagaagtgagcctaagccgctaacacggtacaagctgtaaggggagtcgcgcataatgtgtggctcccctttgctatgcctgccaaatccccatggggcggtgattaccccatggggcggtaaaactctcatggggcggtaaaaccctcatggggcggtaaaactctcatggggcggtaaaaccctcatggggcggtaaaactctcatggggcggtatgccagaatggcttaattccgcggtttcacatatctttcaaaccgccccatgggcaagttaccgccctatgggtgttttgccgccccatggatacgccggtgtaccgcccagaagcaacaaaaaaacggcgtccagccgtagccggatcgccgctttcgggcatcctcctcaaaccataggaggacaagtgttcagttattcgcccaatgtgaggacaagccccaatcagtcgatgtcggtgccctcgtcgcgggtcggctccttggtggggtcgaagccggagacgatgtacaccacacggcgggcggcggacacggcatgatcgccgagacgctccaagaagcggcccagcagcacgatatccacggtctgctgacgggtgatgtcatcggacagcgccagatcgaaggtctggtggtgcaggttgtccagcttgtcgtcggccaggatgatggcctcggcggtcttggcatcgcgatcggagagcatggccaccagctggtcagcggtgttgtccaggaagtcgatcatctcggcgaacaccggctgagcggattcgggaatcgcggcggccgggtaggtgcggcgagcggcctcggccacgtggcgggcaagatcgcccatacgctcgaacgtggaagccagacgcatggtggaaacgaccacacgcagatcggtggccaccgggttctgcttggcgagcagcttgacgcactggtcgatcacagaggactccagggcatcaatctcgatgtcgccgtcaatcacagtctgtgcggcttcaacgtcctgattcagcagggcttccccagcgcctttgatcgccttgcgcacgttctgcgccatacggtcgaggtcgtcagcaacctgcttcagctcctcgttgaaaataacgcgcatttctctagcctttcatgcttgcttattgcaacctgtaccagtgtattattccagtacttgttccccacttcaacgtaggtaatggcaacctcaagttgttctactgttcattgggttgttcacctgaaattcatgttaccggcgcgccggcaaaccgcaatcccggcgtgtggtgtgaaagaatgggggcatgacacagatgccgctcgtcgccgcgattgctcttattgtcgcggctgttttatttgtggtgggaatcatcacgctcatcgtgggatttgcgacacatcgagtgtctgtggaatcgccgctggccgatgatgacgacaatgacgatctgtccgacgacaccgccacgctgctgtccatgctgccgggtgcgtccgtggtggtcgacgagcacgacgaggtggtccgctgcaatcccgccgcctaccgcctgggtgtggtgtcagatgacgccatcgcccagcagcaggtgctggatgccattcacgaggcgcgcaagtccggtggcaagcgccagttcgacttgaccaccgatactccggagcggtacgtcgcagaccagaacaagggcgatcacgtcgccacgcagtccgtccaccgccccaactggctgaaggtgactgtagggcgtatcaacgagcagttcgtcatcgtgttgattaccgatgtcagtgacgtgattcgtttcgctcaagtgcgtgactcgtttattaccaatgtatccgagcaattgttgggccccactgaagctttggccaaactcgccgattcgctggagtccggcaatctggacgaacagcaggtggctgccgatgctcgccaggtgcgttccagctgcagcaagctcaaccatatggtgtccgatttgctgctgctcatacgcgcacaggagccgattacgccgtcttccgccaaccgactgaacgttatggaacagctcgaggccacggtggcgcgactggagccgcaggcggccgcggctggcgtgcagctgaacatcaagggcgacgatgatctagtcatcaatggtgaggcggatcagatcgacagcgccgtgaccaagctcatcgaaaacgccatcggctattccaaggaaaatggtgtggtcagtgtgtcggcatccaaagacaaggatggcgaccgtgcggtgattcgcgtgatcgaccagggcgcgggcatcgcgaagaaggaccaggcgcgcatcttcgagcggttctaccggggtgcggaacagagcaatcgcacggcggatggcgtgggccttggcttggccatcgtcaagcatgtggcgctaacccatcatggcgatgtgaccgtatggagcgcgcccgggcaaggcagtacgttcagcctgacgttgccgttggcgcagtgaactttattactgtccgaggcggcggtagtcccagcggtcgaagtattcccaaatcagcagtagcaagccaataatgacaccggccacgcacataatcaccaacggcattacgctgtagcccacggccagcagaatcagcacgacaatcaacgccacaatccatagaccggtaccgatggcaaacaccttacgcaggtccacccgtacgggcttgggcgcgggtttgcggacggcagggtcaatgagaggcgcgaacttcatactcatgcactgtagtaagagtagggaggggcgtcaaacacctctccctacgatttattcaatcggtatcagttgagaccgatcaatgtgcatggcatatatggtcggccatgcgaggcatagaccgccatcacaggtgctcgaccacatagtcgacgcacttggtgaaggccatgacatcagccggttccaccgaggggaacacgccaacgcgcagctggttgcggcccagcttgcggtagccggcggcgtccacgatgccgttctctcgcaggatggacagtatctgggaggcctggacgcgctcgtccagatcaatggtgaccacggcgttcgagcgggcgtccgcatcgacgacgaacggagcggcgtattcggagcgctcggcccacgagtacaggatggatgcggacttggcgcaacgcgtggtggcccaggcgaggccgccgttgctgttgagccagcgaatctggttttccatcatgatcagggtggccacggcgggcgtattcagggtctgatccttgcgggagttgttcagtgccgtggtcagcgagaggaacggcggcacccagcgatgtgcgccttccagatgagcgcttgattcgacgcatgccgcacgatcgatggcttcgggggagaggatggcgacccacagaccgccatcggcaccgaaggccttctgcggtgagaagtagtagacgtcggtctggctgatgtccacgggcaaagcgccggctgcgctggtgccgtcgatgacggtcagggcaccggcttcacgactgccgggcacgcggcgaatcggggcggccacgccagtggaggtctcgttgtgagcccagcaatatgtgtccacgcccttggtgagctcaggcagacggtaagtgcccggctcgccggggaacagcaccgggtcttcaaggaagggtgcgttcgcggcggacgcggcgaacttggcactgaatgagccatacgtgccgaatgcggcgcgacgggtgatcagcgaagcgcaggcaatctcccagaacgcgctggcgccaccgttgccaagcgccacctcatacccttcaggcaggtggaagaactcgcgcagaccttcacgaatcgaagcgaccagttgcttgactggtgcctggcgatgtgatgtgccaagcagggtggtggcgccggcatcgagcgcggcgatctgttcggggcggattttgctgggaccggagccgaagcgaccatcttcgggcttcagcgactcgggaatactcagtgtgatagtcatggtttcaagggtagaccagtgttggggaatatcgcggataatgctcggtgtgcgggattgctgcggggctactgcggaattccggggtgccgggcggtagtagcggcaatgcggaatgcagtgcagaatgtacgcagcacatcatggctacggtgtgtcggaatgacatgagttagtgattcttccgataaccggatagtgaggttcgtgaacgggcggaaacaaggcagtttttcaccctgccgcacggttacgtaaatcgtttgacatgcccggatggtgggggatcgcattgaggattgacctctgttcgttgtacagtactcaattgtgccggtcatacggggtcgttgaaaggaccccgccgaacccatccaaggagttaacgtagtatgaagcatgcttcgcataaagcgaccacggtctcgcgccagaagttcagcttagcgaaggcattgtttgcctccggcaagggttctcattccgttcgtgccgtgcgcgcggtgcaatccgctggcagcgacgccgttgttttggggcttgatccggtcattgccgagaagatcaatgaaatcgctccccagactcgtcgttccattcgtgaggccgctcgtgccgctgaacgccgtagccatattcttgcctcggcctcactggccgctctggtcggcacggccgcaggtgctcttgcattttccaacaataaagacgccacgaactcgttcgtggctgatccggccacgacgaccacgcagattaagcgcatcagcgatgtgactgcggcttctcgttccgaagcacgtactgatctgagttcatcctccgttaccgcacagtccaccaatgaaggcggttgggggctgagcaattcagacagcaccttggacgccaagctgatgaatcgcaataatgcgaacaatcctgtggtgtcggctctcatggatgccgatggcgatgctgtgccggctggcttcaacccgaaccatgccgttggcaccaactccaacaactatccgtggggtcagtgcacgtggtacgcgtaccagcgtcgtgccgaactgggactgccttccagcggcaacttcggcaatggtggcgagtgggcggcgtcagcttccgctctgggctattgggtggacaacactcctcgccatgtcggtgatgctgtggtgttcgctcctggccaggccaatgccgatggcacatacggccatgttgccattctggaaaagatcaatgccgacggctccattgagatctccgaatccaatgccaagggattgggtgtgatttcgacccgtacgttcagcgccaccgaagccggtaagttccagtacgtccactactgattcatttcattggcttacattcggtgattactgttcggatgtgacgtcgccctatcggcaatcgttcgcgcgaaatgacatttcaagtgttgcgaccgcgtattagtccgaactgacctgtgccgacacgccgatatatcccaatagctccggggtgttttatttcttccatcctgtacgagttaatgcgcaccgtgtaaggtgatggttctatgaagaccaaaactgtagcttcttccattgttgccgcgattgtctcctgtgcttgctcgtttatgtttgttcctacagcgactgcagctgagggtgttactgtgacttccaccaagtccttcccctcgtacacccaggtgcgcaaagatctgacgactgaagccactgccacgaatgttgaggacaatgctgattggggcggcattgagaacctcgacgtgccgcagacggaatctcaggcggaaaaggatgccgcagcggccaagaaggctgccgaagaggaggccaagaagcagacggaggccgaggctcaggcgacccagaagcaggccaacgccgcgagccgtaatgagtctcgctcttctgttacttattccgatgccagtggttcggtttccgctggtgccggtgcctctatcgaccgtgcgtattctttgatcggacagagcatggactgcaccgcattggtcagtcaagcgttggcggcccgtggtattaacttccacggttggcctgaagagtacgtcaatgttcccggtggccacgtagttacagacgggtccctgcagccgggcgatattctgatttatgccaacaccggtggatggaatggcggcgcgcactacgatcatgtggcgctgtatgtcggcaacggtcaggcggtccatggtggctggaacggctacagcgtggctctcgctagcgccatgaccgaaaaactcaccatcgtggtacgtatcccgtgatgcagtcttattgattgatatattgcaggcctcggatgccaatcggtatccgaggcccgttgcgttctcctgccgagtgatacacccgcgacatcatcttcgaaaagacattcctgttatgaaatcgacccatgtgtgctaaggtaaggcgctgatgacgaacgttaagaatattatttccacatcagtggcggttatcgccacgggtgccatgtttgcatgcgtagccccgtttgcctctgccgattccgcgcagacgagtgctgtggtgtcctcacgttctttcccgaaggcgagttcggtgaagaagaatctgttcgccgaatccacctccacttcggttgacgagaactctaaatggggtggcatcgagactcttgatgtgccacagaccgagtctcaggccgagaaggaagctgctgctgcggcggcggctcagaaagccgctgatgaagctgcggcagcccagtccgctgctgctgctgcagccagccgctctgaacagcgtgcgtcgattccacaggttgacttgggtaaaatgactggcactggcgctgagcttgccagcttctcactgaagttccaaggctatccgtatgttgccggcggcaacactccggcaggatgggattgctccggttttgtacagtacgtcttctcccagtttggcatttccctgccgcgaacctctggtgctcaagccactgtgggtactccggtcgcaagcttggcggatgccaagccgggtgacattcttgcgaatggtactcatgcggccatttacatcggtaacggacaggtgatgaatgctatgaacccggtgcagggaacggcaataagcaacgtttccgtgttcggtggagctggatattccattcgccgcgtgatgtaacaagaattatgcggtaagcgaattcgtattaaggcacgtcctttgggatgtgccttttttcgtatacgcggatttctttttgagcggaggataccggccaaaccgagtgtcgcggggtattgttggaggtacgcggtattcgtgccacaataacttcaaggaggtcgtcatgattaacgacaaggccattctcgtcggcgttgacgggtcgcatgccagttacaaggcaacatggtgggccgcgaattatgcaaagcacgcggggctgacgctgcagattgtctgcgcatattccctgccgagctatgccgccgtttcgttcgatgcaacttacacggcgatgggggacgataacgccgcgcattccgatgctcaggagattctggccaaggccaaggccatcgcagacgagcagggcgtcgaagccgccacactgattgttaccggagacccggcatcggtgttcgtcgaattgtcgcgtaactacaatctgatcgtcattggtaaccgtggcaagggcggtctggccgagcgtctgctgggcaccacgtcctcgtcgctgccggcatacgcctactgcccgattgtagtggtgccgtacaccgatgatgacggcaacctgatgcacctgaacaacacgattaccaaggtggccgtaggctccgacgaatccaagtggggtctgaaggcgctggacattgccgccgacttcgccacgtgctggggtgcggaactggacgtgatttccgctgtgccgaacctgaagggcgtggatggcgaggatgccatcatggagtcctacaaggacgatcttgaggtgcgtatcaagccgttgcaggaatcgcatcctgatctgaaaatcaacaagcagatcgtttccggcccggccgtcagcgcactgaccaaggccagctacgatcacgatgttgttgttgtcggctcccgtggtcgcggcggcttcaccggtctgctgctgggctccaccagccagggactgctgcagcatgcggccggcccggtgtacgtggtgccacgcaagtatgttgaggctgcggaatcgcgtctcgacaccgtgccgagctcgcccgccgaagtgcctaccaagtcgctggaggagattgccggcgtcgaggagattccggtgtccgcagccgagcctgaagtcgcccagcagatcgaaaagaccatcgatcccgacaggcagtaaagtccgggtatacaatgagctccctcatcagagggagctcaatttattagtacgtcggtttattagtacgtcagtgcttgacggtgacgttcatgcgcaccggggtctcctgtacgtaggtgtgcttgaccgtgcagcccttgtcgatatggcgggtgacgcgttccttgagcttgttggcatcctcctcggacaggctggcgtcagaagcatcaatcaccacctgctcctcgaaaccggtgtaggcgtcgttctcggggtcgtacgtgccatccaccacgatcttggcacccttgccctcacccagcgtatgttcgatggcgaactggctggacagcgcggcgcaaccggccagcgcgaccttcatcagatcgcccggcgtgaactggccacgatccttgccgaacttaatgtgcgcgccatcgtcgctgaacgcatcccacgaaccgtccttgttgcgttcaacccacagtcgcttacccatagctgctcctttattttcagccgccggcgatctggcccatcgccatgccagcgggggagcgcggcacccggccgctctcccgcatcatcggacttctctattatgcccctaagctacactggtgcacatggctttgaccgaagaacaactcgcagatattcgctcccgtatccccgcacgtcccgaaacggacattccgatgccctatgaggacctggtgcgcaagatcctgaccgaaggcacgctgaagtccgatcgcaccggcaccggcacgatttccctgttcggccagcagatgcgcttcgacctgtcgaagtacttcccgctgctgaccaccaagaccgtgttcttcaagggcctggcctacgagctgctgtggtttttgaagggttcctccaacatcaactggctgctggagcacaacgtgcatatttgggatgagtgggcggacgagaacggcgacctaggcccggtctatggcgtgcagtggcgttcctggcccgcaccgacccccgaggacccgaatcgcaccatcgaccagatctccaatgtgctcgacctcatcaagcatcatccggattcgcgccgcatgatcgtctccgcgtggaatccggccgaggtggagaagatggcgttgccgccctgccacgcgctcttccagttctacgtggccgacggcaagctaagctgccagctgtaccagcgttcctgcgacatgttcctcggcgtgccgttcaacatcgcttcctactcgctgctcaccatgatgatggcgcagcagaccgggctcaagccgggcgaattcgtctggaccggcggcgactgccacgtctacgacaaccacgtcgaccagttccttgagcagctgggccgcaagccctacccgtacccgaccatcgagattcgtaaggccgattccctgttcgactaccagtatgaggacttcaaggtcgtcggctaccagcatcaccccactattaaggcacctgttgcggtctgatgctgattaccatttcgtggacagcgaagactgtggaggtgacggaccccgagtcttcgctgtccactacactaaggcccagttccgcaatccaggaggagtaagcgaaatggagcatgacagtagccgtagcggctatcacgaacccgagcccggatctgccgggctgtctgccactgaagaagactggggtgacgattatcccaagaccttctcggtgaatcttatctgggccgaagcccgcgacaaggaaggtcgcgccggtgccatcggcctcaatggcggcatgccttggcactgtgccgaggatatgaagcatttcaaggagctgaccgtctcccatccggtgattatgggtcgtaagacttgggaatcgctgggggtcaagtaccggccgctgcccaaccgcgataacatcgtcgtttcccacgatccgatgtaccgtgcgccgggggccactgtggtcaccagtcttgacgacgcgctcgatatggcccgtcaggaggcgattccggacgacggtctggatcgttcggagatttggatcaccggcggcgcccagctgttcgccgaggcgttgccgttcgcggacaaagcctatgtgactgatctggccgtcactgtggatgccgacagctatgcgcccgatatggcgtcgctggtcgaggccgggatgtggcgggaagccgaagtgggtgagtggcgtacgcccgccaaggaggagtccggcatcgattcctatcgtttccgtatcttggtcaaaaccaagtaagcatgcgaatccggcttgtgtcctttatggcggcatgagccggattcatattcattcgaccccaaaaacacattcgggccgtgtgcggcccggtgaagcccgattgaggattgattcaaagctatgagcaatacccagccctacaccgtaatgaccgtctgcaccggcaatatctgccgttcgcctatgggcgagatcattctgcgtcacttttttaatgagcgcggtcttggcgaccaggtgaacgtggaatccagtggtgtgtccgacgaggagtggagccacccgatcgacccgcgtgccgtgcgcgtgctacgcgaacgtggctatggtgatgagattccgcgtgaccacttcgcacaccgcatctcacgtgaggaaatcgaccgtaccgacctgttcctgccgatgaccgcctcccacatgcgcgccctgctgcgcatgctgccggccggcaagcgcgccgaagtgcacatgtaccgcagcttcgacccgaatctgcccaagccgaagcccggccgcgaggatcagattgatttggtggatccgtggtacggcggcaagcacgagttcgaggtcgccatcgaccagattgaggaagtcgctccgtacatcgtcgattgggtggcgaagcagctgtaggaatcggcctgtggccgatgctgtgtgtttcgcagtcttacgaccgcgggtctctacctccgcttcgctgcgttcagcacctccctcacagagggaggtggtcgccgaaggcgaccggagggagagatcaacgaaggagaagccgagcccaacctcagaacaccagctgcaccagtagcatgtatacgatcgtgccgccggcgattgaaagcagcatactgcgtttccagacgtgcagcagcacgatgacggtgcaggcgatgagttccggaaggccgtgtgaaccggtcagaatcggggtgttgcgcagtgcgtataccaccagcagaccggtcatcgcatagggcaggactcggccgaaatattcgatgacgcgcggcggctgcttggattcgggaaataccaggaacggcagaaaacgggtgcacatcgtccccagcaccaccgtcacgatggtgagcgcgccttgccagatggtcatcgtcatcgcgtctgtccttccttctgctggtccgctgcgtggctcatggcacggtctgccgtggcttccggggcgtcggcggccggccgcaacacatccagatgcgggcgcaacgcgacgaacagtatcagcatggcgatcattgagggaatcatgaaatcattggccccgaatatcagcaggcaggccagcgacgtcagcacaccgatgacggcggacagtcgctcgcgatgcttgccggcgagccactgatcgaggaagatcaccagaaacagcgcggtcagtacgaaatcaagaccgtcggtattgaacggcagatgcgcgccaatcagcccgcccagtgtggcgccggtcacccaatacagctggttgcacagcgtgacccagaagtagaaccagcttcggtcgataccggcggggattttcgcggtggagttgatggcaaaggtctcgtcgcacatgccgaaaatcaggtacggacgcttccagccgagccccttgaatttgccgagcatggatagtccataaaacaggtgacgggcgttgaccatcagggccagcagaaagccggcgagtgggttgaacgcggagagcagcagattcaccgtgacgaattccatcgaaccggcgaagatgaacgcgctcatgcacatcggccatacaaacgagaagcccttggtgcccatgagaatgccgtatgaggcgccgagaaacaagaatcccaggcaaatcggtatggtcagcggaaacgccgctttgagcgccggcaaccaggcgttggtgttggcggtgtctgccatgtggatgatgttctccttgtgcaactggtctgccggccgatattcgccgataatgccatatgtggttatacacgcatggtgccgataaacgaggtgaggacggtgtcgggactctgtgcgcgaagtcacagtgtggatgatgtcacatcgtctacggtgggacagtccttgtggtgggcgtgaacacgtgctgagatgaaagcatgagcacatatcaaggtaacgaaccatcgcaaatcgtctacaccgctacggcgcaggttacgggcggccgcaacggccacgctgtgagctatgagccggaactggagttcgacctggacacgccggtcgccatgggcggcaagggtcagggcacgaaccccgagcagctgttcgccatcggctggggcgcctgcttccaaggagcgttggcgcttgccgccaaggagcagcgcgtggcggccaccaagctggccaagagtcaggtgcgcgccagcatctcgctcggtcctgaaggcgagtccttcggcctgaagggcaagattgaggtagttctgcccgatcttgacgatgaggctgccgccaagctcgtcgagcgtacgcaggagctgtgccctactccaaggccaccgcgggcaacgtgcccaccgaggtcgttgtggtgaagtcgctggactgaagccttccgggttgaaacccgagtccaagcattcggcccgtttccttcagggaagcgggccgaatgctttcaggcctgatcccgcgaatacgaaaagacctcgatcgctatgaccgaggtcttcaatgaagtacccccagagagggggatacgaaaggcaattgcctcaagagcaaacggcaaatccttcaaatgtatatttacttattatcaatctgaattttaggtatagcaacgattcccgcctccttccagtagacacgcgagcggtgttgctccttagcgtcatcttcatgcggctgatggccgaaactacctgtgacgagtgatcgaatcatcctaaaccccaatgattgcaatacctaaggtgccgtaggtgcatttttaggtgcaatggctcgc

SEQ ID NO: 1662 - DNA, 3993 bp, Unknown
  R221_24m  MAG No. k141_127739
catagcacatcacggctgccacaccgaggatttcccgtcgggggctagatatatgcttccggagcatatactttccggaaacctacaggtcaatccgtgaaaatccgcgattccggacacactttttgacccttaacccaccattgtcgaggaattcggccgcactcagtacaagtcatatattctcatcgatttcacacgtttgccgcgcgatgttcgcgacatcttcgaaaaccagcgtgatgactttgacacatttttcatgctgttgtctgcgtattaccgcaagcgactgtacgagcgtgaatcgttgattattttcgacgaggtgcagcggtatccggcggcgagggagctcatcaaatatctggttgcggatggccggtatgactatgtggaaactggttcgctgatctccatcaagaggaatgtggcgaatatcgtcatcccctccgaggaacggaaaatggacatggggccgctcgattttgaggagttctgctgggccatgggggaggagctgcttgctgaaacgattcgcaaatcgttcgagcgtctggtcccgttgcccgatgcgctgcacaaacgagcgatgaggctgtggcgcgaatatctgctggtgggcggtatgccgcaggcggttgccgattatgtcgagcagcgcgattttggcgaggtggatttgatcaagcgtggcatcctgcagctgtacagtgatgatatcggcaagttcgccaatggcgatgccggccgcgtgcggggcattttcgctcagattccagggcagctgtccaagcatgagaaacgattcactctggcatcggtcgataagggggctcgatctcgtgaatacgattcggcgttcttctggttggaagacgcccgcttggtgaacctgtgccgtaattcgactgaccctttggtggggctgggattgtacgaagataacgattcattcaaatgctatatggcggataccggtttgctggtgtcgcaggcgtttgccgatcgagagacaacgccggatgatgtgtaccgggatattctgttcgataaactctcgctcaacgaagggatgctggtggagaatgcggtggctcagcaattccgggcgaatgggcgcaaactgtatttcttctcgcgcttggatagggcggatgcctcgaaaaccatggaaatagacttcctcatcgttcgggaatacgataatgccgcgatgaagcctcgcatcagcccgattgaagtgaaatccacgaaacgatacggcgtatcttcgctcgacaaattccgcaaaaggtatgcccaacgattgggcaaggaatacgttctgcatccccgccaactcgaagtggatggagaacgcatcaagctgccgttgtatatggcccactgtctgtgatttgtgctgattgatgcatgtttgggctgcaaggttcaggcagtcgaagagtgtccgttccgcataggacatccgtgaatatggctggactcacactggctcgactgcagggaaaggagttggcatgggatattccatcggtcaggtgtcgcgaaagactgggctgtccgaacatacgttgcgctactatgacggccaaggtcttttgcccggtatcgcttgaactggtttcggacggagatgcttcgatgacggcgatcttgaattgcttgatctcattgaatgtctgaaatccacgggcatgagtctcgcagagatcaaggattttgttgatatgactaagcaaggtgatgccacgctcgaatcacgacttgctgtttttcgcaatcagcgagatgtggtgaaacgtcaaatcgccgaattgcgacgccggtacatcaaacttgacgtggtcattacatccggtgcctcttgcacctcgtcgatgaaaatcaatatcccttatgggagtagcattttctgccttgtatgtgcagaatgtcgcatttcaaaatggggttttggtgcaaaataccgcatttcaaagtagggtttggtgcaagatgtcgtgcaaatggtgaatcgggcgtgtttgtaggggcggctggatgactgtgcggctggactgttgtgcggccgcatgcttatgcggccacaagtcgtgcgggctgttcgcaaactatgcgcggtcggccggcattcgtctgcgcttgaggtgttcgataagcagctcacactttttgacatcctcggcggtcgaggccggtaggtcgtcggaggaggtgtcgatgatgcgctgcaggtagccgtgtagggtttgtatctcggtttcattgagacagtccagcatggaggaggtctggtcgggcgctttgcccagcagatcggcggccttgcggccctggttggtgagactgaccatcatgacgcggctgtcccgcctggacggacggcggctgatgtgaccgctggcctccagtttcttcaacagttcggccatggcctggcggctcatgccgaacatcgcggccaggtccttctggctggtctggtcggattccctgagcgtggccaagacgcggccttggccgcggcgtgggtcgaaagcatgttcgccgtgcggcgatttggcgccgggggagacgagccgtctgtgtatcgcgcgatacgccatgatgcggccaatgctgatgaaactgctgagaacatcgttcttgatatcgccgtcggcggtgttgtggcttgtgccgttctcccccgattgactcgtggccattacgtcgtcgaccgcgtcgtttccggttacggcggcgttgttgctggtactgctcatgttcggaatccttacgtcagtgctgcatgttgtcgccggtggattcaccgcgatagcgcatcatcatcgagcgctgcatctcctgcgcgttcggcggggtccaggtcagcgcgttcgcgccggccacgatggtttcggccatggactcgtcggtcgaaccgccgctggcgagcagcgggatggaggggtgacgctgcctgatctgctggaccacgtcaggcgtcctgcggccggccgccacgttgatgatggaggcgccggcctcgattttctcgtccaattcgtcatcgcaggtcaggaccgtggcgatgaccggggtgttcgtgatgcgcgccacgtcgtacaccgtggagggcggcgccggcgcgttgagcaccacgcccgccgcaccctgcatctcggccatcatggcgagttggatgacgcgcgggccggtggtggtgccaccgcccacgccgacgaacagcggggcctgggccacggtgagtagggcctgggtgatgactggttcgccggtgaacggatatacggcgagaatggcgtcggcattggtgttgcggatgatggccgcgtccgtggtgaacgcgaacgagtggagttggcggccctggacggtgatgccggaagtgcagctgatgatgtcgggaacacgggccgcggaggagctgatgcggttttcgatggggttcggtccgtctacttgacgggattccgggtcgtattcggtgaggtcgttgctcatgtcatgtgtgatgttcatgccggtctcctttaataaggaagcgagcgaagcgtcgctggtcgtgtgtctttttcatcctcttcagtaattatgtcaagtacctgacagatatgagtatacgactccagcaaagattgtcaagtaccttacgtattgctgttgtgtcgcatttttcgacaatgccaacatgcgtatgttgtttgatgcggatctgagtgtggaacggctgattcccgcactgtcgatcgagtccggaactaggatcactcccgaggatacgctcgtcatcttcgatgaggtacaggaggtgccgagggcgatgacttcgctgaagatgttcaatgaagctgccccggagtatgacgtcttggccactggatcggcgcttggcatcgccatgcatcctgggttttcattcccggttggcaaggtcagtagactcaagctgtatcctatgtcttttgttgaattcctgtatgc

SEQ ID NO: 1663 - DNA, 9850 bp, Unknown
  R221_24m  MAG No. k141_131277
ccgaactcgagattcgagaagttcaggtcggacaggtcggcatcggagaagctcgcgtcgccgagatcgccatcgccgcccagaccgaagttcgggtagatggtgtcgcggatggccttgtcgggctcgaccacggcgttgcggtagcgggcgaggcccgtaccggccgggatgagcttaccgatgatgacgttctccttgaggcccttgaggtcgtcgaccttctcggagagggcggcttcggtgagcacgcgggtggtctcctggaaggatgcggcggacagccaggagtcggtggccagcgacgccttggtgatgcccataagcgccggacgaccgacggccggacggccaccgttcttgacgatgttgcggttgatctcgcggaagcgggcattgtccaccagctcacccggcagcaggtcggtgtcgccggagtcgatgatggtcacgcggcgggtcatctggtgcacgatgacctcgatgtgcttgtcgtggatatccacaccctgggagcggtacacggtgtgcacttcctccacgatgttgacctgggcggcgcgcttgccgaggatggtgaggatcttcttgggatccacggaaccttcgaccagctgggtgccgaccttgatgtggtcgccgtcggcaaccttgagcggcacgcgcttggagacctggtaggtgatcggcttgatcacgccgtcttccttcggcgcgccggaatcggcgtccggggtcaggatgatctggcgaccgcgatcgttctccacgatcttgatgctgccggcgaactcggtgatcggggcctcacccttcggggtgcgggcctcgaaaagctcggtgacacggggaagaccctgggtgatatcggatgccgcggccacaccaccggagtggaaggaacgcagcgtcagctgggtaccaggctcaccgatggactgggcggcgacgataccgacggtctcgccgacatcgaccagcttgttggtggccagggaccagccatagcacttggcgcacacaccgcgcttggactcgcaggtcagcacggaacggcacttgacttcctcgacaccgtgggccacgaggtcgttgagcacgtccatggacagggcgtcgtcgcgcttgtacagcacggtctgtccgtcggccgggtcaatgacgtcggcggcgagcagacgggagtacgggccaccgtcggcggccttgacgagcaccaggttgccgtcgttgtcgcgctcggcgacgcggatgggcagaccggccttggtgccgcagtcctcttcgcgcacgatgacatcctgggagacgtcgaccagacgacgggtcaggtaaccggattctgcggtacgcagtgcggtatcggccagacccttgcgggcaccgtgctgggagatgaagtactccagcacggacaggccgtcgcggtagttggacttcacaggacgaggaatgatctcgcccttcgggttggccacgaggcctcgcatacctgcgatctggttgatctgcatcatgttgcctcgtgcaccggactgcacgatgatggccaggttggaggtcgggtcgaacttctcctcgacttccttggacacctcggcggtgcactcggtccacaggtcgatgagttcctgacggcgagcttcctcggtcaacagacccatctcgtagttggcgttgaccttgtcggccttggcctcgtactcggcgatcttctcgtcgcgctcgggcggctcgttcacgtcggagaacgcgaaggacacgccggaccacggtgcacgggtgaagccaagatccttcagggcgtccagcgtggcggccacctgctgggtggagtaacgcatggcgatgtcgtcgacgatcttggacagacggcccttggccacctgctcgttgacgaacgggtagtcggtcggcagagtctcgttgaacaggatgcggccgtaggaggtggcgaacagcacggtgccgtcgtggaagcgctcttccttgacgacctcgtcctcaccttcgcgcgggtcgagcaccttgacctcgccgggctcccagttcttcggcagcacgaagctctcgggcaggcggatgagcaccttggcctgcatgtcgatctcgtggcggtcgagggccatttcggcctcttccagcgaggagaacacgcggccctggcccttggcgccttccagcacggtggacaggtagtacagaccgaggatcatgtcctgggacggcatggtcacggtgtgaccgtcagccggcttcaggatgttgtcggaagccatcatcagcgagcgggcctcggcctgggcttcggcggacaggggcaggtggactgccatctggtcaccatcgaagtcggcgttgaaggcggcgcaggccagcggcggcaggtggatggccttgccttccaccaggatcggctcgaatgcctgaatacccagacggtgcagcgtaggtgcacggttgagcagcacggggtgctcggagatgacctcctcgagcacgccccacacttcggcgtcgccgcggtccacgagacgcttggcggacttcatgttctgcgcgtagttcaggtccacgaggcgcttgatgacgaacggcttgaacagctcgagggccatcggcttcggcagaccgcactggtgcatgcgcagggacggaccgaccacgatcacggaacggccggagtagtcgactcgcttaccgagcaggttctgacggaaacgaccctgcttacccttgagcatgtcggacagggacttcagcggacggttggaggcaccggtgaccgggcgaccacgacggccgttgtcgaacagggagtcgacggcttcctggagcatgcgcttctcgttgttgagcatgatttcaggggcgccgagctcgatcagtcgcttcagacggttgttacggttgatcacacggcggtacaggtcgttgaggtcggaggtggcgaaacgtccgccgtcgagctggaccatcgggcgcaggtccggcgggatgaccgggatcacgtcgagcaccatggcctccggcttgttgccggtggtcaggaaggcgttgacgaccttgaggcgcttcagggccttggtcttacgctgctcggaagcgtccttgatctcctcgcgcagttccttggagatggtctccaggtcaagggactgcaggcgcttcttgatggcttcggcgcccatgcagccgtcgaagtaatcgccgtagcggtcctgcatctcgcgccacaggtccacgtcgtcgaccatgtcgccgggcttgagcttcttgaacttgtcgaagacggcgtccacacgggcgatctggtcgttgtagcgggtgcggatggcggccatatcgcgctcggcaccgttacgcagcttggtgcgggccgggcccttggcctcgccggtctcctcaagggcggcgagatcctcttcgaccttcttggcgcgggcttcgatgtcggagtcacggcgctgctcaaggcgcttgatctcggaatcgaactcgtcctgcaggccgggcagatcgttgtggcgctcgtcctcgttcacctcggtgaccatgtaggaggcgaagtagatcacgcgctccagatccttcggggtgacgttcagcaggtagccgaggcgggaaggcacacccttgaagaaccagatgtgcgtcaccggggcggcgagctcgatgtggcccatgcgctcacggcgcacgcggctgcgggtcacttcgacgccgcatcgctcgcagacgatgcccttgaagcgcacgcgcttgtacttgccgcaggcgcactcccagtcacgggtcgggccgaagatctgttcgccgaacagaccgtccttctcaggcttcagcgtacggtagttgatggtttcaggcttcttgacctcaccgtggctccaaccacggatgtcatcggcggtggcaaggccgatgcgaatcttgtcaaatgcgttgacgtccagcacttgttaatccgtttctgttcttgagaccttcccgagctccccttgtcaggggagctgtcagccaaggctgactgaggggtagtgcaaaccggaaaggtctctgtacgttatttatttcacgttggcggggctacacgcggcgtattgaccgcatgcagcccgagggatcactggtattcgggctcttcggccttctggtcttccttggcggccgcgtcggggcgggcgccaatgttgaagccgaggtcgtcagcggagctggccggatcgtcgtcctcgtccttcatgtcgatggccacgccttcggcgttgagcacttcgacgttcagggacagggactgcatttccttcaggagcaccttgaacgactcagggatgcctgccggcggcaggttatcgcccttgacgatggcaccgtagacgcgcacgcggccgtcgacgtcatcggatttggtggtcatcatctcgtgcagcgtgtaggcggcaccgtaggcctcaagggcccacacctccatctcgccgaagcgctggccaccgaactgggccttaccaccgagcggctgctgggtgatcatggagtacgggccggtggagcgggcgtgaatcttgtcgtcgaccaggtggtgcagcttcagcatgtacatgtagccaacggaaatcggcttggtgtacggctcaccggtacggccatcgaacagggtggccttgccgtcggggccgaccagacggtcgccgtcgcggttcggcagcgtggtggacagcaggcccttcaggacctcgggcttgacaccgtcgaacaccggggtggcgaccggggtgttcggctcggccttctcggcaccggacggaatcagcttcttccactcggcttccatgttcgggtcaagggagatatcccaaccggagtgagcgatccagccgaggtgcagttcgagcacctgaccgaggttcattcgggaaggcacacccagcgggttcaacatgatgtcgaccggagtaccgtcggcaaggaacggcatatcctcttccggcaggatgcgggagatgcagcccttgttgccgtggcggccggagagcttgtcgcccaccgtgatcttgcggtgctgggcgatgtagacgcgaatcatctggttgacgccgttgggcagctcgtcgccgtcctcctcggcatcctcgcgggtgatctccttgacgccgatgacggtaccggtctcgccgtgaggcacgcgcagggaggtgtcgcgcacctcgcgggacttctcgccgaagatggcgcgcagcaggcgctcctccggggtcagctcggtctcgcccttcggggtgaccttaccgaccaggatgtcgccggcctcgacctcggcgccgatgcggatgatgccgcgctcgtcgaggttggccacggcgtcctcgccgacgttcggcagatcgcgggtgatctcttcggcgcccagcttggtttcgcgggcgtcgatctcgtactcctcgatgtggatggaggagagggtgtcgtcctgcacgaggcgctgggagatgatcacggcatcctcgtagttgtagccgttccacggcatgaaggcgatgagcaggttcttgcccagggccagatcgcccttctggatggcaggaccatcggccagcaccgagccggcctccacacgctcgccatcatggatgatcgggcgctggttgtagcaggtggtctggttggaacgctggaacttggccagcttgtaggagctggtggtgccgtcgtcgttcatcacgcgaatcaggtcggcggacacgtaggtgaccacaccgtccttctcggacttgatgacgtcgccggaatcgttggcggcgcgccattcggagccggtgcccaccagcgggcgctcggattcgatcagcggcacggcctgacgctgcatgttggtacccatcagtgcacggtggccctcatcatgctccaggaacggaatcagggaggcaccgagggagaccatctgacgcggggagacatccatgtaatccacggagctcaccggcacatcgaccgcctcttcctcgccgactcgggcaagggcggacttggagacgaagttgccgttctcgtcaagttcctggttggcctgggcgatgacgtggtcgagatcgcggtcagcggtcatgtactcgacctcgtcggtcacgtggccgttgacgaccttgcggtacggggtctcgatgaagccgaacgggttgacgcggccgaaggtcgccagggagccgatcagaccgatgttcgggccttcaggagactcgatcgggcacatacggccgaagtgggacgggtgcacgtcgcgcacttccatggaggcgcggtcgcgagacagaccgccggggcccagtgcggaaagacgacgcttgttcgtcacaccggacagcgggttgttctgatccatgaactgggagagctgggaagtgccgaagaactccttgatggtggcgttcaccgggcggatgttgatcagggactgcggggtgatggcctcggcgtcctgagtggtcatgcgctcgcgcaccacgcgctccatacggctcagaccggtacgcagctggttctggatcagctcgccgacctgacggatacgacggttgccgaagtggtcgatatcgtcgacgtccacgcgcaggtcaacgtcttcgccattgcgcttgcccgggaaggtcgccgcaccgtcgtgcagggccaccagatacttgatcgtggcgatgatgtcttcctggtggagggaacggtcgttgaaatcggcctcgacacccagcttgcggttgatcttgtagcggccgacgcgggccagatcgtagcgcttggtgttgaagtagaaggagtccagcaggttcttgccggcctcgggggtcggggtgtcggccggacgaatcttgcggtagaggtcgacgagggcctcgtcctgggtctcgagggtttccttctccagggcgtcgagcaccagcgggtagtccttgaaggcctgggcgatctcggacttggtcatgccgatggccatgaggaacacgatggcggactgcttgcgcttgcggtccacgcgcacctgcggctggtccttcttgtcgatctcgaactcgagccatgcaccgcggctcgggatgatcttcgcgccgaagacttccttatcggaggtgcggtcctgctggcggtcgaagtagacgcccggggaacgcacgagctgggagacgatgactcgctcggtaccgccgatgatgaaggtgccgtgcggggtctgcagcgggaagtcgcccatgaacacggtctgggacttgatctcgccggtgtcgccgttctcgaattcggcgttcacgtacagcggagcggagtaggtgtaatccttctccttgcactcctgcacggtgtggcgcggctcctcgaagtacgggtccgagaaggtcagggacatggtctgtgcaaagttctcgatcggggagatctcgttgaagacctcgtcgagaccggaggtgtgggccacggtgttggtgccgttggcctcatcctcttcgacacgcttcttccagcggtcggaaccgatcagccaatcgaagctgtcggtctgtacgcccagcaggtagggcacatcgatgggttccttgatggaaccgaagttcacgcgatccgacgccttgtgcagatcaatgtcatgctggtcggcgcgtgcgatgatggtggtggtgttcgtcgtagactcagtagccaatggacgttccttatcgctcgctaatatgtggtaattcccctgggagcgccggcatggccaccatatgcctatgcggacgcttcattgtcgacggcatgcccgcaatatgacacacctcatgcaaagtcaaaagaatactgatatgcgaggacatttttagctcccgctgacgagggagctgtcgagcggagcgagactgagggagagacccagcgtccaaacaccaaccgcaggtcctaccccaccgtaaacgtcaccggatcgctcttcaccttcggatgatccttcaaactcagctgcgccacgtacgttcccgcattgaccttggcccaatccgactcatccgtgcattcggtgagcgtggcgttcgcatcggtattccacgtgaccttctgaacgtccttatcacccttggacatcagcagcagacgtgaatccgccggacacacatcggacttgtaaatcgtttcctgaccggaagtaatggtgagcacacggccggaatcggccccgtccaccaaacagttgcctgacccctcgtgcacgatggtcgcggtgaaatcaagcgatcctcctaccggcacggattgggaggccgcggaaagctgcaatgtcacatcactggccgagcaatccttgacgttgctgactttcttcggagccggcgtggcgtcgcgggaaatcgcatacacctcgtcatggtgaatcatcgtgttcacggcaccgataccccggccaaggctgtacacgcagaatacaatcagcgcgattatcagcagcaacaccgtgccggccacgatacgccgacgacgatagatggcccgctgctttttgctgatcctgcgcttgcgcggcttgccggaacggtcgtttcgggcgggcccgccggatggcccattggccccggtgccggctccgcgtgccgttctcgcgcctgatgtgttcctctgcactgccataacccttccagtctacggtcaccacacccatacacgcttggggagcccgccattttcacaatgtcagctgggtaatcgcaggccgccgtccagaatctcgatcaggccgtcatcgtcaaggctggcgatgcaggcggcaagctgaatctggtccttccaaagcttgtcggcatcttccctgggcaacgtgactccagcgggaagctcgcgcagcgcggcgagcaccagaccgcgcacctgtcgatccgtgccttggaatcgttggcgtgggcgggtgcgacgctcccccagtccggggcggccggctttgagaaatgcacaatcatccgcaatcgggcaaatctcgcataacggcgtcttggctgtgcaaaccaccgcgcccaattccatcaccgactggttccatgtgaccgatgggcgttcgccacgatgcagtcgggagcgtttgccgccacggatagtgctgttcacggtatgttcggcgctaccggcattatcggcgacgtcagcatcgcgcccgagaatctcgtctttgggcagcatgcggttcgccagcgcgcgttcggccgggctggccgctcccccgcgcgattcgacgccaaggaacacacggctcagcacgcggcggatgttggtatcgatcacggcgattcgttcgccgaacgcaaagctcagcaccgcggaggcggtgtaatcgccgatgccgggcaatgcagtgagttcgtcatacgtacgcggcagtttgtcggcgtactgctcggccaccacgcgggcacattcctgcaagcgcaatgcacggcgtggatagccgagccgaccccatgcggtgatcacctcggccttgggggcctcggcgagtgagcgggcgtcgggccaacgttccatccagtcggtccagtacggcaccacacggctcatctgcgtctgctggctcatcacctcactgaccagcacgccccacggcgtggcccgtccgaagcgccatggcaagtcacgcgcattggcctcccaccatgctcccaatcgcaaagaaattgctgtgtcgttcatcgttcttattcttagcagctatgacgaacgaggcaaaacacaacccccagagcacaccgaatccagccaatcccgaaaccaaagtcgagaaaatgttcgaatacggctatcgcaagtcgaattacgggccggacgagctggtgaccgacgc

SEQ ID NO: 1664 - DNA, 3085 bp, Unknown
  R221_24m  MAG No. k141_131492
gcgcttgctgttctcgaacgcctcgcgcacgagctccagtagaccggagtccttgtcgggacgtttcatggccctgagctggtagtggtacgtgctgcgcgcgatgccgaccacgggcagcaggcttccggcggtcacgccgagcctctcactggtctgtttgacgaggacggccttctctcggctggccgggctttttcgggtctgcgcccggctcttttcccaacagctccaacgtgcccttccggatcgcgatctcgatgtccagttccctcttctcccgccgctgccgctcgacatcggcgtccaactcgtccagacgggtccgcgtctccgccagcctcttctccagcgccgccaccgcgtccgccaggccggccgcgtcccgcgggccgccggcgtagagggctccacgctggttttcccttccccggccgtcgggggcttctctccaggtgtcttcgtcacgtgcgtctccttggatccggcgagcatctgccgtttccagtttcccgacgacggacgcctccacgcccagtccggcggcggcatcgcgtgattccgaccttccggacgcggccgcgaccaccgccttccgcttcaattcctcgggaaccgggccgtgcctcagcttgcgtcggccgggagcgagctcgtcgatccacgcggtgagcagctcatggcttttcggatagccgagcgcgcgcatggtgcgtttcagacgcctgccgtgtccgaggtaatggtccaccgcggcccgcttctgctcgtccgtgtagcgcctgtagcgttcgccgcgcctggaggggacgccggtgcgttcctcctcgaggcgttcccggtaccacaccggcagcatccctctgctgggatagccgagctcgcggatcacgtccgcggcgtagcgctcgtatctgacgtacaggtccacggccctgtcacgctgctccctgctgcacttcgccataagggggttctcctcccggtcgggaagtccaagaaaacgtcaccatctcgatgccttaaagagaaaagtgtcatgcggttcatacgaaatgcgaatgaaaacgtaaatgggcggtagcactgctaccgcccgaaagattgagctttattgtatttgctcaaaagcttggaaacttgcttgctgctatgcggccaccttatttacatagggttttagtgcatgttcgaacagtggtatttgcagttgtaccactatgccgaagcccagtatcagcaatagatacaatcctttgggaagccattgcagactggccactgttagtccgattgcgatggctggaatgataagagcaaccaaagtcgtaaacggcgatgtgccaccgaacagtagcgcgttgcgtaaagtagccatcactgagttttcgaagcgtgccgttaacggccaagcccagaccatgatgatgagccatagcagcgttagcatgattttcactatcatcgcagccatgctggtagtgaaaagccataaagcaatgagcatcaatccagttgcggcgagcactgaccatatggccgttgcaactgggaagtttcttttaaatgccgagaaatatgtgcgaagcaggtatcctcgaccttcttttgccgcccaagcagcttcgtaggaagccgatagcgcggccccaatggtgaccaacgggatgctgcacactgctgtaagtagagtgagtaccgcggcgttggccaccatatcaaggcctcgcatgaaaacagagtccttagcgaacactgtgttcatattggatcagcccttcaccgcaccggcggtgatgccttggatgatgtacttctggcatagtgcgaagaagatgacgattggaataatcgccagcaccaggcatgccatcagggcgcccatatcgatactgccgtagcctccacgcagatactggatcacgattggaatggtcttgaacctttgcagatccaaggtcagatacggcagcaggtagtcattccaaatccacatggtctgcagaatcgccacggtgataatcgacgagcgcatcatcggcacaacgatggtgaagaatgtacgcaccgctccggcgccatcaatcattgcggattcttcgatttcctgcggaatggatttgatcgtacctgtgaagatgaatacgggaagtcctgcgccgaatcccagatacacaaggcagacgccccatggggtgttcaggccaagcatgtcagccatcttcgacagagggaacatcaccatctggaatggaacaatcatgttcaacaggaacaacacgtagatgattttcgatgcgacgttgttcactcgcacaatccaccaagcgcacatcgaggtgcaaaggaggatgagaagcactgcaccgaccgtaatgacaaggctccacccaaagctggcaatgaagttggtcttctcgatgccatccttgtagttgaagagtcccgcaaattccttaccagttggcaaggagaaggtgtccgcggagatgtagaccttctttttgaaggaattaatcagcactagagcaagcgggaacaaccacgccaaagaaatgaccgagaacagtccggtccagaatgggccgtgcttgatgcgctggttcatgcttggacctccttactggtggtgagtttgttctggatgatggcaatcagggcaacgaggacgaagaacatcactgcctttgcctggcctacgccctcgaatccggctcgtccgtagaacgtgcggtagatattcaaggccagcatttccgaggtgttactcggagcgccgttggtcagagcgaggttctgatcgaagagcttgaatccaccggtcacggtaaggaacgagcagacggtgatgcttggcatcatcagcggaatggtgatgctccatagaatctgtttcggagtggcaccatccacggaagcggcctctatcacgtcgccaggaacgttttgcagtccggcgatgtaaatcaccatcatgtagccgatttgttgccaacaaactaggattaccatgccgatgaatccgtatttggcgtgatatgtcagcgagatgttccaatgggccagaacgccgttcaacagcagc

SEQ ID NO: 1665 - DNA, 35225 bp, Unknown
  R221_24m  MAG No. k141_133215
atcgttgggatggtagtactcggtgccacgcagctcttcgggcatatattcctgtggtgccacggcaccgggccaatcgtgcgcatacttgtagccctcgtggttgccccactctttcataagcttggtgggggcgttccttaaatacagcggaacagcgccgatcttgccggtatccacgtccgcgagcgcctggttaatggcgttatagctggcatttgatttgggcgcggtggccacggcaatcgtggcttcggccaaaataatacgtgcctcgggcatgccgaccagcgccacggcctgcgccgcggccacggtgacctgcaaaatctgcggggcggccatgccgacttcctcgctggcggcaatcatgatgcgacgggcgatgaagcgcggatcttcacccgctttcagcatgcgcgccagataatggatggcggcatccggatcggagccccgcatggatttgatgaatgcggaaatcacgtcgtaatggtcatcgccgtctttgtcgtagcgcacggtggcggtgtccattaccgtagccacgatttcggaggtgatgatgggtcggcgtgcgccctttttgcgggcttcgtcgccggtgaccgcgccagccgcggcctccagaatcgtgagactcttgcgtgcgtcgccaccggccatgcgcacgatatcggcgatggcttcgtccgtggctttgacctcgtccctgagaccgcggtcatcagtcagcgcgcgctgcaccagttcggtgagctgatcaggctccaatgactcaagcttgacgaccaccgaacgggagagcaacggtttgatgatggaaaagctcgggttctcggtggtggcgccgataaaggtcacgtcgcggttttcgacggcgggaagcagcgcatcctgctgggatttggagaagcgatgcacctcgtcgatgaacagtacggtttcccggccgcgtgacacgagccgttcgtaagcgcgggtgagtacgtcgcgcacgtctttgacgccggaggtcacggcggagagttcctcaaacacgcggccggattggccggccacgatggtggcgagcgtggtcttgccgacgcctggagggccgaacaggattacggagctcggcgcggtgagactgcctttgctggccggattggcgaggcggcgcagcggcgagccctggcccaacacctgcgtttggccaatcacctcgtccaaagtgcgtggacgcatgcgcaccgccaacggccgtgtcatcgactccggcgcatcagccgccccaaacaaatcgttctcactcataacgtcctatagtaccccagtgttcgaacagacgttcgagctgcaccttggcttccctcagagaggggagccaggaatcagtcactcaccttgtagtcgtggaagactacttcgccggtgtcttgggtggcgtcaaggtccacgatgccttcgatggcccagtcgtggtcgccatcggaatcatcgataatctgacgcaccttccacgtatgctcgtcgttctcgtgcttgtcatccaacatgaacagttcgggcgagcgcgcttcggcgccgatgcccacgtactcgtgctcgtcgtagtagtcgtcgagcacatcttcccattcgtgcacgccgtagccccagtccttgtcgagcgcgccgagcttgtccggctggtcaaggtccataagccgcacacggcggaacaaggcattgcgcaccagcacggtaagaccacgacggtcctcgaccaccgcgctttttgcgccgggcgcggccaaggatgccgcagcctcggattggtcagccgagtcaccggcgttctcccattcgtccaccagcgaggagtcgatggagcgcacgagcacgcgcagccacgagatgatgtcttcgagttgctcgtcacgcttttcgggcggcacggtgcgcgccagcgtgcggtaggcgtccgagaggtagcgcaacagggtgccttcggagcgggcgatgttgtatcgggtgatgtatccggtgaagtcggaggcggtttccaccatgtcgcgcaccacggatttcggcgacagccagtagtcgttggcccacggcacatcgtggcggtactgatcgaacgcggcttcgagcatgtcttccagtggcttcggatacgtaatctcctgcagcttatccatacgctcgtcatagtcgagtccgtcggccttcatatcggacatcgccttgtctcgggcctgacgctcctgggcacgcagcacctgcttggggtcttcgagcgtggcctcggccatggagatcacgtccagcgcataggtgtcggactcggggtcgagcagttcgagcgcggccagcaggaacggggagagcggctggtcgagggcgaagtcgtccggcatatcaagggtcatgtagtagtccttgccgccgtccttgcggtcctcggtttcgatgacttcggtatcgaacagggtttggaagatctcgtcggcccgctggtgcagatgctccttctggtcgggggtctgcgcggaatcgtcgatgagatcgtcgatacgagcacgggcgtcaccgccctgcgccacttcattgagcaccatcgaatgcgtgattttcaggtgcgggaccagggtttccggttcggcgtcgatgagcttgtcaaacgtgctctggttccaggtcacaaaaccttccggcgccttcttgcgcttgaccttcttgagtttcttcggatctcccccggccttggcgatggctttctggttttcgatttcatattcgggagcctcggcgatcaccagtccctcggtatcgaatcccatacgaccggctcgtccggcaatctggtggaattcgcgggcgcgcaggcggcgcatcttggtgccgtcgaacttggtcagggccgtgagcaccacggagtgaatcggcacattgatgccgacgcccaatgtatcggtgccgcaaatcaccggcagcagaccctgctgggcgagctgttcgaccaggcggcggtagcgaggcagcatgccggcatgatggatgccgacaccggtgcgcagcagtcgctgcagaatcttgccgaaggctgtggtgaacttgacgcctttgatggcttctgcgatggcttggcgctgttccttgctggatacaccggtggaggcgagcgcttgcgcggtctccaatgcggcgtcctgcgaaaagtggaccacgtaaatcggggtttcgccgttgcggaaggcgagttccacggttttttccatcgggtcgagcgtgtattcgtagctcaacggcaccggtcgcggcgcgtcggcgattacatccacgtccggggtgtcgttcagatcggagagcttgtcggcgatggcgtccacattgccgagtgtggcgctcatcagcaggaactgggtctgcggcagcgtgagcagtggcacctgccacgcccagccgcgctccggatcaccgtaataatggaattcgtccatcgccacgaggcccacatcggcatgggtgccttcgcgcaaagcctgattggcgaggatttcggcggtgcagcagatgatcggcgcgtccgcgttgatgtggctgtcgccggtgatcatgccgacattgtcgcggccgaacacttcgaccaagtcgaagaatttctccgacaccagcgccttgatcggagcggtgtaataggagcggcggccagtgcatagggcggcgaagtgcatgccgagcgccaccagcgatttgcccgaaccggtcggggtattcaaaatcacatggtcgccggccaagaggtccataatggcctcttcctgatgcggccacggctcgatgcccttgacgtcttccacccagccgaagaaccgttcgtagatgtcgtcggccgtaagattccgttcgcgtccgtcgccgtcccattcgggggccagccgccccagggatccgtattccttctcgtcagtcataatgctcagtctacctagtggcctattccgacggcacgagccgccctccgtcgctatgcgacgcctcccgccagcgggcggagccatgcgaagagctgtgccatgcgcttggctccgccaatgggaggatcgctcacgccaaccggcggcgcacctcgtcggggtccacctcgggttcgaggggaggccaggtcatgttcatgttcttcaaggtggtgcgcagcagttcggagaccacggctcgcgaataccagcggttatcggccggaacgaggtaccacggtgcggcggccgtgctggttttctcgaacacttcctgccaagcgaacatgtactcatcccatcggtcgcgggcctcgaggtcggagatatcgaatttccagaacttggtgggatcatccagcctcccaagaaagtgttttttctgttcttcctggcttaccacgaggaagatcttgaggatggcgcatccgctggcggccagttcacgttcgaaatcgttgatctggtcgtagcgggcacgccatacgtcttcgggataggtgccatagacgtgcggcatgaccacatcttcataatgggagcggtcgaatacggcaatccaccccggcttgggcaattcacgcttcacacgccagaggaagtcgtggtcgagctcctcggccgtaggcttgccgaagccatggtaatggatgcccatcgggtcgccttggctgaacacgtgacgcacaatgccgcccttgccggaggcatccatgccttgcagcacgatgagcagccgccgtgccgagcctttgacaccattcgcgtacatgagccgctggtatcgggcgatttcggaggagctgatcgaaatgaacttctcggcgtcctctttattgccgtcgaatccgggagtggaatcgccttcgacatcagtgacctgcatgccgtggtggaacataagacgttgagcgggcggcaacgaccatacggcgctgagcagttcactggatttcgccgcacgcgccagtcgttcaggcacgctggcactggagtcgatggtgtctatgcgatccaccgcgagctgtaataccttgtcgatccgtcgatcggttttggattcctttcccttgccgttcttgttgttctttcctgaggattttccggccgtaccccacttgccggcctcttcaggctcgttggttctgtcgtcgtccttggtcatgctcccgattgtacgtcttgtaactcaggagacctagcaacgtagcgacattcacatttcgcctgttactgcaaatctataggcatgcagtcgttcggaccgtaattgttggctttgcaccaattccaagcctcatccgtcgagtcgaagccctcaccggcaagaatcacatagtatttgtcggaattgctgctgtaggcgggccagtcacccgaccagataagcagtacgtttgaattcttgttgtgcatcgtgatgaattgcgcaagaatatcgcggtagttccaggtcttgccttcagcctccatacccttacgcttgctggacagctgtgcggtatacgtggaatagaacagctctgcggagtccttgtcgtgctcgacctgccaatccaatgccttgcttgcattattttcggcttcgtcatccgtaacgttgctgccgcttatcgcgcctggatcagacgatccccagcaatatcttctttccggcagacccaccggaacgcggctgcgcagcgccaccgttgcctggcgccgtcgacaatgtcgaagtaggtgcagtcgccgtgttgaaacttgggggcaacggcatcgaacccgctggcacctgctggggagcagccggtaccagcgtcgggccatccatcgactgaggacttgggcttggcgcagactgtgccatcggcgcaccgcattccgtgcagaatcggcttccctccggcatctccgttccgcaaacctggcacttcatactctctccgttctctctcgtccctatcggccaatcccccgcccgttttgcagtacataaagaagcggcaaacggcccgaaacatacctgagccatcaggaagacggcacgatctactacgagaaagagatcatcaccgaccggcaaatcgtcggcatcatgctgaagcatccgaccagcgcacgcggcttcaagcgctacttgcgcgccgcatcatgacgcttgaccacgatggtgacgccacccgcagcgaacagcgtcgccagaaccacaaccaacgcaaccgaggcaccggtattggccgtatgttcggtctgctgtggcttggtgctgccattggcattgacgctaccgctatggttgccgttatccttgtcgtccgtcccggtggacactccggtaacggcaacgggcagagcgaccatggtcttattggtcgcaccggtcacggtcaggctgatatcaccggtcttggttccggcgggaatcgtgaccttgagctcggcggtatcgccattcgcaacctgtgcttcgccgaccatctgctcgccgatggtggcggtcagcttcgtctcgtcaggcacgcccagcgaggtgagcgtgagcttcgagaagtgcagggtgaacgagccaccggccttgaccgcaccggtcgggataccggtgacggccactgcgcggcggtcgtagcgcggagcaaccggatcgttgtccttgagatagtcaatccaggcgtcgcggtccaccaaaccggtgtccttggtgttcgtgccttgggcgaaggcgcggaagttatcgccgccctccaacaggaagctgaacgaaccgatacggtagttgcgtttcagatccaaaggctcaccgttgacggtcaccgaggtgatgtgatggccttgcgcggcatccggatcatacgtgtagctcacgttgtgggacagtccgagttgcagatacgcgcgcgatggcgtgctgccgtccgcgttcgtctgccactgctgttccagcgcttccttgaactgcgcgccggtaagcgtggtggtccacaggttgttcaggaacggcagtacagcgttggcctgggcgtaggtgatattgccgtcggcatcgagcgtgcaggcgtcattggtgccggacttgcagaattcggcacgcagaccgccggggttgaccacaccgatttcggccgcgccgcggtcctcgcctttgagcgaatcgagcagcgcatcggccaccagattgcccatggtcgattcggaggcgcgatcgtcacgcttgccgtccttgaatgcggtggtgatatccgcagacaccttgccgaccttctcgccgcccttttcatcggccaccttaagggcctggtacacgatgtccctcaccttggcgacagtcgggttcgcggcggcgagcaggccatcgttgtattcggcgtaatcgttgtagtgcggatcatttttgtcggcgggctgcgaagccacctgcacggccgtgttgccggacttgtcgtaagacaccgcaccggtggccgtgttgtaggtgagcaccacttggccgatgttggcggcatagctaccggtctggatgatcggtcggttgttgtgcgcgggatcggtgtacgaatacttcatgtgggtgtgtgcagtgaagatcacgttcactgccgcatcggtatcgtccacgatcttctggaatacggggctggcggccttctgctcgtcaagcgtgggcttggccgtggcgtcatcttcattggaggctgcaccctcatggtattcggccacaatcacgtcagcctcgccattggattcgtcgccgtcggtgagttgcttggccacacggttcacggcttccaccggatcgccgaattcgatgtccttgacaccaccgggagcaaccaatgtgccggtttcctgagtgaccgcaccgatgatgccgaccttcacgccgttcacttcctgaatactgtactcgggcagagccggggttgtggtgcccttcttgtacacgttggcaccgaggtaatcccattgggcgttgcgcgcgccctccttgccgatcacacgatcggtaaggtcggcatagccttgatcgaactcgtggttgcccaccgccgaagccttgacgcccaaagcattgagtacatcgatggtcggctggtcctgctgtaccgaagagttgaacagcgaagcaccgatattatcgccggcggacagtagcagtgatgagtcagggtattcgcccttgagctgctcgatggtggcggcgaacggcacggtgaggttcttgtcgatacggccgtggaaatcgttgaagttcagcaggttgatggtggtgctggtgggaaccggctgattggttgccatatagcccatacgcaatgaatggccattggtcacgccgtcgtctgcccagaacaccggcttgtacaccttgccatttactaccttggtggcttcggtatcaggggtgatggcaaaaccttcggtgttctgcgtacggatttcatccggagtgtcggtcagcttggtcagctgcagcacaccgttcttgaattcgtaggtgccgattttggcaccggtgttcgcgtcattgtcgctttgggcgagcaactggttgtgctcggcgtcccaagtcagatcgcgcgggccatcatagccggtgttcactgcggactgcggcaggtcgatgtcggccaccggatgcaccaggtcctcatcattcacggtttgcagtgcgaaggcgtagatatgaccggttttctccagtgcggcgaagaacagaccgccgaaatcattgccgaaaccgtccgggtcgtaggtcattacgttcttcgggtcaaggttggattggaatccgttggcggtcaggaccgagtcgggaataaaggctatgccttccaccccaagattggcgtccgctccgtggcccagcgtcacgccgaattgtgtgagtgctgcggtgagattccactcgtgcgtagcggtcagctcttgcgctccgtcgccgttggcgtcggtggttttcgcggtcacgtcatactgcaggatggaaggccgcggcacattcttgttttcgttgtcgcgctcggcgccgatgaatatgcccttggatgaatctccgttgatcagcgtgatgccttcggagtccacaccgcccttgccgtccttgaagtgcagctgcttgccgcccttggtctgaccgttgttggtgaaggtccagccatcagtgggatcctgctgccatgtgccgttctggtagacgaacttgttgatggagccagggcccttatcagcggtgttgccgagcgtggggttcagatcgttgtcggccgcccacagcacgccttgcttgccgtctttaccggcttcatacaccagaccagacagattgccgtcagtgtggtcgccgccttgtcctttggcgccaaattcgccttcggcatccactgtggtcacatcggccaatcccgaccatgcgtccacggtcatggtctcgccggcgggcggagtcggagtcgggtcatcgaacacgttctgtgcaccgggcgtgggcgtatcggaaagcgcgaaagtgccatcgtccttacgggaccacgactgactgtcgctcatcttcttcacgccggttgtatcggtattccatgacgtggaatccaccacatcgctatcggtaaagtcgccgctggtagtggtcagataggcttcgtcggcatcggaacccaggccgggctcggccttgtcggggtcgatgtatgccaccagatatccgccggctttgatgacggtgtccgtattcgttacttcgctggtgccgatggtgtagtgcttcttggctttcttgccgctgtcgtagatgccccagcccttcacgtcaacgtctgtggagccggtgttcttgagctcgacccaatcgcaacgcttgctatccgggtctccggcagctttcgtattgccggcatagacctcgttgatgattacggatggtttggcagccgtgttctgttcggcagtggcctgctgctcgtccgcagccgcagcgggcacgccgatcagggcgatgctgctcagtgtcaccgcagcggtgagcagcgcgatggcgcgccgcgacatcgcggtgaaattgttggtgtggaacattactcccgttccttcctcgggttgtgccgccgcagcatgatgctcttcggcggatgacaccccgagagtatgagagagaaatgaagccgacaccgtatgaaggcaaactcggcagatctccaaactgaactttggctgaattaccgctgaagctggttcttggatttgcgtcgaaccgtccgtattccgccgacaatcgcgattacagcggtaccgatggctacgctgatcaacgccggtcgttgcgcggcatggagggtggcgagatccggcccggccgcaatggcgctgttttcacccgccgagccatcagacgccggatgattacccgcgtcggcgtactgggcattgaccacactcgggccggcaagcgccacctggtcggcggtctcgaccttggccacatcgccgtgcttatccaaggtgacgcgggcgcacagggctttggcccagttgatacgctgccagccgtcgctcgattgccatagggggtatccggaatccatggcagtggctttcaaaatcgcgttgcgctgatcggcgtgcagttcgggataggccagtcgcagcacgtccgccgccccgcgcggtgccacgaaatcagcgccggactgggcggtgtcttgcgggaaggtgtaggtcaggcgtgcggtgtagacgcgcacggccgaggcctggtccgcgaccggctcggtggccaccgggtccagaaaatcgttggtgtagccgcccgaaccggaggccttggtgttggcgatgcaggcggcgagggtagtgccgtggccgtccgcggcgcagcgggacaccagatagtcccgcagctgccgggacgcgggcacgatggacgaagcgaattcgttatgccagtactgcccgttctgggcggatgcgccaatgcgcccgcccatgatgtcaagcggataatgcacgccgagcacgatgcggttgttgccggcctccgaagtgcgggccatgatttgcggcgcgagttcgggaatcatgccggccagcgcgataccccacgaataggcgccggtagtgtggccggaggggtaggaactgtttttctgcaagttcgagtagccgggcacgtgttcgagccatgagggtgattgcttgatgtcaagcgtggcgggcagtccggcgagatcgttagtgccgccgtagctgctttccgcacggttcagataggggcgcggatgcatggccgcacgttttgaggcgtaggtggaggccacgttaaaggagaagatatcggcgacggcgttgagtttcccggatttgagcccttcgctcatatatttgccaagcaccggaccgagcgcgtccggcatggcttcctcggcttgcagatcggagtcgacgagcgcacgcttgcgttgggcgttcaggccatccttatcgagattttcggcggctttgtggttaatggccacggccaaatcttcgtcgagtttcattgtatcggcgtcgagcaccttgccaccgtgttcggcatcggtgggggcctgccaatagttcttttcgtagtcggagagcaatgccacccaatccgggttgggcagctggtcggcctgtgcgattgcgggcgtcacggctagcgtggccgccaacgccagcggcgcaatggtcgcaatagcaaaaacggaggataggtgccggaacatcttcatatgttccaacctatcctccgtgaaggctacgtagccggagcccagtcaaacactcagtaaattcttcgtgccggcttagcggcgattgagctgactgtcaggcctctgactcgtcttcggacttgcggaacgccgggaattcgccggtttccgggtcaacctgtgactcgggctgggtggcgtcatatccctgttcgtagcgggtgcgccgccagttgcgaatcgaggcgttggtgccgcggtgatgcacatggtatttgcgcggcgtaccgcccagcggcagctcttcgacctccttggccacagcgatctggttgacattggacgggtcgccggcggcgatcggcgccacgggctcggcctcggtgggcgcggccgtacgctgctgcatgcgcgagggcagccattcggcgagcctcgacaacagccagcaggcgatgaagtaaatcaccgcggccatgaccagcgtctgcaggatgttgaagtacatcgagccgagtcggcgcgattcctgcagcaggtcggtatacatgatgatcgagcccagagcggtatccttcaacaccacgaccagctgggtgacggcggccggcagcatggcgtagacggcctgcggcacctcgatctccatcagcgactgcgtttcggtcaggcccaaagcgagcgaggcctcacgctggccgcccggcagattgccgacgccggagcgcaccagttcggcgaccaccgaaccgttgtacagcaccaaggccagcaccacggcccaataggacgggctgggcaggcccgcgaacgcgaaccatcgccagaagaagatcatgagcagcagcacgggaaccgcacggcagaactcgacgatcacggcggagacgccacgtaccagcgggttcggcagcagtcggcccacgccgaacaccaagccgaacaccacggcacccaccacggccacgatggtggccttgatggtcatccacagtccgggcaggtagaagtcggtccacgcctctcgttcgacggcgggcttccacagctcccagctgagctggttctcgccgtccggcgggttgtgcaggcgcatgaggataaacacgagcaccaccgcgaacagaatgcccgcgatccagttgacgatgcgaatggtgcgccggcccttgggacctggcgcgtcgaacagcacggaattcgaagtatcggccatatccgtcacctccttacggcgagtttgttggacaggtacgtggtgagcatgccgatggggatgatcaggatcacgtagccgagcgcgaagatcaggaagatttggatgatcacgtcgggacggaattcgatcatctcgctcatcagcgaggatgtttcggtggccacggatgcggcggcggccacggtggagttcttgagcagggcgatcagcgtgttgccgagcggtgccacggagcctcggaaggcctgcggcagaatgatctcggtggcggactgcatgaagcccaagcccagcgctcgtgcggcctcggcctggccaatcggcacggtgttgatgcccgaacgcagagattcgcacacgaacgccgccgtgtacaggctcaggccggtgaccgcgagccagaagaagttcgtggtgaaggtgtcggagaagctgagcttcagctgcgcgtaggcacccagcaccatgaacaccatgatgatggtcagcggcaggttcttgaacagttccacatacgcaccggccacggccctgagcgaggaaatcggcgagatgcgcatcaccacaaggatcacgccgaggatcagggagaacagggcggaccatagggtcagttcgatattgaccagaaacgcgccgagcacgtcatactggctgaagagttccaggaatccgctcatcaggcctcctctccttcgtccggggtgggcgggttgtagcgtacgtcgggcgtgtagttggtgcccttggtgttatcgctgatggcgttctcccacgagccgtcctgaatcatgtccacgatggcgttgttgattttggtggccagctgcgtgtcgcccttcttgatgcccacgccgtagtattcctgcgtgaacggtttgccgaccaccttgagcttgccgcgcgaggcggaggccaggccggccaggatgatgtcgtcggtggttaccgcgtccacgatgccggagaacagggcagtggcgcattcggcgtaaccgggctgttccataagctggacttcggaggcgaacttctccttgacggtggcggcggaggtcgaaccggtgacggagcataggcgcttgccgttcaggtcttcggggccgttgatggagttgtcgtccttgcgcacgagcagatcctgtccggccacgaagtacgggccggcgaaggagacggccttcttgcgctcgtcggtgatggagtaggtggcgaggatcatgtccacgtcgccgttctgaatcatggcctcacgctgcttggagggagcttccttccagatgatctggtcttcggaatagccgagtttcttggcgatgtacttggccacgtccacgtcgaagcccacgtaggtgccggacttcttgaagcccaggccgggctggtcgaatttgatgccgatgcggatcttgccggtttcgtccgcgccgcaggcggccagcgacattgtgcaggccacggcggcgagcgcggcgatcacgcggcaaaccttccgtttgaacgtattggtgaatgtcattggattgcgtacccgtctttcagtgggttcgtcagtgggtgaggatcttcgagaggaagtccttggcacggtcggtctgcggatgctcgaagaactcgtcgggcgtgttctcttcgagaatctggccgtccgccatgaagacgatgcggtcggcggccttgcgcgcgaagcccatctcgtgggtcacgcagatcatcgtcatgccttcatgcgcgagttcgaccatcacgtcgagcacttcgttgaccatttccgggtcgagtgcggaggtgggctcgtcgaacagcatgaccttggggcgcatggcgagcgcgcgggcgatggccacacgctgctgctggccgccggagagctgggagggcatcttgctggcttgggagtcgacgcccacgcgggcgagcaggtccatggccagttgctcggcttccttcttgtccatgtgacgcaccttgatgagggccaacgtcacgttttcaagaatggttttgttggcgaacaggttgaacgactggaacaccatgccaacttcggccctgaggttcgcgagctccttgccttcctgtggcaagggcttgccgtcgatgcggatgtcgccggaatcgatggtctcgaggcgattgatggtgcggcacatcgtggacttgcctgagccggacgggcccacgaccaccagcacctcacccttggtgacggtcaggttgatgtccttcaggacgtgcaaagcaccgaagtgcttttcgacgtgggtcagttcgactagcggacggttcaggtcctctttgccgggaaccagcggggtcaatttggccttgcttggtgatgttgtgcttgtcgtgcgcgaacgcactgctgtttcattgttcgtttcagacatgagtgggaggataacacaccgacgtttccaacgtgttcacagtatgtccacacagttgctcagtcgatgtctcatttccgcatcagacatcgtgaaggcggcattgggcatcggcatacattctcgctgagtcgcgcatcgctcggcgtctgctgtgcgctgattgcctgctgcgtggcggctgagacgttgctgcgacggcaaagcgggcacgtgttgtcctatctgctgattccatgtttggccttggtgtcgttggcgttgctgccgtgtatgccgcagtcgggcgcatggctggcggtcactttgtattgtgtggggctggtctcgccgtttcccatgtcgtattcgtataaatgtgctaggcattttgagcgtggctagctgttcgcacacgatgagtgctgttatacggtggacgacactcccgaagcgcggtggataaccgggcgcggcacacgatatgccggtggataaccggctcgcgccgcttaagttatccccatttttcggttttgcccctgtgccaccgtggaatgcgctacgctcggcgcatgaacggatacagcgaagtgccgcacaatggcgaaatcaacaactatctgcgcaaagatcttgacgccaaagccacggccaagaacacggcctgttggaatctgctgggcaaagtgcgcacgaaacgcacgttgtgtttctcgctgtataccgcattggaattatgcggcgtggagttgccgaggcacagcacgttgccgcagaaggatttttatgtgacggtgaggagcaaggggacccgctcttcattggacaatgtcgactatcgcatatggaatgcaaagttcagcagtatcgctttttcaaacggcgtaacctgcatgcatcccatggatgcgtggatacagtttgcccaatatctcaacctcactgaattagtggtgctggctgaagcgctcatcagacgttatggatatgccattgaacaattcactcaacgactaacggcctttcaccgcgttattggtcgtgcgcgttgtgaggcggcgctgaagctcgtaaaaccatcggattccgttcaggaaactcgtacacgcttggcgcttatgcttttcggcctgcccataccgcaaacacaatatggcattaccgattcagagaacggatacacctacaccgttgacatggcttatccacaatacaaagtcgctattgaatatgatggcgatcatcaccgtcgcttccgcaaacaatatgtgcgggaccagcaaaaacgtcgacgtctgcggcaattgggctggaccgtcatcgaggtgttcgccgatgacctgtggaacaccgccaaacaacgtgccttcgcacaagaggttgccaccgcgatgcaaataccgcttcctggccgtcctcaaccttcatgccgggtattaatagacggcagccttaccatcaatgcgcgcaaaggggaatacaggaggcggaaacaagcaaaacacaacaaagcatcacaacattgatcaaatacggagttgcgattacttctcatggggcggcaattcccccatgaggcggtaatttgcccatggggcggtttgaagaaattgtgaaaccgcggaattaagccattttgacctaccgccccatggggttttcaccgccccatgggttgtttaccgccccatgagaaagttaccgccccatgggggggggataatcggcaaacgccaagggggacaccgcatggtgcgaggtttgccgcatggcggaggtgccatcgggcggagtatttggcaccccttggcaggtatttggcacattgggccccacccgcaaaaagcaaatggcccttggaattattccaagggccatttgcggctaatagcaccggagcattactcctcgaaaattaatctacgcatgcggagaccgccgttcgaagccgaaggcgcactaaggtgcgtcgagtgctgaggaaaggcggtatacgctccgtagattagttttcgtcggcgtccgggtcgtagtcgacgccagtctcggcgcgctgctcgtcggaaatcggggccggagcaccggtcagcgggtcgcggccgccgccggccttcgggaaggcgatgacgtcgcggatggagtcggcaccggccaggatggacacggtgcggtcccaaccgagggccaaacccgcgtgaggcggagcgccgtacttgaatgcctcaagcaggaagccgaacttctcgtcggcctcttccttggtgatgcccagcacatcgagcacacgggcttggatgtcgtcgcggtggatacgtacggaaccgccgcccatctcctcaccgttgcagacaatgtcgtaggaatcggacatggcgtgctcgggatccttgtcgaacttgtcgatccaatccttgctcggcatggtgaacgggtggtgcatggaggtccacttggagtggccgacagccacatcgtcatcatccggatcgtcggtgggcttgaacagcgggaagtccacgacccaagtgaaagcgaacttcttcggatccagcaggccttcgcgggaggcgagctccacacgcacggcacccagcagcagctgggcggactcgcgagaaccggcggcgaagaagacggcgtcgccttcctcggcaccgacggcctcgcgcaggccgttgcgctcctcatcggacaggttcttggcgacggggcccttgagttcgccgttttcgccgaagaccacgtaggcaaggcccttggctccacgctgacgagcccaatcctgccaagcgtcgaactgacgacgcggcgtggcggcaccgcccttgaagaccacggcacccacgtacggggcctggaacacgcggaacggcgtgttcttgaagtactcggtcagttccaccagcgggttgccgaagcgcaggtccggcttgtcggagccgtacttgtccatcgcatccttccaggtgatgcgcggtagcggcagctggacctcatagccggcggacttccagatggcggcgatgaccttctcagtcatggccatcacatcttcctggtccacgtaggccatctccatatcgagctgagtgaactcgggctgacggtcggcgcggaagtcctcatcacggtagcagcgggcgagctggtagtaacgctcgacaccggagaccatgagcagctgcttgaggagctgcggggactgcggcagggcgtaccaggaaccgggcaccagacgggccggcaccacgaagtcgcgggcgccttccggggtggacttaatgaaggtcggggtctcgacctcggtgaagtccatgtcttccagcgcgtggcgggcggccttagccatgtcggaacgcagcttcagattgtgctgcatggacggacggcgcaggtcgaggtaacggtacttcagacgcacgtcctcgcccggcagcttgttctcggactcattctcaagagcggtggaaacctggaacggcagggcgtcggacttggcgaggatctcgatggtctcggccacaacctcgatcttgccggtggccagatgggtgttctcgttgccatccgggcgcaggcgcacttcgccggtaatctgaatcacgaattcgctgcgcagcgggcgggccatatcctcgtcgtaaatgacgacctgcacgaggccggtcgaatcacgaaggtcgatgaaggccacgccaccgtgatcacggcgtcggtcaacccaaccggcaagggtgaccttctggccgaccagggcctcggtcacttcagtggcatgatgtgttctgtaagccgtctggctcattgtcttgtttctcctcgatttttcgcgcgaatacgtcagatttcgacggtttgctgggcaaccacagtatccggctcccacgacgtgcaatcggcggcaacctgctcgcccgtgacgatgttcttgacctcgtcgccagcgggctctgcgccttccgcaccttcggcagcggtggccgggaaccacacgtacggaatgccgagtttgtccgcgtacttgatctgcttgccgagcttggccgcggtgggtgccacgtcggtggcgatgccgcgcgcacgcagttggttcgcaatacggttggcggccgggcggtcctcttcattccacacagcgaccagcacggcggccgggctgacgcggttggcgtgcgcgccggcagcgtgcagcatgtagctgaccagtcggctcaggccgatggacaggcccacgcccgggtacttgcggttgccctgggaggcgagattgtcgtaacggccaccggaacagatggaaccgagtgatgcggcaccgtcgaggaaggtctcgtagacggaaccggtgtagtagtcgagaccgcgggcgatcttcaggtcggcgatgacggaaccggggcggatggcggcggcctcgtcgacgatcatggccagggtatcgagtccctgacgagccagcgtgtatgcctcggaatccttggcgatgccgtgagactcgcacagcgcatcgaacttggcggcaagctcagcaccgtcggaggcggtgagctcggccaattcgaggcaggcgcgtgcctgtgcttcggtggcgccgcaggtctcggtgagcagtcgggccacctcatcggcaccgattttgtcgagcttgtcgatctcgcgcagcacgccttcgacgtccgtcaggccaaggccgcggtagaagccttcagacaacttgcggttattggcgtgcacggtggccttggggaggccatacgcgcgcagctcttccagcgcggagaccatgaccagcggcagttccacttcatagtggtcgggcaggtcgccggcaccgatcacgtcgatatcggcctgcacgaactcgcggaagcggccttcctgcggacgctcgccacgccacaccttctgaatctgccagcgcttgaacgggaacgccaacgcacccgagtgctcgaccacataccggctcagcggcacggtcagatcgaaatgcaggcccaaacgctcttcaatcggagtgtcggattcatgaccgacctcctgcaaacggctcagcaggtagatctccttgctggtctcgccctttttcagcaaagaagcgccggtttccaccgctcgcgtctcaatgccgatgaagccgttgagctcaaaaaccttacgaagcgtatcgataacacgctgctccacaacacgttcggaggggagccactccgggaatcctgatattgatgcacctttagccacgaaatcaatataataggtgagggttgcgtcaaaacttcctggttcgcccgggatgggagacgctcccgcttatgcattctacgctttaaggagctggccatggccgacgaaactgtcaccgaacccgtaaacaccgctgcgcccgaagagcaggcaacgacacccgcacccgaagccagcgcggccacgccggcgccgactccgtcccccgcttccatgccgaaaccgcacgcgccctcccccgccgccttcgccaagaagactccgtcggtcaagccgcgcgctgccgccccggccgccgccaccgccacctattccgaggctgatgtcaaggccgccgaggccttcggccgcgtggatgacaacggcaccgtcttcgtcaaggatggcgacgccgagcgcgaggtaggccagttcccggatgtctccaaggaagaggcgttggcactgtacgcccgtcgtttcctggatctcaaggccaagctcgatctgctggccacccgtctggcttccccgaacatcaaggcccgtgaaatcgacgaatccgcgaagctcttgggtgaagaaacctccgagccggccgtcgtgggcgatcttgccgcactcaaggcccgttacgtggaactgaaggccgccggcgaggccaagaaggccgagatcgccgaagcgcgcaaggccgctcaggccaaggccgttgccgagcgcaccgccattgtcgagaaggctgaagcactggccgcttctctgggcgacaacaccaactggcgctccaccgccgacaagttccgtaacctgttcgacgagtggcagaaccaccagcgcaccaccgtgcgcatcgacaagccggaggccgaggcgctgtggaagcgcttctccgccgcccgcaccaccttcaaccaggctcgccgcaagtgggctcaggctcgcgacaacgagcgtacagccgccaaggaagccaaggaagcgattatcgccgaggccaatgagctcaaggattccaccgcttggggtgagacttcccgcaagttcaacgatctgatggaccgttggaagaaggccggccgcgctggccgtaacgaggacgacgagctgtgggccaagttccgcgaagccgccgacaccttcttcaacgctcgtcaggctgatcgcgatcagatcaactcctccgagaaggagaatctggctgccaaggaggctctgctggtcaaggccgaggctctggtgccggtgaagaccgacgccgaggccaagaaggcccgccaggagctggccaagattcaggaagagtgggatcagatcggttacgtgccgcgtgacgatatgcgccgcatcgagaaccgtctcgacgccgttgacaagcagatcaaggccatcgaggatgccgcttggaagcagaccgacccggaggccgacgcccgcaagtccagcttcgaggagcagctcaacgcccagctcgccgagctcgacgccaagatcgcggccgaatccgacccgaagaagaaggccaagctcgaagccgagaaggccaccaaggagcagtggctgaacgccatcaagtaagggtctcgtgccaggttcccctctgagggaagccggcagcaaggctgactgaggggagtttacggttataccgcaagctcccctcagtcgcctacggcgacagctcccctcagcgaggggagcttcgtcatatttatgccgttttcttctgccctatactcataactccaccccatagttcctcagtcacccagcaattggtgtcttacgcctgagtccctaccggtgctgcaataattgccgtgagcccttgatgtgcggccagatattcatgcaacggctggctgtatggcatattcagctcgccgtaattggttccggcacggaaggcggggtaactgtcgccgccctgaagcagatatgaattggatgcgataatcaccaggtcatcgtccgcaatcggtcgaccgtcaacggcgaggttcacgatacgaaccgccgcatgttcgtcggcagcacactcgtcagcgtcagcgttggtatcagcggcggcatcagtatcagcggcggcatcggcattgccgctcccaccggtcgtaccgcattcggcataccgatacgtcacgttcgaggagatgccgagccagcgccgctccagtcgcccatcgtcacggtggaattgctcggcgagcactctcttcacatcgcgcccggtgagcgtctcatgcgcggccttgaactgcaaagccatgagactatccacctcgcgcacggtgactttgccatcgccattcatatcaagccgtggagtccgcagactgccattattcgaaaatccgattaccggcaaacgatttccggcatacacatgcttcatgattgactcgcggttcgcgtccgccaccagcacaccgaccgtattcccgtgcttatccgaaccttgtttgtcgaaattcacgccggaggccaaggtgccaatcaccgcgttgccggcatgattcgaatatgttgccgccgcctggtaaatatgctgagcgcgcgatacctcatcgttcgcctcagcaccggcagacatccaagcggcttgcgccggatgcgcattaagcccttccacgcccagcacgccgtcaaccgccgtatggctggtgccattgccgaggtccacatcggccactcgcaccgtggcgcgacgcccggcaccggtgatgatcaaatcctgcacggccatattccgcccgaagctgcccgcctcgtaaataggcgcgccaccagcggtcgtaccacgcttgatcgcgtgattgtggccggtgtataccacatcaacatctcgcccaatatcggcggcggctgaagcatcggcgtgcagcaaggccaccaccgcatccacctttccggagcgtttgagttcacgggccacgcgattgatcgcgtccaccgcccgttcgtcaagatcggcatcacgcgtaatctgcggagtggctaccgagccgagcgcatcagtaagggcgcccacgaaaccgatccgcttgccgttcaccgttcgaatcgtagagtcacgtacatggctcagcagtccgtcaggcgacttactggcggcagacgtgttggcgcacagccagtcgatgccattgctgggatcagcgatgcgattgttgaaatcggcgacaccgcggtcgaactcatggttgcctaccgccgaaatcgtcaatccccacgctttggccatgtccagcgtgggttggtccttctccaccgccgactcatacggggaacctcccaccaaatcgccggtcgataccgggatcatattgccgggattatggctgtcggccacggtgaaggcggtggcgttgtccgcaccacgttcgatatgcccgtgaaaatcagtgatgtcggcgatggtcaccgtacgggtgccggaagatggattatcgccggaaaaaggaacggctcccgtggttcccgcacaagcataaggaaccaccagagccgtaaggataagcgctactgcaccaaaagcgatccccgatcgcttgccggcccaccgccggttcttcatattcctgctcacaccagtcacgctaggatcgtcgattgaacggccatgcctaggaaggcgactctcaggtgaattcttagcggcgtcttgggatgggaaaggcctgaccccgtactatcagggtcaggcctttgcaacccgtgtcactacgaatgcgtcggcaaggggagattactcggcaaattcctcgacgcagatctcagctaccgcatccacgcacgcctcggcaatcaggcggccgcgttcggcgcttgagccggccggattggcgagtccgccgtgagcgggaacgtcaccttggcgcaccgggtagcgtacataggatttcgccgtggcaccggcttcctcgaccatacggtccatgtgcaccagttccggcgcgtagtggagcatcaacgaagtttcggtgacggccgcatgctccaatgcccagccggggaacaccaatccatcgaacaccttgtcgataaccgactgcggaaccgggtcccaccaattggtttccacgatggtggccactcccccggtttcgcgggtgaccaggtcgatggcctcgacgatgaacgcctcgttttcaaaatgcgcgttcatgacgacgatcttggtgaagccatcggcgatgagttcgctcagcacgtcgtgcatttgggtgatcactgtcacgccgttcatgtcgatagtacccgggaacagcggcccgccaccggagagcggcttggacttgtatccgtagctcagggtgggcagcacggtgccgtcgatgcgttccgccagatcttcggcgacccgcgtggcgagtaccgcgtcggtaccgatgggcagatgctggccgtgctgttcggtcgaaccgatcggcacgatgacgggatgagtcttcacctccttgaattccggccaggtcatgtggtccatacggcggttgctacccattgcagtactcctttgggttggtggtggattggatggtcaatgaatgcgcccggctccctcgggaaaggagccggagctgaggagatcagatgtgattcagatccttgtcggtgttttcatgggaaagaatcatcgcgaccaaggcgatggccgcaacacccaccatgtaccaggccggggcgatggatgaaccggttagggcaatcaggccagtggcgatgaacgaggccgtaccaccgaagatggcattggccagattgaagctgaacgcgaatccggtgaagcgcacggaggtggggaacgtctcggtcaggtagctggacagggtaccgtcgttggcggtcagggtggcgcacattgccagctcaaccagcagcacgggccagaactgggaggtgttgaggatgaggaaggcaggaacggtgaggacgatgaacgccacgcaagcaccgatgagcaccttcttgcggccgaatttgtcggagatgtggcccatgccgaacaccatgaacacgtaggcgaccaagcagatggtggtgatggtgccggactgggtggcgtccatgccgacggtgtcagacagataggtcggcaggtaggtgagcacggtgtagaagccgaccgcattcagcacgcaggctccgaagctgatgatcagggccttgagatggttgtggaagagttcggcgagcggggcgaacatgccgctcttggaaacgacttggccgtcagcggaggcggcgctcttggactcaagagcatcgttcattgactggtacacgggggaatcggagagcttggtacggatgtacagcacaatcaggccgagcgggccggccagcaggaacggcacacgccatccccaaccgaccatcgcgctggagttcatgttggcggtcatcagcgtggccagcgtggaaccagcgagcagaccgatggcggtggacgccggaatcagcgagcagtagatgccacgctttgaggtgggtgcatattcgccgaggaatgtggccgcaccggcatattcaccggaagcggagaagccttgcaccatgcgcagcagcagaagcagaatcggcgcgccaacgccgatcaccgagtaagacggcaggcagccaatcaggaagctcgcaccggacatgaacataatcgagtgggccaatgcggctttacggcctttcttatctccgtagctaccccagaacagtgcgccgattggacgcaggatgaaggatagcgcgaacacgccgaaggtctgcagcatggcgacggtgtgattgtcggttgggaagaacaccagggcgatggtggtggcgaagtacgaataggaggcgtagtcgaaccactcgatgaagttgccaaggaaggaagataccgcgactttcctgaccatggcctgttcttcagtttgaggggtgaaattcatcagtcgtgcagatgtagtaatcgttgcggaactcatgatgtcaccgtcctttcaaggatgtgctgttcgtgtgactgaatgggattcaagtgggaattcgtttcgcagcaggtcgaccagcgccgcgatagcctcgactatgcccttgagtatttgctgaaacgtgaatcgtcgattaacccgttcggcgtagaagtggacaggttgcccagtggtgctggcgcattattcaccatgctgttcttgccatgatttcgtgagtttggcggcgaatagcagcatcgaccagttcggtttgtcgttatagtcgacgccgaccatttgtgtcactttgtccagtcggttgtacagggtttgccgtctgatacccaattgctcgcacgcgccggttttgctatcgaggttgtcgaagcagacgcacagtgtgtccagcaacaacggagaggcggcgacctcgaatccgatggtctgcaccacgagcatgcgcatcgccttgtccatatcagaggatgcgacgaaacggtcgacgagtgcggacatggtacttacgattcgcccgtatgccggttcctgattggcgatgtcacgcaataccgcgaacccgtcgaccagcgtcaccgtgtccaatgccactcggccatgcaccacgtacacaccgtcgccttccagtacggcaagcgcatccatgcaatggcgtccgaatgcggccgcaccgtctgaggaatcggtggtggagcaccatccgaccatcaagtcaccttccagcatgcaggagacggcgcatcccgaccgttcttcgaaccgttcgaccatcgtcgatacatggttgatgccttccaccaccgatctgaaccgaaaagcgaatggcatatagatgcatgatccggcaaaacccagcgcgtcgagcatcgcgtgcgcttcctgcgcctcaaatgtattgacgtgcacgccgtcggccgggcccatactcagatgatgcatcatgcccatgcgcgcgccgccgtcaatatagagggcggccaccggagacacgatggtggcgatggcccgacgcatcgtggcgtcgaaagtcatggtgcgttgcgtgatctccaatgctcccaccggccgggagcgactttcaagggcgatgacggcgctcgattcgttgccggcatcgaacgcacgacccgctcgagcggccaacagaccgtcaccatcgaaaatggcgacgctttcgccgaacagcgacgcaatggtttcggccacagcctcgatattgccggtacgggacaatccctcacgtaatgaagtggacattgtgtccacctccaattgcaagtgcatctgttcgtgcacgatagcggtattgacactctgacagatgtcgacaaaaggtacgcgagatttcagaccaatcaacgtcaacccatgcagcctggccgcagacaccagttcgtccggcatccgcaccacaccctccaccagttcgaccaccagagcggcgacaccagcctgtgccaggcttgctacatattgtcctaacgtgccgtgccaatcggcggcgagcagagcgttaccctcgataatcagcatctcaccgcccgaaaggaaactggagacatcctctcgctcgttggtaaacacccatcgcactggcgtatcgaggtctttgccttcgacctccaccacaggatcggctcgtttgaactgcgtgttatgaagcgcactgcgaatcgatacagtcatacaatctgtccattcccccgcggaacaccggtcgttccggttaacctcaccgcaaagcgtgctgttgacaataacctcagttggttacgcgggcagtcggttcacgtaaccgttcggcaacacaccagttgaaggagcgacgatgactaccacactgttcaccaacgcacatatcgccaccggagaacccggcagcacggctgcaagcaccctgccattgcaggacattctcgtcacggatggcgtgttcaccgcattcggccccggactcgcgcaacaatatgaggctcagggtggtgatctggcggccattgaggtggtcgatctgggcggcaaacttgtctgcccaccgttctgcgatacgcatctgcaccttgattacgtattcacggcccgcaagcccggtgcggtgaatgaaagcggaaccttgtttgagggcatccagcgatggagtgagaccaagtccgacttgacggtcgacgagatcaagcagcgcgcgaaaatcggcattaagaaagaaatgctgcatggcgtgcagctcattcgctcccatgccgatgtgaccgacccgaacctgacctcattaaaggcgctgctggagcttaaggaggaattgaaggatacggtcactctccagatcgtcagcttcccgcaggagggcatgtactcctacgagggcccgcatggcgaatcgggggccgagctggtggaggaaggactcaagatgggtgccgactgcgtgggcggcatcccccatttcgaacagtgccgtgagtttggcgagcattccatgcacacggtagttgagttggcttcgaaatacgacaagctcatcgacgtgcattgcgatgagacggatgatccgaattcccgttacgtggagctgctttcggcgttggcatataaggctggcattggcccgaaggtcaccgccagccacacctgttcgctgggatcggcggacaacgcctacttcttccacctgaccaagctgcttaaggcggcgcatatcaacttcgcctgcgcccccaccgagaacctgtatttgcagggccgtcaggataccttccccaagcgccgtggcatcacgcgagtcaaggagctcactgaggcgggtgtcaatgtgtcattgggccaggattcaatgcaggacccgtggtacccgctgggcaatggcaatatgatgctcattcttgattatgtgctgcatttggcacagatgatgagctttgaagaaatcgacgatgcgttgaagttcctgaccgtcaacggtgccactacgttgggcctgcgcgatatgtacggcttggaaacgggcaagccagcaaacttcattgtgctggacgccgatagtgtgttcaacgccgtgtatgagcgctgctcggtattgcgttcggtgcgcgccggccgcacgctgtttacccgcgaggagaccatcgacaccggactcgccctgctgcaataacccgacaacaaacagtagttccccttgacaggggagctatcgccagaggcaactgaggggtagaccaaaaacgtgcacattatgtgtgcgtaggtctacccctcagtcagcttcgctgacagctcccctgtcaaggggagctttgctggtatgcgctagctacgctatcgaaacggactacttctgcggagcgtcaccggaatcggcgggagcggattcggctggttcagtggccggagtggcgtcggctggagtctcgccatcagtggaggcaccggcttcggacgaagtttcggcatcggtggcggcaccgtcttcggcgggcttatcggcggcggccggctcctcgaacttctcccccttgaaggtgaattcgccgaggataccctcgccttccgcatccacaatcacgcgctgaccgtcttcgagatcgcccatcagaatcttctcggagatggcgtcctcgatgtcgcgctgaatcacgcggcgcagcggacgggcacctagcagcgggtcgaagcccttctgcgcgagcaggtccttggcggcgtcggtgagttcgagcgacatgtgacggtcgaacaggcggtcgttgagctgcttgacgtccagatccacgatctggcgcacctgcggctcggtgagctgcttgaagacgatgatgtcgtccagacggttcaggaactccgggcggaactgctgcttcaattcggagctgacctggtccttcatgcgctggtagctggactcgttgttggcacccaggttgaagcccgtgttggcggccttggcgatgtctcgcgtaccgaggttggtggtcaggatgatgatggtgttcttgaagtccaccttgcggccctgaccgtcggtcaggtggccgtcatcgagcacctgcagcagcgtgttgaagatgtccgggtgagccttttcgatctcgtcgaacagcaccacggagaacggcttgcggcgcaccttttcggtaagctcgccgccctcctcgtagccgacgtatcccggaggcgcgccgaagagtcgcgaagccgcgtacttctcggagaactcggacatatccacgcgaatcagcgcgtcctcatcgtcgaacaggaattcggcgagcgtcttggccagctcggtcttgcccacgccggtggggccggcgaagatgaacgaaccggacgggcgcttcgggtccttcagacccacgcgagtacggcggatagagcgggacagggcggaaaccgcctcgtcctggccgatgatgcgcttgtgcagttcggcttccatgttgagcagtttcttggactcggcctgagtcagcttgaacaccgggataccggtggtggagctgatgacctcggcgatcacgtcctcgtccacgaccatcttgacgtcggactcgccttcgcgccaggagtcttccttctgcttgcgatcggcttccagcttctcctgcttgtcgcgcagttcggcggccttctcgaagtcctgacccttgatggcctcgtccttgtcggcggcgatcttggcgatcttctcgtcgagttccttgagctcaggcggggcggtcaggcgcttgatgcgcaggcgtgcaccggcctcatcgatcaggtcgatggccttgtcgggcaggttgcggtcctggatgtaccggctggacagctcggcggcggactgcagcgcgccatcggtgatggtcacgtggtggtggttctcgtaacgggaacgcaggcccttcaggatctcgatggtctcggcgatggtcggctcgtgcacctgaatcggctggaaacggcgttccagagccgcatccttttcgatgtacttgcggtactcgtcggtagtggtggcaccgatggtctggagctcgccacgagccagcatcggcttcaacatgtcggaggcacccagcgcgccgtcggcggagccggcgcccacgatggtgtggatctcatcgatgaacagcacgatatcaccacgggtcttgatttccttcagcaccttcttcaggcgctcctcgaaatcaccacggtagcgggagccggccaccatggaaccgaggtccagcgagtagacctgcttgcccttcagggtttccggcacgtcgccggcctgaatcttctgggccaagccttcgaccacggcggtcttacccacgccgggctcgccgatcagcaccgggttgttcttggtgcggcgggagagcacgaccataacgcgctcgatctcgttggtgcggccgatgaccgggtccagcttgccttcagcggcttcgacggtcaggttgcggccgaactgatcgagaatggcggaaccggacttgttctgcttgtctgtcacgccgccggcgttggccagatcgcccttgccgtcaccggtgccggtgccggagttgccgcgaatcatatcgatggtcgcgctcctgagctcacccaggtcgacgtccatcttgatgagcacctgggtgcccacgccttcgccttcgcgaatcaggccgagcaggatgtgctcggtgccgatgtagctgtggcccagctgcagggcttcgcgcagcgagaactccaacacctgcttggcgtgcggagtaaaggggatgtgcccgttcggagccgcgttgcccttgccgatcatttcttcaacctgcttgcgagtggcatccagctccacgcccttcgaggcgagcgccttggcggccacgccctcaccttcgcggatcaggccgagcagcaggtgttcggtgccgatgtagttgtgctgaagggccctcgcctcttcctgcgccaacacgatcacgcgccgtgcacggtcggtaaaccgttcgaacatgcttgtccttcctcaattgacattccgtcttactctaccgattcacgatgacgtttattcatcggattccatgaattgcgccgtgagaggagaagaaaacgatatgctggttctagattcacccgtagtcgattacaaggaggctcgaaatgagtgaagctgcaaccaagcccgacatcgttgtcggcgtggatggttccgatgaatcctttgccgcgctgaagtgggcgcttgaggaggcttcgttaaccggtcagagcgtcaacgccgtgtttggctggacgcattcctgggatatggggtccgaaccggacagcgacgaggcctgggccaaagtccgccacgacatcgccaacgagctgcgtgtgtgggtcgacaaggccgctgcaggcatcgacttcgatccggcgaatctgaagctcacctcggtgaaggcctccggcacttcggccctgctgcagatcggccatgatgcgcagcagatcgtggtcggccgccgctcgctgagccgtgtggcccgctggttcatggggtccctgtccgcttcgctggccgaggccgccgaagtgccggtgaccgtggtgcgcattgccggcagcgaggatgagaccgtgaccgatgccatcgccaatgccctgacgccaggagaccagccggtccactacacgcagcctcagccggtggtcgaggaggctcgccgcccagtggtggttggtgtggatggttccgagacttcccgccgcgcgttcgacttcgcgctggaaaaggcacgactgcacgacgcgccgctgcatgtgatgttctgctggcagctcaaggatttgggcgttattccgggctatgagaacgccgtggcaccggtgaaggtcggtcagcgccgcgccgaggagattctcgccgggctgatggccaaggccgagattcccgatggtgtcaaggtcagcgcgaatgccttccatattcccgcgtccaaggggctgattgcggcatctcggtacgccagccatctggtggtcggttcgcgcggcctgtccggtctggacgcgcacttcctgggatcggtgtcccgtcagatcgtgaacttcgccgaatgcacggtgactgtggtgcactgattcaccgaaatcggcatggagtgctaacgcacgtctcggtgatgggcttgcagggaggaattctttattcctgcaaccgttgtagatgactttgttttagcttgtcgctagagcgaagtcatctgcatggcctcgttgccgaggccagctccaagactcacacggcttacgccgtcgcttggttcgcgtttcacaggatgccgcgttgcccgacgcgatgcgtcggtccgtcttccgcttcctccgcgcgcgtttaacgtctccggggcactcccggcgacttggatgttgatggccgcgttcagatcgcggtcgatgacaagcccgcactcctcgcaatggtagacacgttcggacagggacagtttggctttcaccgtcccgcagttcgaacatgtcttgctgcttggatgccagcggtcgatgacgtggagcctcgcgccggtgcgtgcggtcttgtattcgagctgtcggcggaactccgcgaacgcggcgtcctctaccgagcgggcgagcctatggtttctcaccatgcccgccacgttcaaatcctcgatgccgatgtccgcgtaggtgcgggcgagcatggtggtggtcttgtccagtaggtcgcggcgtaggtccgccacgcgggcgtgcagacgcgcgaccctcgttctcgcctcgcggcggcggttggagcctttccgtttgcggctcagattcttctgttcccgcctcaatcgtctgaggttcgagtccaacgcgcgtggattgcggatgatggtgccgtctgacagtgtggcgagctgtttcacacccaaatcgatgccgacactaccacctttcagcggcgtgggcatcggaccatccttgcgctcgacggtcaaactcgccatccagcgtcccgcatgccgggatacgctcatgcgcagcaccttcgcgccatccacccgcttggacacgttctccatgcagtgcacgcggcctatcttcgggagccgcagcgcataagggtcacagtcaatgagaccaaacgagcccgtcgtgtacgcgaatccgggaaccgccctgtccttggatttgaaacgtgggaagcccatcctgcggcctttccgccgccccttgcgggacttggagaagttcttcagcgcgtcggccaatgattcgaggccgctgttgtacgactccttgctgttctccggccaccacggcttgccggtctccatgctgacggcgagggcgtccttgttggcgttccaccacctgcgcagcgcgtagtacgaccattccggcttctcctgccgtccaagcatggccttgacgtgcgcgagtcccgcgttgtacgcgaaccgcgccgcaccggcatgggactccaagagtcgttcctgccgtggcgtcgggtcgagcgccaccctgaccgcctcaagcatcacgcgccgccctcaacgccgcgtccgtcttgcgcttggcggcacgacgcccgtacagtcgtgcgcagaacgaggtcaacacctcggtcatgtcgcgcaccaagtcgtcgtccggctccgtgtcgtccaccacgatgatccggcgtccctgcgccttcaacgcgctctccaccagtcccgcgttcatgcgggcgagcctgtccctgcgctccacgatcagcgtgcccacggtcgggtcgg

SEQ ID NO: 1666 - DNA, 5786 bp, Unknown
  R221_24m  MAG No. k141_133784
cgggcgtgaaaacaaccacatcgcaaccagtgtagctccggccgaccagggcacggtattccgcatcggacaggacgtcagcgacgttgccggtgaacgtcacggtttttttgccggaccgtataggggttagcgaatccctatcagcgtatgagggcgtgctcccatgtgcgttgtgcttcgcgcagcacctcgctgtccggccgcaggtagtagcgggcggtggtagcgatgctggagtggccgagtgcgcggcttacgactgccacgtccacgccggctcctaacgcggtgctggcccaactgtggcgcaggttcctgcgtggcacgtagggcaggttctgcgatctgcaccatgcggcgtagcgacgagcgacctggccgggattcaacaggccgatgagtcggccaccttctcgtggcctgatctcacggagtcgaagtaccgcgaatcgcggcagcacgacggtgcgacggctcaactcggttttcgggtccactatcacttcgtggccgtcaacccattgcaggcctcgcctgatcctgactttgccggtgttgaggttcagatcctgccattccaatccgagggcttcttcggtgcgcaatccgagacagatgctgcagatcagccaagcctccaactcgtgtccatggaaaccttgcaatagttgccgtatctggcggatatccaatacttccggctcatagccggatggcttcggcggtgtgaccctcccggccacgtccacgtccaatattccgagtcgaaccgccgaacgcagtatctgccgcaatacggcccaggctttacgtgccgcacctggtgatggtatcgagtcaagccacgactggatacgcggccctgtcaggtcagccaggtccatgtcacccaattcgggtcgtatgtgacgtcgccatgcacttgcatatccgacgcgcgtgcattcgcgcagcctgccacatgacggccaatacgactcgtcccaatactcattcagcaacatttcatacctccaaaacccatacgcagcatggccgttccatgcggatctgcgtgtgggttttccataccgtaggagccgtgcatgaacctgcccgagggattgccagcatgggcgtacatcgtggtgagcgccctggtgctcgccgcccagatcgtcaccgccatctggatcaaccacagaggggacgaaagggaccgggcgacgcgaggcgagatcacgaacaaccacgcgctgccgttgcgcgacgacctcgacgacaagaaccggcgcacattggacgccatcgaattattgcgcgacacggtagacggtctgcgtgacgacatgaacggcgagttcgcgaccgtcaatcgtcgcatcaccactaccgagcagaacctcatcgaactgcgccacgaggtcaacgacctccggcgcggaggaaacaaccaccaatagaaaggaacaccaatggcaaacaccaaaggcgtggccgaccacaaggccgccaacaccaatatccccggcctgaccgcggagcgcacgaaatccatcgtgctgctgctcgtccagctgttcagcgtcgtccagaccggtctgtccatcgcgggcatcagccagctgccgttcacatcggaccaggtgagcacggcgatcaccggcgtcatcgccgtcatcgcatccgtatatgcgtggtggcgcaacaacaacttgaccgtggccgccgtgcagggccagcaggtcgtcaatgccgtcaagcttgcccaggacacaggtaacgccgtggatatgccgggcgaggtcgtgcccatgagcgagatgatctccgatccggacgccaagaccaccacggagtgactaatagtgcagatcaaggaggagatcgtcaacgcagggcacggctacctcaatccgtccctgttcgccgtccacagcacggcgaatcccggcgccacggcccgcaaccaccgggacctgtggtcgcgaggctacgactacgcggtgcacctcacgtccgactggaccgaggcgattcattgcgtgccctacgaccggctgtgctggcaggtcggcaacggcaacggcacgtgcgagggcatcgagatctgcgaggccaccaacgcgtcggacttctggcgcggcatcgacatcgcagccgacgtgatagcccagcgcctccgcacgcacgggtggggcgtcgaccgcatgcacccacaccaatggttcagccagacctacggcggatccgaccatacggaccccatcccgtacttcacgcgcttcggctacaactggggcgccttcgtccaactcgtccaacagaagctatccggcgccacagccgggcaggaggtagacatcatggcaggaatgatgatccgcaacgacaacaccggggtcatctactattgcgagcccggcaagggccgcaccgctctcacacaccccgaccaggccaacctgctccagcaggccggcgtgccgctcatccacggcaacaacggcgccccatggtggggtcgtttcgaccaggtcgacgcgctcgtgcgcaagaccatggaacagctcggcgtatgaaccgcatccaatggctcgtcgaatgcgcgggcctgatcgcagccgtactcgcactcgaactgtatgctgcgctcgccgacgaccaaggcatgccctgaaaaccgaacgccccgctcaggcatcgcagacggctctcatgagcttgactgcggccggacggggccgatttttcacgttgtaggcgcggtccgagacggtgtaaatttatccgatttttatccgatgacctctgaaaacgacatatatcaccgaactcaacgaatgaactacataggcacaaaacgttgaaattccaaccgttttaggtcttacagaatttgatggagaaagacgaaaacaggtcgaatacaacaggatgataccaaaccagcaaaactatgaccctcgctgaggtctactgccgcttaggttttgggacttcggtaaaaactgaaaaatggcatccgttaacaatggttaacaatgaccgcagacctccgagtttgcggatgtttcagggcttgatcccttgggtgcctgaaggtacagagtgtcccactcggtgcgtataattaaaaagttatgccttaaggcatgaaaacgggctgtggcgcagtttggtagcgcgcttgctttgggagcaagacgtcgcaggttcaaatcctgtcagcccgacaatgaaagccctactcccacttgggatgtagggcttcttcttttttgctctgggggcgtttgctaacacaattccagtgttaacggattggctgaatccgttaacattttctgttaacgcagcttggtgcctgtaatccttgtgattccaatggtttcggtatgatcgatggatcgtcgcaatccctcacacgctgtgagccaattcgtgagccaactgaccggaacgacattcatgtcacgataattccgatacctcccgatcacatctcactgccacgtcaaattgtcgagatccacaccgaatcttgtcgcgttggcttcaatcagtgcaagcagccactgggccaaacccggttccaaagcatcgtaatgctgtacgaaacgctcgtcggccacgtacatgcggccgaggcacacgtgcattgacggggtgacatcgaaccataccaaggaacgacggtgggcttccgccagctcattgccctcatcgctgccgggcttcacgccgtgacgcatggcatcggcgagccgctgctcgatggcttcgaattgcttcatgtcgcgctcctgcatatcagacgttctcctcacctggtattccgcaacctgcatccactgccggctcccgccccaacggctctgcgcttcttcggcccattctcgggattgctgcgtcgcatcattcatatcgattcctttctgtgcaacgttcataagccgatcgatatcggccaatgcctgattgatatgttccgccttgcgtgcaagttggccccgacgatccgccaactcgcgtattacctcactcggcttggcatcgagcagctgcttgatacgcggcacgggtatgccgagctccctgtacagcagcagcctgcgcagtcgtctgagatccgaatcggaatacagccggtatccattccagtcgcgttgcggagacaccagacccatttcgtcccaatgccgcagcatgcgaatactgatgttcgtcagccgcgacacatcccctacgttgagatgggaaatacgctccgccggagtgtccatgtcgtgtgattgccggtcattcatggttacaggctaaagtatgacatcatgtgagggtcaaatcagcatggcgacgcgaacacagacatcgatttcagttcacagtatccacggctggagtaaaaatccgattatactgaatcgcacatcacactaacggctaaaaccaaccgtctccgacaatccatagggagaacacatggatgacatgaacccacgctgcggctggtgcaatctcagcaatcccgtctatgttgcctatcacgatgccgaatgggcggttccgtcgcatgatgaccaccacctctttgagatgctggtgctcgagaccttccaagccggactgtcatgggagacgatactgaacaaacgcgagcgtttccgtcagtcgttcgatgggttcgacatcgaacggatccggcgctatgacgagaacaagatcgccgaactcatgaacgatccgggcatcatccgcaaccgtcgcaaaatcgtcgcgacggtcggcaatgccaacgcattccgggatatccagacgtcgtacggcagtttcgacgactatatttggcggttcaccggccgtcacgtcatctacgagacaggcatgactacatcccctctgtccgacgccatcgcagcggatctcaagacgtacggcatgcgattcatcggctccaccatcgtctacgcctatctgcaatccatcggcgtcatcaatgcacatgagcctggatgcttcctgcaccgggaaaggtgacccgcgcaaggatttataaggtcgctcgggcagaatctctccgagaggaaccagtgcttctagttattttgcttatcgagttcttggtagcgctctttgaccacggtgaggattccggcagattgttcgcgctactgcgcggtgagcgcttcgagcagttcgctgaaagtcaacccaccttcactaccggatgacggatgatggttttgagattttccggtttggctcggcgcgggtcggataggtagatctcgtgatggcggcgggtgtcggagaagtcgagcccgtagccttgcgaacgcgcgtagccgtccagaatcgtcacggttgcgggctcgtcgtcgtacgggcctttgtgcatgacctgcgcgaccacgccttcatcgaagtcgaagagatatgcacgattgatgtcgacttcgggatgcttggaggcaaacgatgccttggcccacgcaaagacctcatcggtcacgaattccggcagacgaatcatcgaagtccaatagaagtcggttttacgcgtgtaatcgacgccgggcacacccttctccatgctccataagccctccagcggaggcacggtgtagtcgaagtacccgtcaatgtgctcgtccggattatttgacttcttgttcattttgatggtgaacgaaatgccgtacagcagttgcatcgccttggcgtaatcgccgccttcttcgttcgggtcgcccacaccgtccaccgcgacgaaccgcatcgccggtaccatgacgatggcc

SEQ ID NO: 1667 - DNA, 13799 bp, Unknown
  R221_24m  MAG No. k141_135400
agccgggctgctggggggggtatttcacggcaccggcggtgatgccctgggagagcttgcgctggggtagtgcccgatatcttgcgcactttggtcttcgcccgtccctgtggcgatgatcggttcgcttcccatacggtctcaccgagtcttgacatgtcgaggtagcggcgcgtcgaccactcgttcgacgtgacatagcgcacgcgtgcgcagacgagcatcaacgcgctgcgttcgtcggggaagctgccgaccatgcgcgtgcgccgtctgatttcgcggttgcgggggttgaccctggcgaggacgttgcgctcgaagcggaccatgcaccgctggtagcgggcatcgcgttcaaggcctcctcgacgctttttctgaccatacggtccagggtggtctccgacatggcctcatatcgcaaaaaccgtacgctgaaagtaactcagcgtacggttttcacgaaagcagctatcggctatcggtcagccgatagacctcagtcctcagtcgcagcgaccttggtgtcagccccggccttctgctcaaggccgagcttggagcgcttgcggctgtagccgaagtacacgatcaggcccagaccgaaccagatggcgaaacgcacccaggtctcccagttgagaccggcgatgagcacgaagcagaatacgatggccagaatcggggtgaccggcacgcccggcgcgcggaagccgcggggcgcattcggctgggtcttgcgcatccatagaataccggccgacacgatgatgaacgcggacagcgtaccgatgttcaccagctcgaacagcacgttgatgttgatgaagccgccggcgaacgcggtcagcagaccgaagaaccaggtgcccttgaacggggtgcggtacttctcgtgcacgtggccgaagaacttcgggaacaggccgtcacggctcatggcgtagcagatacgggactggccgtacagctgtacgagcatcaccgtggtcatgccgatgagggcgcctaggttcacgatcaccgcgagccagttcatgccggtctccagaatcacgccggccactggggcgtcgatgtacttggcgaactccttgtagggcaccacgccggtcatgatcatggtcatgacgatgtagagcacggtggaaacggccagggacagcaggatgccgcgcggcagtgtcttgttcgggttgatggtctcctcggcggaagaggacacggcgtcgaatccgatgaagctgaagaacacgatggatgcggccggcacaatgccgtacggctgggtggagccgggctggaaagtgtagatgccgtacggggagaacggctgccagttggacggcttgacataccacacggcgcacacgatgaacagcacgatgatggcgagcttgatgagcaccatcacgtcattggtgcgcttggtctggttgatgccgatcgagagcacccacgtgatgatcagcacgatgacgaaaccgggcaggttgaagtaggtggtgacgtccgggttggtgccgtaggcggcggtcagctcgaccggcagatgcagtccgaagccttccaacaacttgttgaagtatcccgaccagccggcggacacggtggccgcctgcagagcatactccagaatcagatcccagccgattacgaaggcgatgagctcgccgaacgccagataggcataggagtaggccgagccggacaccggtgccatggcggcgaactcggcgtagcacaggccggcgaaaccgcagcagacggcggccagcaggaacgatacggacagggccgggccggcggtgagcgcgcccttgccggtgagcacgaagataccggtgccgatgatcgcgccgataccgagcatcgtcagatcgaaggtgcgcatcgtgcgcttcaggggagtggattcggcgacaagctgatccacgcttttcttacgaaacagatccatgttcttctctcatgaaacttaagatatggggctagaccggacggatttccgggatcccggcacgcctcaacgccgggaatcaaaggcggcttccgagaaaccgcatatcggtcattagtgtacgactgccgggcgaaaacaaacgattatgaccacacgtcacattcctgcgcaacaataggtgcctatgagcatgaacgcagcacccgaaatcgcattctcgtccgagcagggcaaggccaactatgcggccgcccgccgccaataccccgcacaggccatcgtgaacctcaaaaccatgcgcgacaacatggcccacctggtctccgtggtcggcggcccgaactccggcacggcggtgatgggcgtggtcaaggccgacgcatacggccacggactgctgcccgccgcactggccgcgctcgccggcggcgcgacatggctcggcaccgcgcaatcgcatgaagcactgctgctgcgcaaactcggcatcggccccgaccgttgccgcattctgacttgggtctacaacggcaccgaagtgccattcgatgagctgatcgctgccgatatcgacgtatcggtcggctccctgcccggcatcgatgccgtggccgccgccgcacgcaagctcggcaagcccgcccgcgtacacgtcaaggtcgattccggcttcggtcgcaacggtttcacgccggctggattcgacgccgcgctcgccaaactcgtgccgctcgccaaagagggcgtgttgcatattgtgggtcagtggagccatctcgccgtggccgattcgcccgatgtgcccgaattcgtcgcctccaccgaccagcagatcgcaacgttcaaggacttcacgcgccgcatggaacaggccggcattccgccggagatccgtcacctggccaacacggcggccactttggaccgcccggagattcacttcgaacttacccgccccggcatcggcctgtacggctacgagcccgatcccgcgatgggcaccccgcgcgactggcatctgaccccggccatgcgcctgcaggcgcagctcggcacggtcaaggatgtggaggccggccatggcatctcttatggccgcacctacctgaccccggacaacacctcgaccgctattgtgccgctgggctacgccgatggcatccaccgctccgcttccggtttcgatatggaaggtgccaagcacgtggagaagccgggcggcccggtgcgcatcatgaccactgaaggtccgaagctctaccgcgtgtgcggccgcgtgtgcatggaccagttcatcgtggacctgcacggatccgccgccgaactcggcgttcacgagggcgacacggtcgaactgttcggcccgggccgcggcgaggattacgttgagcctaccgccgacgattgggcccgcgccgccgacaccatcagctacgagatcttcacctgcctgcgcaaccgcatcccgcgcctttacgagcatgccgccgaagtactgcccgccgccgacctcgccaagctcgaccccgccacgctgctataaggtgcattaccgccatacggtggcaccccgtaatcccttcttcccgaatatgtgccgttgacatgtgctgagcgtcacatattcgggaaatcggccccaatctcccgaatatgtgccgttgagttgacgtcagtggcacatattcgggaagtcgggattactgcggccgatatgtgtgcctatgcttggaatatggaaacgactttggatggggaacaggtgctgagcgatgagggctacagcgccttcgacgaggagcggtgggcacccgagccgcccaaatccaagtcgcgcacggctttcgaacgcgatcgcgcgcgactgattcattcgtccgctttgcggcgtttgggcgcgaaaagccagattctgattgccggtaccgacgatttcgcccgcacccgactgacgcatacgctggaagtcgcccagatcggtcgccaaatcggcgcattgctcggctgtgatccggacgtggtcgactgcgcctgtctggcccacgaccttggtcacccgccgttcgggcacaacggggagcgtgcgctcgccgacatcgccagcaatatcggcggcttcgagggcaacgcacagaccatgcgtatcctgacccggctcgaacccaagatctttcacccggacgggcgttcggccggtgtgaacctgacccgtgcggccttggatgcggccgtcaaatacccgtggaccttggccgaagccgaccaacaccccaagggggagcggtcgaagaagttctgcgtctacccggatgacgaaccggtgttccgctggctcaaaatcggcgctccccaggccaccaagcccatggaatgccagatcatggacctttcggatgatgtcgcctactccgtgcatgatgtcgaggattccatcgccaccggcgcgttcgatccgattgtgctcgccgatccgaagatgctggaccacatcatcgagcagacgcgcgcatggtatggggcgaagtgggatgccgacaagctgctggccgcgttcatgcgattgcgccgagagcatttgttccctgcacatttcaatggttcgcgcgaatcgttggcacagctcaagaacatcacgtccgatttgatcggtcgcttctgctggtcggtggaaaccgccacgcgcgacacgtatgggcccgggccgttgacccggtattccgcgaacatcgtgattcccgaggacacgaattacgagatcgtggcgttgaagggcatcgccgtgtacttcgtcatggcgcctcgcgagcgcgagccattccatcaggaggagctcaagatcgtatcggatttggtcgatgtgcttatggccgattcgccgctcccatccgacgctttggaaagccagttcctggccgattggaatgaatccaccaatgacaacgagcgcctgcgcgtcgccatcgatcaggtcgcaagcctgaccgacaactccgctctggccctgcactccatcttgtgctgagggcgtgttggacgggtgcttccctcagtctcgctgcgcgagccagctcccctcgggtgaggggagctgtcgctgtaggcgactgaagggagtttcgcggaagaaatgataaccgacggtaaaaatttaccgtgtctcaggtgaagcggtactctagagacttatggtcggaatgattaagaaagaggatgtcgagaaggtgcgcgccgccgcggacctgtatgacattgtatctgcgaccgtaacgcttaagccctccggcaccggcaccttcgtgggcctgtgcccgttccacgacgagaaaaccggcagcttcaacgtgcgcccctcactcggcgtgtggcactgcttcggctgcggcttgggtggcgacgtattcaaatacgtcgaacaatccgaaaacatcgacttccgcgaagccgtggaactgctcgccgacaagtaccatatcgagctgcactacgagaacagcggcaacggcccgaaccgcgagaacaccggctccaagcgcacccgactgctggaagcctgcgaggaagcccaacgcttcttcgtctcccagatcctgaccaaggaagcactgcccgcccgcaagctgctcggaggccgcaacttctcccaagccgactgcgaacgtttcggttgcggctacgcgccccaaggttgggataatcttgtgcgccacttggcctccaaggggtttacgcagaaggaaatcctcgacgcgggcttggcccgccaaggccagcgcggcatctatgactatttccgcggccgcgtgacgtggcctatccgcgattcgaccggccgcacgctcggcttcggcgcgcgcaaactatacgaagacgatcagatcgccgccaaatacatcaacacgccggacacgcagctctaccgcaaaacccaggtgctttacggcatcgatttggcgaaatccgccatcgtcaagaagcgacaggtggtgatcgtcgaaggctatacggacgtgatggccatgcacttggccggcattgacaccgccatcgccacgtgcggtacggcgttcggcgccgagcacgccaagattgtgcgccgcctgatcgccgacgattcgctgggcgcggtccagctggtcgggccgttgaaggtcaaggaccagccgttgagctcgcgcatcgtgttcacgttcgatggtgacgccgccggccagaaagccgcgctgcatgccttcggccttgattcggccttcctctcccaaaccttcgtggccgtggccgacgacaatctcgacccgtgcgacctgcgcatcgaacggggcaacgaggcggtgcgctcgctgatcgcccgcgccaaaccgttgtatgacttcgtgatcgacgccgccatcagccggttcgacctgacctacacgcccggccaagtgggtgcgatgaaagccgtggccccgctggtggcgcagattcgcgaccgctccctatgggacgcttacgcgcgcaagtccgcgggccgtatcggcgtggatcttgaggtgatgcgccgcgaggtgatgaacgcgcgccggcagatgcatgtacgcgatgaggacgcctacgcgcccaaacgtcgattcgagcgtgacgagccgcgtgtggaacccggcaccaacccatacgccaatccggccacgcgcaaggcgttggagcgccgtgacgccgccgaacaggcatatttcaagatcgacgacgccgtattcatcgccgaacagcagttcatggccgtgctgattcaggtgccgcgcgccatcgaccgcaccatgttcgggcagctgaccatcgaccatttcatgacttcggtgttccgcaccctgttccaggcgatcgcggccgccggcggaccgccatccgacgataccccgcaggggctgtggatgcacaacctcaccaaggccggcgggccgatgctgaatcaggtgatcaacgagctggccgtcatgccgttgccactgcctggcgacgacaccggtagcggtgcgcagccggtgcaggccaacgtgtcgggaggaggtgttggcgtgaatggcggtgccgccgcagtacagctgcgtcctgccacgccggaggagcagcgctacgccactgagcttctcacccgattgttggacatgggcttcatgcgccagatcggtttggccaaacgccgcatggcccagctgcccgacggcgaagagaagataaccctcctcggccagatcacccgcatggaaaccgcccgtaaagacctccaagcccaaatctacggcaacaccgtcggctaatacctcccactgattgcgcgcatcttcgaatacgtgccggatgcataaggccatacaaccggttgccggattggatgggtgcagaagttgcggattggccccatccaaattggactggtttgggtggggccaatccaatccgttcaataatgaagcgcgataccaagcagcgtcgaacgaagggaaactcatgacgcagaatcgtgcggaactcaaccgtaatctggcccagatgctcaagggtggcgtgatcatggacgtcaccacgcccgaacaggcgaaaatcgcgcaggatgccggcgcgtgcgcggtgatggcgctggagcgcatccccgctgacattcgtgccgccggcggcgtctcccgtatgagcgatccggccatgatcaagggcattcaggaagctgtctcgattccggtcatggccaaggtgcgcatcggccacatcgccgaagcccgcattctgcaggccatcgacatcgactacatcgacgaatccgaagtgctttccccggccgacgacgtgtaccacatcgacaagaaccagttcgacgtgccgttcgtgtgcggcgcgaagaacctgggcgaggcgctgcgccgcatcgccgagggtgctgccatgattcgtaccaagggcgagcccggcaccggcgacgtgattcaggccgtgcgccacatgcgcaccatgaacaagcagatccgcgagctcgtggccttgcgcgacgacgaggtctacgaggccgccaagcagctggccgtgccctacgacctggccaagtacgtgcacgacaacggccgtctgcccgtcgtgaacttcgccgccggtggcgtggccaccccggccgacgccgccctgatgatggagctcggtgccgaaggcgtgttcgtgggctccggcatcttcaagtccggcgacccggccaagcgcgccgccgccatcgtcaaggccaccgccaactggcaggacgccgatctgctcgccaagctgtccgaaaacctcggcgaagccatggtcggcatcaacgaggacgagattcagaccatcatggccgctcgcggcgagtgagtgcattaccttggctcccctctttgaggggagccaagaaagggtgacgctcccgccagcgggagtcaaggcccaaggagacaacatggttgtagctgttgaatatatttccaaagaagagtccgcggacgtcgaaaacgtcaagcacggcgtgaccggcatcctggccgtacaaggcgcattcgccgaacatgcggcggtgctggacaagctcggtgcgccgtggaaactgctgcgcgcggccgaggatttcgatgaatccatcgaccgcgtgattctgcctggcggcgaatccactacacagggcaagctcctgcattcgaccggactgttcgagccgatcgccgcccacatcaaggcaggcaaaccggtattcggcacttgcgccggcatgattctgctggctaaaaagctcgacaatgacgacaatgtctactttggcgcgctcgacgccgtcgtacgccgcaacgcctatggtcgtcagctcggtagtttccaggccaccgccgattttggtgcagcggatgatccgcagcgtatcacggacttcccactggtattcatccgcggaccgtacgtggtgtcggtcggccctgaggccacggtcgaaaccgaagtcgatggccacgtggtgggcttgcgtcaaggcaatatcctggccaccgccttccacccggaactcacggacgatacccgcatccacgagctcttcctgtcgctgtagtcgattcgtctgccgttagactggtatccgactgacgaatcaaggagacgatctgccatgcagcttgagctgaatcgacgcagcaaggtgccgatgtaccggcagctggctgccgagctgcgtgaacagatcgtctccggcgcgatggccgagggctaccgcctgcctcccgaacgcgagctgtcctcgcgtctcgaagtcaatcgcaccacggtgttgcaggcgtatcagcagctcaaggacgaaggtcttatctcctccaaagtcggcaaaggcacgttcgtgctgccggctgcctccgcaagccgaacaccgcacacgtcaaacagtgacttcgggaatgcaataacgcgaacaacacgatcgtcggcagaaatgggaacatcgcaagcctcctcttccggcgacgtagaacgtgctacctccactggtttcttgacgacggaccagggcagcagctctgcggcggtccatacgattcgtgaaagccgctcggttcagggcccggagccaaccgtcgtgcgtccgccatggtcggtgttgttctctgattattccaaccggtttacctaccatgacatcgcctcggccgagcgggcgcagcgcggcgacaccattattgatttcgccaccggttcgccgaacccggcggatatcccggacgatctgctgcgcaaggtgagcatcgaggcgttcgaatcgcgggaattcgacggccaaccggaatcacctatcgagggattcgaagagttgcgtgcgctgcttgccgaacatatgcgcgcacgaggcgtacaatgcggcgtccgcaacgtgatggtgctctccggctccgagcagggcatcgacctcatcgtgcgcgcgttcatcaaccccggcgactgcgtgctggtcgaacaatccacgttcttcccggcattgcagaccttccgctcggcggatgcgcgcatcatcggcgttccagtggacgagcacggtatgcgtacagacctgttggacggctattgcgcgcgattccggcccaagctcatttacaccgtcccgacgttccaaaaccctaccggtaccacgctgccgcccgaacgacgcagcgaactcatcgacgtggcgcggcgctatcagtgtctgatcgtggaagacgatgcttacggcgatttgtggtacggcgggggatcatccgacgcgcatcgccccataccgcttaagggcatggagaatgcgggatacgtgatgtatttgtcgacgttctcgaaaaccgtcacttcgggcctgcgcacgggatgggttgtggccgacccgcatgtgattaaccggctggcggctctgcggcgcatggtcgaccagcatacgagcacgtcatcgcagcgcatctgcctggaactgcttaaagaaggccgcgtcgccgaacatttgcgcggtttgatcaaggcttaccgcattcgacgagatgcagcaatcgcagcattggagcggtatgcgccggatgaagtgtattggaccgtgcctgcaggcggctactatatttgggtttccttaccggacggcgtgcgctctctggatgtattggaatcctgccgttcccaaggcgtcacgttcatgccgggcagcgtgttcgacgttgacgaaatggatgattcccatattcgtctcaactttgtgcgcccggatgctgctgacattgataccggcattcgaatcattggcgagacgatagcacagatgtagccaagtgactggctcattgcggttgtcgagttttttgatggctgcatacccacatcgatgggtgcattcgacgaatgaataagcgaggaagccatcatcagttcgctgtggcatgcgcatagcgttgtcgggcgaacggggcagaccacgtggtcgttgcgtgacctggccgatcgagccggcatcgcattgcccctggcgtagtggcgaggtggcgcagtaacgagtcatgccatcgcgagccgatgatgcgaaatacggaaccggtcgcggccatcaacgggtatcatacatgcgggagcaacgatacgttggcgtcagcacatccatctgactccagaaagggacacgatatgaccacatcctccgtttctccggtgaccactgaactggcgggcagcgaaaccggcatcacgtttatcattcacgccggagcgggcagtcgtggcaagcacagcacgcctgaacgcatcgcccaggtcgaacttgatctgcagcgcgccctcgatgccggataccagttgttggaatccggagcaccggcgcatgaggctgtggtcgccgccatccacgtcatggaagacgctcccgaattcaacgccggccgtggtgccgccctgaccagcgatggcatcgcccagatggacgcctgcctgatgaccggcgatggcgaggtcggtgcggtcaccggcgtaagcaccgtgaagaacccgatcgatgcggcgcgtgccgtcaaagagcagaccaagcatgtgctgttcgcggacccgaccgatgccgagatcgccgattggggcgtcgcgaccgaaagcaacgagtacttcatcaccgaacagcgtcgtcagtccttggccgaggctcagtccggcggcgatgagtgggagaagcatggcaccatcggcgccgtggcgcgcgatgccgaaggcaatatcgccgccggcacgtccactggcggcatcaccaaccagatgcacggtcgtgtaggcgattcgccgctgcccggttgcggcacgttcgccaaccagtccacggtggcggtgtcctgcaccggcatcggcgaggcgttcatcaaggtggtcgccgcccatcaggtgtcggatcgtgtgcgtttcgccggcgagaacgtcgaggatgccgcgacggccactttggacgaagtcgccgcgcatcatggcgatggtggcatgatcgttctgccggcggtcggccgtggcgtggtcgcctacaacagcgagatgatgaacttcggataccgtagcgcgcaaggcggtaaggtgcagggctgattgcccctcctgtattgcggcatatatcataatggccggtgtgctgcggattcttggtaaggaatccgcagcacaccggccattcatgtatgcggcaagtgccgccgatcagtgcggcagtgcgcgctacttggtgatcgtgttgtacgtgggcatgttcgtgtaatcgaactgcacgttcttcacgttctgtgcagacacggcggcgaaacgtttgaccgggaatactggggtaatacgcaacttcatcgctcctcttcctcgaatgaaactatgttccattggtttgagccagccacgtacggtattcgtgtctggcctgccacacaatgatgcagccgtatatacgggcacagcattgcgcggcagttcattgtatggaagacatgcaaactcaatgttttcttgtccaaataaaaaaacgagcgcggctgatgtgcggcaccggtccaaaaactcatgtccgccagcgcaacgcgactacgtaccttatgccggtctgcgcgtagaatagaacggctgcgatattgggttattcacggaggaatggatgcgacgctggctgatcaatgtagccaaaaatgagacgattctcatcgtcgccgcaatactcgccctgatttcgtgtttcattgtgccgccggacgccgattacaaaagctacattcacgccagcaccatcagccagctcatctgcctgatgattgtggtgtgcggattccagcgtatcggcgtgttccgcatcatcggttcgcgattgctggagaaggtcagcaccatgcgcggactggtcattacgcttgtcgctttgacgttcttttccgcgatgttcatcaccaatgacgttgcgctggtcacgtttgtgccgttcgcggtggccgtgctcatcatggctgggcaagaggataagaccatcctcgtggtcacgctgatgaccattggcgcgaacgtgggcagtatgctcaccccgatcggcaacgcgcacaacctgtatctcaaagccctgaccggcatgccgaccatggaattcctcggcatcatggcaccgtattccggcacggcggccgtgttgctggtcatcgtgatttccgtggtgtttggcggcaaaccggtcggcgacctgggcgacctcgaaaccggcgtgctggctcccgagcgcaacaaacaccagcccgacgagattcgtatcaccggctacggcgccggttatggcggctggcgcaccatcgtctactcgctgctgttcatcgtctgcctactggccgtctccgacgtgattcccctgtgggcgatgtgcgtgatcgtggtcgtcgtgttcctgttcaccgatcggcgcgtattcaaatacgtggattggggactgccgctcaccttctgcatgttcttcatcttcatcggcaacatgaagcgcgtgcccgaattctacgaactggcgcgctcgctggtcggcggccatccgctggaggtggcggtcggctccagccaggtcatcagcaatgtgcccaccacgattctgctttccggcttctgcgaccaatggcgcgatctgatcattggcaccaatttgggcggcatgggtacgctcatcgcctcgatggcctcgcttatttcttacaagaacgtcgtgcgccaatacccgcacaagaaaggccggtatctggccgtctactccgccgtcaacgttctgtttttggccgtattgctgaccttgagctggatcatcgagccgagtctctgagcc

SEQ ID NO: 1668 - DNA, 5160 bp, Unknown
  R221_24m  MAG No. k141_136958
ggcacccgcccgtgcagacaagcgcgacaacgcccgagtcaccgccgaatcgcagcgcaacgccgcgattctcgaactgctgtatgccaccggcatccgtgtcgccgaactggtgtcgatggatatcgccgacatcgacttttccaatcgcaccgtcagagtgaccggtaaaggcaacaagcaacgggtggttccgtttggattgcctgcggagcaggcattgcaggactggatcgattatggacggccagcgctggctcgtttggcgattgaaaaagccgtccccccgaacggtatttcttcagacgagggagccttgttcctcggtatgcgtggtaaacggctgaaccagcgtgtggcgcgtgaaatcgtgcataaggccgcacgtgaagcgggcgttccggacatcagcccgcatgccttgcgccattcggcagccacgcacatgttggatgggggagctgatttgagggaagtgcaggagatgcttgggcattcctccttgaaaaccacacaacgctatacgcacgtgtccatcgagcagctcaaaaaccgttacggtcaggcattcccccgagcatgaccactatgtggacgctggttaacaaacttagcaaaggctgaacatagccggtaaatggaccatgattttacataggcgtaacaaaaaagcaactggttgtctcccaagtgcgcaaaaatgtcaggcaatcagcaacgggttggattgttcgagacatcgtgagatgcaagtctcacgggtgacggggaatccagttccgttcgcctgaggcggggctgagacgtcctgcaacctaatgaataggagaaatcatatgaagaagaaagctcttgctttcgctgccatggcctgctccgtggccatgctgctgagcgcctgcggcggctccaacagcaacgctgcctccggtaacaccgctggctccaacatcatcactgcgtacaactccgaaccgcagaacccgctgatcccgggcagcaccaacgaaaccggcggcggcaagccggtcgacctgctgttctcccgtctggtctccttcgacaaggacggcaaggcttccaacgaagtggccgagtccatcaccccgaacgatgacgccacccagtacaccatcaagatcaagtctggctggaagttcaccgacggcactccggtgaccgctgagtccttcaccaaggcctggtcctacgtggccaacgccaagaacgcccagaagtgctcctccttcttctccaccatcgccggctatgacgatctgcagaaggatggcctcaagggtgacgagcagctctccggcctcaaggtcgtggacgacaccaccttcaccgtcgacctgaaccagtccgactccgtgttcccgattaaggtcggctactcggccttcgccccgctgccggaatccttctacaaggatccgaaggccttcggcgagaagcctgtctccaatggcccgtacaagctggaccactgggatcacaacaaggaaatcgccctcgtcaagaaccctgactataagggtaacgagcagcccaagaacgacggcgtgaccttcaaggtctacaccgacgactccgccgcttaccgtgacattcaggccggcaacctcgacgtgatggaatccgtcccggccgccttcaccaagaccttcaagaccgacaagaaggtccaggcttactccgaggccggctccgtcatccagaccttcaccatcccgtcctcccttgatcacttcaagaacgacgaggaaggtcagctgcgtcgtcaggccatctccatggccatcaaccgtgaccagctcatcgacaaggtgctcaacggcaacgccaccgccgccaccgagttcacctccccgaagaccccgggctactccgactccctcaagggtgccgacaacctgaagttcaacgcctccaaggccaaggaactgtgggccaaggctgacgccatctccaagtacgacggccagctcaccttctcctacaacgccgatggtggtgccaagccgatttacgacgccgtcgtgaaccagctcaagaacaacttgggcatcgacgcggccaccaacccgatcccgaccttccaggagttccgtgacgccgtcaccaaccgtcagatgaagggcgccttccgtaccggctggcagcctgactacccgtccgccgagaactacctgtggcagctgtactccaccgctgctgctgacggcaacggctccaacgacggtgactacaagaacccggccttcgacgacatgtgcaagcaggccgctgccgcttccagcaccgatgacgccaacaagctgtaccagcaggctgaggaaatcctcctcaacgaccttccggccatcccgctgtactactccaacgcctccggtgtggcttccctcaacgtgaagtccggctacgccttcgattggcagaacctcccgacctacaccgagatgtccaagaagtgagtctgactcactgaacggataccgttaggtagttcggaaataaagggcgaggatcgcaagatccccgccctttttgttgtgtgaggggtgcttgctcacgccagcgggaaccaagttaaagtatccactatccgaccgcgaccatggacatatccgccagcattgcccaatctcaaaccttgcgttaacgcaaatttacatatcacagtccgggcatgcggtaaactgtcggagtatttatcgaccggcgggggcgtactataccctttctggccggtctaggaaataaggagcaaccgtatgggtaagtatcttctgcgacgcattctgcagatgattcccgtggttctcggtacgactcttctggtatatgcccttgtattcgccctgccgggcgaccccgtcaaggccatgttcggagacaagcctgtcaatgaggccgtcgcagcccagatccgcgcagaataccatctcgaccagccgttcatcgttcagtacttcatctacctgaagaatgcactgaccctgaacttcggcgataccttcgccggccagcccgttctcgacgaaatcacccgcgccttcccggtcaccatcaggctcggcttgatggcgttcgtgttcgaggcgattttcggtgtggtcttcggcattatctcgggcctcaagaagggcaagtggtacgacaccgttatcctgatcgtctccctgctgcttatttccgtgccgaccttcgtcaccggcttcgtcatgcaatatgtctttggtattcagtgggcgatattgccggtgacggcaggcgccgaccccggcttccttgatctgctcatgccggccatggtgctcggttcggtgtcgatggcctatatcatccgactgacccgctccgaaatctcctccaacatcgccgaggattacgtgcgcaccgcacgtgccaaaggtatgtcgaacggtcaggtcatgctgcgccacgtgctgcgcaactccctgattccagtcgtcacttacctcggccaggacatcggcgccctgatgggtggtgccatgatcaccgagcagatcttcaacatccacggcatcggcttcctcacctaccagtccattctgaagggcgaggcaaacctggtggtgtccatcgtcacgttgctcatgctgattttcgtagtgtgcaacctcgttgtcgacatgctgtacgcggccctcgatccgcgtatccgttacgcgtgatagggaggagtgagtcacatggcaaacgaaaccactgaaaacgagctcaaccagaccggcgagccaggaaccgaatacttcatggaaaccctgcccggtcaggaccgttacgtagctcctctcgacgagaccccgttgcaggacgtcgattccgtcgacgaatccgcaccggccaccagcatgtgggccgacgcatggcgaaccctgcgccgcaacccgctgttcatcatctccggcttgctgatcctgttcatcatcgtggtggccatcgcccccggtctgttcaccaagcaggatccgaacgcctgcgatctgggcaactccttgagccccgcctccgccggacaccccttcggctacgacctgcagggctgcgacgtgtacacccgcgtggtctacggcacccgtacctcactgtccgtcggcgtgctctccacgctgctggtcgtgatcgtcggcaccctgatcggcgccgtcgccggcttcttcggcggctgggtcgacgcggtgctgagccgcatcaacgacatcttcttcgccctgcccatgctgctcggcgccatcgtggtgctccagatgttcaagacctccaagtccatctggaagatcgtgctggtgctgacgctcttcggctgggtcggcgtatgccgcatcgcccgcagcgccgtgctggaatcgaagaacctcgaattcaacaccgcctccacggccctcggctccacgccggccagaaacctgttccgccacatcctgccgaactccttggccccgatcatcgtcatcgccaccacctcgctggcctcctacatcgtggcggaagcgacgctgagcttcctcggcgtcggcctgccgaccaccacggtgagctggggcggcgacatctccagcgcgcagaccaacctgcagaccgatccgatggtgctgttctacccgtccgccgcactggccatcaccgtgcttgcgttcatcatgatgggcgacgccgtcaaggacgccctcgacccgaagagccgtacggcctgagcgaggggagtggagaaacattatgactgacaacaccaacgccaagatgctggctatgcagaaagagcatggtccgctgctcgaggtcaaggatctggccatcgacttcaccactgacaccggcaagccggtgcatgcggtgcgcgatgccaacttcaccgtctaccccggccagtgggtggccatcgtgggcgaatccggctccggcaagtccacctccgccatggctgtgctgggcctgctgcccggcaccggtcacgtggtcaacggttccatcaagcttgacggccaggagatcgccggcgccaagcagagcgagttcgacaagctgcgcggtaccaagatgggtctcgtgcctcaggacccgatgagcaacctcaacccggtgtggcgtatcggctcccaggtcaaggaggcgctgaaggccaacaac

SEQ ID NO: 1669 - DNA, 8983 bp, Unknown
  R221_24m  MAG No. k141_139428
ccactatggttcggccgattctcattgagaggagtggatgaaccggtcagaatccactgacctttattcgcggaatcatcgtcgacgcgatgacggacttcatcccatatagctggagcgagttgccactcatccacgatatgaggcctatctcccagcagcatcaatgacggatccgccttagccgcagccaaattgttattgcgatccacataggtaatgctggctgcatgggcccgcgcagaccaagttttcccgcaccacttggtgccggtaatctccaccgcgccaaagatgcgcatatatcgttcgatctgtgcatccacgatacgagggcgataggctttcggcttgatgtcgctcgccagagaatcggccattccgcgcacctcccgttatttcacgtccgccatcgcaataatccgaatttctcaactaccaaaatccgaatgttgcaacgacgaaaatccgaatattggtggtggtagaagcggtgacgggaccactctgcattgagcggtctctctcagtctcgctacgctcgacagctcgaacgcaatttaaggacagctttccagctgccattttatttgctcactgtcattcgccttcgcctaaaaacgcctccggcgttttcttcacggctcagctcatcagagggggcttggaattttgtttacgccacctgttcgtggacggaggcattgacccattgggtctgctggacgttgtagccggagaagatgccgatgtcgagcatgcagtcgcggtaatcgcggccgtgggcgatggtgatgtagctgtcgtccaccaatcggttatgcgtgggatccagtccgacccatcggccatcctgatacacctcgacccaagcgtgggtcgcgccctctcccccaagtaaaccggcaatgtagcgcgcggtcaatcccacatgccggcacacggacagcattacatgggcataatcctggcatacgcccttgcgctgggccaaggcctgttcggcggtggtgcgaatcgtggtggaaccgggcgtatacacaaacgccttgtagacctcatccatcacttcggcggcctgctgcaccggagtggcgtcggcaggcaacgcagccaagcgttcgcggcatacgtcgatcatcgcctccacgttcgggccgggaatggtgagcgctgaattgaatcggtacagcggtttataggcttccttatggatatgcgcattgtccacgaaggcgatgccggtcaccgaatagctgaatatgtcgtgcggctcggggatgaatccggtcatcaccacggagccaaaggagtcgatggtggtttcgagttcggtttcgggctgaatcttcacttccacgtcaatcacctgttggcgagggccagtggcgggaatacagcgaagctggaacctgtgatcggtgaccggtgcgctgaaggacagcttcatctcatagtcgaacacgagttttttcacaacgtctcctgcacttacacacgagccggcaaccggcacattctcgggataacgacactacagccatggctgaggtatggtccgcgcgctcacagtccacgcatatattccggcaattcgccgatacgcatcggccggcactcgggcgcacgttttttcgccataccaccatagcatttgaacccgtcagggcgaacgtcgggttaggggcgcttggcatccatgttcatggagctcagtgagcccatgtctttgatggccagggcgctgacacggccggaataatcgtcaaggtacttcttcagcaggtcggcgacttcctgatacccgcgagacggcagctgaccgaccagccagctcagcccatcggcgaagcaactaggcaacggcatgccgtcgaggatcatcgagtaggaggcgagcttcctaagcggggcttccatctcctccatcgtcagaccgaagcgcgtgtacaggtcgatgcgctcaagatacttgccgatgaagatgaacgccttcagcgtggggtcgaccggcgaattctcgatgccgccccagaaggcgagcatgtcatcggtaatatcgcgctgcttgtagatgtcctcggcgtcggccgcgtatttggcggcatcggtgatattggtcatcgccaactccacgtactgcaacagacgcgagctcaattccgggcgcagaatcacggcgttgttgaatgcggaggttacggccgaccgcaccgaatcagggttggacccgtcgtacaggaagctgttcacgaacccgtcgaagtcctcgaaatcttcgggcaggtcgagtgcgtgagcgaacggacggaaggcgtccacatcggtgtccatcacacgatcgtagaacgggaagaactggttcagcgtggtgaaggcgcgctcggtgtaccgacccagccaatacaggttgtctgccttggaggcggtgaccagagacaacgagtggcggcgggactggctcagcaggttcgccacctgcacttcagcaccgtattcatgctccacgccggattcgggtgccaacacccacgtatccttgaatccgccaccctgcgacgagttgacgatcatctggccgggcaccgacgagtatcgagtcaagcccgaataccacacgtgcgtgtttttgccggtgaccacaaaggcacgcaaatcgcatttgcgcggcgacatctcaccggtcttcgggtccaccacatcgatatcgcggaactgaatcacctcttgggcgatgaatcgacgaggctcctccttgatccggttggcaagctcctcacgtgcggcagcatccagcgacgaaccgaacaccacgccgtaaccaccggcttcggccacatccttgatgaccagctcgcccatacgattcaggacttccttacggtcggcctcgaacatcggcatatacgtgggcgcgttgttgagaatcggttcctcgccgagatagtacttgatcatctgcggcacgaagtagtagatggccttgtcatcggccgcgccgttgcccggcgcgttgacgatggccacgttgcccgcgcggtaggcggacaggataccgggcacaccgatcaccgaatcaggattgaaggcaaacggatcgaggaattcgtcggacagacggcggtagaccacgcccacacggtggcgtttgccggcgtagtcgaggaagtagaccttgttgtccaccacttcgaggtcttcggggaaggccagtgcggcgccggttttctccgccagataggcgtgctcgaagaacgcggaattgtagcggccgggggtcagtaccacggcgatgccctcagtggacacaaagtccatggccttgcgcagtaggcgcgggtattcgcgattgtcgcggatgtgcacgtcgcggaacaggcgtggggagatgcggcgctcgatgtcgcgcacgaacagcgggtagctggcgcccgaggggatgcgcaggttgtcttccagcacccaccagcggccatcttcaccctggaccaggtcttcgccggcgatgtgcgcgaagatgccgccgggaggggtcacgccgttgacctgcgggaagtagccggccgaggtgtatacgtattcctccggcacgacgccgtcatggatgatggccttgtcggagtagatgtccttcagataggcgttcagggcgttgacgcgctgcttcaggcccttctccaattcgtcgtattcgtcggattcgataatgcgcggcacgggatcgtacgggaagagccggtcatggtattcgccgttcttgtagatgccgaagcgtacgccgttgcgggacagctcgcggttgatcgcctcgcgacggtttaccagttcatgggccagtctgcgtgctgcggattcgatcatcgtgcctgctccttgctgtggcggcttctgtggcctcaagcggttaggcgtttcgagcgcacgctgacgccgcaagccgtaaccgggtttgatggttacaacctaaggcggccccgtttcagcaaacgcgcgagaatgttacaggcaggtcacttcgccgaccgcactcgtctcgccgaccgcgcgcatctcgccgaccgcactcgttacaatgaatggctatgacacgactgcgcattgacttggcctacgacggcggcggattctatggctgggccaaacagcccaatctgcgtacggtgcaaggcaccattgaagatgcgctgcacaaggtgctgcgggtgccggccgatgatgcggccgaaccgttgcgtctgacggtggctgggcgcaccgacaccggtgtgcacgcctcccaccaagtggcgcatttggatgtatccgatgaggtactgaatcgctgcgtaggtcacatgaccattccggtcaccgaggcgctgactcgcagactcaaggctgtgctgccttcggacatcatcattcatggcattgccgtggcaccggccggtttcgatgccaggttctccgcattggagcgcacttatgtgtatcgggtcgccgatcgttcgtccgagatcgacccgcgcctgcgtggatgcgtgcttaccgtggatgaatcgctggatctggagcttatgaaccgcgcagcctcattgaccatcggcctgcacgattttggttccttcgccactccgaatccgggaggcactacgatccgcgaagtcaagaccgcctattggcggcgggtgccgatcactcccctggtgccggatgcgatggcatcgcatgaagcatatcggactccgtcgctggagtccggactggcggtgttcacgattgtggcggacgcctttgcccgcaatatggtgcgctccttggtcggctcatgcatcaaagttggttcgggacgcaaatctctggaatggtttgccggcaaaatggccgagccagtgcgtgaaggctcaagcgggccgattgcgccgcagggcctgactttggagcatatcgcataccccgtcgatgatcagctggccgcaagagccgaggccattcgagccgtacgtacgttgtagtttctatgaaacaacgcaaaagggctggaacccaaacggattccagccctttcagctagcttggcgaaacgctattcagctcactcggccttctcggcgtcagcggcttcctcagcgggagcctcagcctcagcggcggcggtctcctcgaccggagcctcagcggcctcagcctcaacggccggagcctcttcttcggcaaccttggcggcggcttcagcttccttcacaacagccttcttggcaaccggctcggtgacgagctcgatcacagcggccggagcggcatcgccaacgcgcggggcgatcttgacgatacgggtgtagccaccttcacgctgctccatctgctcggcaatctgggtgaacagaatgtgcaccacggacttgttgcggatgacgcgcatcacgcgacgacgggagtgcagatcaccgcgcttggcgaaggtgatcaggcgctcggccagcggacgaaggcgcttggccttcggcagcgtggtggtgatgcggccgttctggaacaggctggtcgccatgtttgccagcatgaggcgctcgtgtgcggggctggaagccagacgcgggcccttcttaggtgtaggcattgggtttactccttatatgtccgttcttcaggcaagcaggtgggcatatgcccgaacatccgcttgcctagtgaacgaacgattggtcaaagaggcagatcactcgtcttccggcgagaagaacgtaccaccttcgagattattggtatcgaaggccatcggcgaggacttgaggctcaggcccagggtctgcagcttctccttgacctcatcgattgacttcataccgaaattgcggatgtcgagcaggtcctgctcggtgtgggagacaagctcaccgatggtgtggatgccctcgcgcttgaggcagttgtaagaacgctgcgtcaggttgaggtcctcgatcggaacggccatctcggggttggtctcctcggccaccggggccggaccgacctcgacgccttcagcctgggcgttgagctcacggcacaggccgaagagctccaccaaggtggaaccggcggaagccaccgcgtcacgcggggagatggcgggcttggtctccacgtccagaatgagcttgtcgaagtccgtgcgctgttccacacgggtggcctcgaccttgtagctcaccttgagtaccggggagtagatggaatcaaccggaatacggccgatctcatcgttgtcctgcttgttcatctgggcaggaacatagccacggccacgctcgacagtgaactcgatctcgagttcgccatcgtcggcgagggtagcgatgtgctgctccgggttggcaatagtgacgccggcaggcggggtgatgtccccagccacggcttcgcccttgccgctcttgcgcagatacatgaccacaggctcgtcatattcgctggtgagcacgatgcccttgatgttcagcaggatctcggtgacgtcttcctggacgcccggcagagtggtgaactcatgcagggcaccggaaatacgcacggaggtcacggcagcacccgggatggagctcagcagcgtgcgacgcagcgagttgccgagcgtgtagccgaagccaggctcgagcggctcgatggtgaagcgggagcgctgcggattcagagattcctcggtaagagtcggacgctgtgcaataagcactgtggttatcctttcagcttgaactcggtggtgcactcaccggtcaggcggttttggatggatttggtattgctgagtgctcagacgcgacgacgcttcggaggacgaacgccgttgtgggcttgcggggtgacgtcggtgatggaaccaacctcgaggcccgcagactgcagggaacggatggcggtctcacgaccggaacccgggcccttgacgaacacgtcgaccttcttgacgccgtgttccatcgccttgcgggcggcggactcggcagccataccagcggcgtacggcgtggacttacgggagcccttgaagccgacatcaccaccggacgcccaggacactacggcaccggacggatcggtgatcgaaatgatcgtgttgttgaaagtggacttgatgtgagcctggccgaccgggaccgacttgcggtcgcgacgacggggcttacgagcggcttgcttaggcgctgccattgaccctcgtttcctagtaacgaactttgttgttgacgttcgggcgatgggatgaaatcatcccgtggcccgaatcatgccaccgactacttggtggccttcttctttccggcgaccgtgcgcttcgggcccttgcgggtacgagcattggtcttggtgcgctgaccgcgcacaggaagtcccttacggtgacgctggccttggtagcagttgatctgaatcttgcgacgaatatctgcatcgacttcacgacgcaggtcaccctcgatcttgtagttggcttcgaggtagtcacgcagcgtaatcagctgctcgtcggtgagatccttgacgcggatgtccgggctgataccggtcgcggcaagcgtttccttggcacgagtgcgacccacaccgaaaatgtaggtgagggcgatctcgatgcgcttctcattggggatgtcgactccggcaagacgtgccattgcgattccttcttgttgccgtaggtcttgcacccgctcgcccggttacccggcacgggcctacgtacccgtggttcagtgtcgttcccttgcgggaagcactgtgagagagtgccttatttacttagtgccgctggagaatctgctctcagccctgacgctgcttgtggcgcgggttgacgcagatcaccatgacgcggccgtgacggcggatcacgcggcagttttcgcagatcctcttcacgctagggctgaccttcatggttatccttttcttgtgtacctttacttgtaacggtacgtaatgcgtccgcggttcaggtcgtaagggctcatttcgagcacgacacgatcctgcggcagaatacgaatgtagttcttacgcattttgccggaaatcgtggcgagcacgatgtgcttgttctcgagttcaacgcggaacatcgcgttaggcagtgcttccactacctgtccttcgacttcaatcacaccgtcttttgccatgtgcctctagtcctattccgttggatgattactatggcatatccgaagacacaccaactgtcaactatatacgcacatacccctgtacgaacactcggcgtgtcgcacaggggtatggaaacgttgatgtggtatttcggcatcactccggcttgttggccgggctgccgaacctactactcgaggtggctgatgatacggccgctgatctcgtcgatgtcgccgacgccgttgaccacgacgagcaggccacgggattcgtagatgtcgagcagcggagcggtttccttctcgtaggtctccaggcgcttggcgatggcctccggagtgtcgtcagcgcggccctgctcggcggcgcgcttcttcatacgctccagcagcacgtcacgggcggcttcgagggccaccacgtggtcgagcggagtgtcgaggtcggcgagcatctcgtcgagagcggtgacctgggcggcgttacgcgggtagccatcgaggatccagccgttattgcagtcttccttggccagacgatccttgacgatcttgttggtcagggagtcaggaaccagctcgcccttatcggtgtagctcatcgcctcaagaccgagttcggtcttgttcttgatgttgtagcggaagatgtcgccggtggagatggtggggatgttgaagtgctcggcgagcagagcagcctgggtgcccttgcccacgccctgggggcccatgatgagcagacgcatggtggtctccttttgtgtcggttattaatacggttttggctcccttggttaggggagccattgagttatatgtggaagaaagattgctccgtcgtggaacagtcc

SEQ ID NO: 1670 - DNA, 11473 bp, Unknown
  R221_24m  MAG No. k141_140307
atccgtcacgtcaccgcgaacgaatggtcgacccgccgctatctcgacatgtcccggctcggtgacaacctcgtggaagcgaactgactatcgcgccatggacggccacgatccaaagtgcgcaacttttcgggcactacctgagcggtgtcggtatcgttgaaaaagtaatgaatgacggttctatcggttcaacctttaagggacgaaccagccgcggcaccatggcgctgatgcatgactatgccgagctcatcaatgaattacgtccgacagcagagcaattcaccgagatcgagcaatactgggtcaaacgaattcaggcgttcttcaccagcaaaccattcaagctggagtccgacaactcactttccgttgatgcggccgtggaacatctgctgcggcaggcagcgcagcggcgaagggagaatccgggcaccatgtacgtcggcaccgtcctgcagcatctcgtcgcggcaaagctcaccatcgttgctccggaagtggaaatcaacggcgcgtccgttgctgatgatccgagtccgcggcttccaacggtgaggccgcggaccgtctcacaaaaccgtccgcggctccgccctcctgtttcgtcgcaactgactacaccgacgggttcgggcgcttcgtcacgaaaacgccattgcgatgcaccgtatacgcgccgccgtcactgccccgttccgcccggaacaggacgatcggctcccctgcgatgtcgcgcagttcgacatccgatctgccacgtgtcagatagaagtcgaatatggcgtcgtcggattgacgcacggtgtgcagaacgtcagaggtcacgccgctggcgggcgaccgcaggttggctgccggctgccggccatcctgcggctgcgcggcaagccagcctcccacgaatcgcgtcagatcgctcacgcccagatcgcagccgaggaaatacgcctccccttcgccgtacgtgttgcgggtgatcgcggccatgccgtcaagctcccactcatccgcttcttcgccggcatacgaggcaagcacctgcacatgcggtccggcgacggtcacgtcaccgagcttgtcgatgacgcgatcgagccagtcgaaatcccaatggtcttcgatgggctggaggcgatctcagctgaagatggcaagggccacggtgttgacgccggcctggcccatcaggcggatgtcgtcatcccagatttcctccggccattagtcgggactatagtcgccaccgaaagcgatgccgcgtccgtccgcggtcagcagttttggccatgcgaagtcacgtcatgcacgcacggttatctcctttggcaggcggcgcagggccacggcccatatcggataccagctgatactagctgatagacactcctggccgatagtcgacacgccgccggttccggccccactgccggaaccgacatgggtatgttcatgaccgccgaccgcaggaacgaacaggcccgtccgccacggaccgcatcttgcggttcaggcggacgggccttatgggagggatgggaacgggagatcagttcttgactgtctgcgtctcatcgccgacggctgcggcggcttcaacggccgccacgggctgcgcctcatcgtcgacgatctcgccggaagcgagcttggcttcgagctcgtcaacgatctgcgcgtgcatcttctcggtgatcttgaccttggagacgaacaccaccaggctgagcacgatcaggatgagcggggcatagaacgcgcagatcttgaagacgtggatattcgtcggggtcatatcggcggcggttgcgtcacccgtcatgccggccgcaagggcgatgaagccgacgatgccgttcgacagagcgccgccgatcttatcaagcatcgggcggatggaaagcgtaacggcctcgttgcgcttgccgttcttcagctggccgtactcgatggagtcggtcagggagaggatgaccgtcatcatgatgagcgtaccgggaacgtagaagagcaccagcgcgatgaagaccaggacgatgttgctggagaacagggcgagcatcacataagccacgatcatggagaccatgccgccgatgtacaggtagcggcgcggaatgtacctgttcagaatcgggtacagcggggacatgaccaggcccgcaatcatggcgatgacaccggtcgcggagaaagcggcctgattgtcaaggacgaacttgaacaggaagagaagcacaccggtggtggtcacgttcgcgatggcgtacagcaggtaggacagggcgacccacagcagctggtcgttctggaacacggccttgaacgcctgcaacggaccaccgttgtcttcggcgttggcgcgaagggcgctttggttttccctggtgccgaaggcgacggtccaggcggtcatgatgccgagcaccgcgacgatgatgccgaaagcggtccaacccgactggtgctcggcgttctcgccggtgaacacccagctgaaataggtgacgaccggaatcacgaggatggtgatggcgttgccgccgatggagccggtgaaggagccgagggcggtgtaggtggaacgttcgtgggagtcggaggacaatgccgggatcatgccccagtaggagatgtcacgcagggagtagaacacgtcaagcacgatgaacgtgatgacgaacacgacgatgaacaatgtggagttaacgttcaccaggccaaacatgccgctgaaaaccacggcaagcagcacggaggagaccagtccgccgaagaactgccacgggcggaaacggccccacttggtggtggtgttgtccacgaggttgcccagcagcggatcgacgaagatctcggcgatgcggatgatcaccacgaggctggtgatgacgccgatcagcttggccgcaagcgccttgtcaacgcccgagaacaggcagctggtgacatacacgatgaagtacgtgctcatcgcgttgtagaaggcggcctgaccgaggtttccgaacgcgtaggcgatgcgctggcctaacccactcttcctgcggacgtcaccgtccgcggcattttcgttgctcattaatcttctccttaagaacccagagcatggaatcactcattgattttgtaaagtaagcatacaagttttatcaccaaaagtaaaaagcattagtaaacaaggagataaacagcgtgtcgcaaggatgggataacatgggctgaaccgagacattgcatggacgcggcgtagcgtcgacggcaagcagtgccagtgatttggaagcggtaaacaggatttgcgttttatataaaaactgtttattcttttcggtaaaggaggccccgacctcctccataatatcattcacaacgaggtaatgacagaaagcaggagagcatgacagacgtcacacatgtcgatcgcgcatcgcaggcttggctgaccgacccgacggtgttcgaggtgaaccggactccggcccattccagccacaagtggtacgcccgcgacccccagagcggacaatggtccgatctcaagcagagccttgacggcgagtggcgggtcgaggtcgttcaggccgccgacatcaacctcgaagaggaacccgcgacggccgagtcgttcgacgactcctcgttcgagcgtatccaggttccgggccacctgcagacggccggtctgatgaaccacaagtacgtgaacgtccagtatccgtgggacggccacgagaacccgttggaaccgaacatcccggagaacaatcacgtcgcgctctaccgcaggaagttcaccgtctccgcccccgtagcaaacgccaagcaggccggcggatcggtgtcgatcgtgttccacggcatggccacggcgatctacgtgtgggtcaacggcgcgttcgtcggctatggcgaggacggcttcacgcccaatgagttcgacatcaccgaactgctgcacgacggggagaacgtcgtggccgtcgcctgctacgaatactccagcgcctcctggcttgaggatcaggacttctggcgtctgcacggcctgttccgctccgtcgaactcgccgcccgcccgcacgtgcacatcgagaacacgcaaatcgaagccgattgggatcccgaggccggcaccgcttccctcgacgccgcgctgaccgtgctcaacgcggccgacgcggccacggtccgcgcgaccctgaaggacgccgacggcaacacggtgtggcagacgacgggcgacgcggaggcgcagaccgcgatctccagcgagccgctgcagggcatcgaaccctggagcgccgaaagcccgacgctgtacgaacttgacgtcgacgtcatcgaccaagcgggagacgtcatcgaatgcacgtcccagaaggtcggtttccgccgcttccgcatcgaggacggcatcctgaccatcaacggcaagcgcatcgtgttcaagggcgccgaccgccacgagttcgacgccgaacgcggccgcgccatcaccgagcaggacatgatcgatgacgtggtcttctgcaagcgccacaacatcaactccatccgcacctcgcactacccgaaccaggaacgctggtacgaactgtgcgacgagtacggcatctacctgatcgacgaagccaacctcgaagcccacggcagctggtccctgcccggagacgtcctcaccgaggacaccatcgtgccgggcagcaagcgcgaatgggaaggcgcctgcgtcgaccgcgtcaacagcatgatgcgtcgcgactacaaccacccgagcgtgctgatctggtcactgggcaacgaatcctacgtgggtgacgtgttccgcgccatgtacaagcacgtgcacgacatcgacccgaaccgtccggtgcactacgagggcgtgacccacaaccgtgactacgatgacgtcaccgacatcgagacccgtatgtactcgcatgccgacgagatcgagaagtacctgaaggacgacccgaagaagccgtacctctcctgcgaatacatgcacgccatgggcaactccgtgggcaacatggacgaatacacggcgctcgaacgctacccgaagtatcagggcggcttcatctgggacttcatcgaccaggccatctacgccacccagcccgacggcaccaggagcctgcgctacggcggagacttcggcgaccgtccgtccgactacgagttctccggcgacggcctgctgttcgccgaccgcaagccgtcccccaaggcccaggaagtcaagcagctgtactcgaacgtccacatcgacgtgacgaaggactcggtgtccgtcaagaacgacaacctgttcaccgccaccagcgactacgtgttcgtcctgagcgttctcgccgacggcaagccggtctggcagtccacccggcgtttcgacgtgccggccggtgagacccgcacgttcgatgtcgcatggccggtggcggcgtaccgcgccgacgcccgcgaactggtgctgcaggtttcgcagcgtctcgccaaggcgaccgattgggccgagagcggctacgagcttgccttcggacaggcggtggtgcccgcggacgccaccgcgacgcccgacgcgaagccggccgatgggaccatcaccgtgggccgttggaacgccggcgtgcgaggcgccggacgcgaggtcctgctgtcgcgtacccagggcggcatggtctcctacaccttcgccggcaacgagttcgtgctgcgccgtcccgcaatcaccaccttccgtccgctgaccgacaacgatcgcggtgccggtcatggcttcgagcgcgtccagtggctgggcgccggccgctacgcccgctgcgtggacaacgtgctcgagcagatcgacgacagcacgctcaagggcacgtacacgtatgagctcgccaccgcgcagcgcaccaaggtgaccgtctcctacacggcccacaccgatggccgcgtgaacctgcacgtcgaataccccggagagcagggtgacctgcccaccatcccggcgttcggcatcgaatggacgctgcctgtgcagtacacgaacctgaggttcttcggcaccggcccggaggagacgtacctggaccgcaagcacgccaagctcggcgtgtggagcaccaacgccttcgccgatcatgcgccgtacctcatgccgcaggagacgggcaaccatgaggatgtgcgttgggccgagattaccgacgatcacggccacggcatgcgcgtcagccgcgccgatggtgccgcgccgttcgcggtaagcctgttgccgtactccagcttcatgcttgaggaggctcagcaccaggacgagctgccgaagccgaagcacatgttcctgcgcgtccttgccgcacagatgggcgttggcggcgatgattcctggatgtcgccggtgcacccccagtaccatatcccggcggacaagccgatcagcctcgatgtcgacctcgagctgatctgatcagaattgatccgatagtccaccgtgcaaacgatgtggcccccgacttcctcgcaggaagtcgggggccacatcgtttgcacggtccttgttagtccagcggatgcgccggatatcgatgcagatccaaacctagtcgttgtagagcatcaatgaataaagatgtcactcataagctatcaagagaatccagaacctttttgaattcacatgctcgacacgcaatgtatccagcgtcgtttacaatgattcattgtgccttaatggcgcatcgggctatagcgcagtttggtagcgcgcctgctttgggagcaggatgtcgccggttcaaatccggctagcccgaccagaaaccccggaatctcaacgattccggggtttttccttttatccggttcaaaccgatttatccgattttatccgatgaccgcagaacctacgccgcctcgtccagttcctccgccctggcacggcccacagcatcggccacctcatccagcttctccggccacaaccgcgcatacgtgtcaagcgtgaccatagcgctcgaatgccccaactgggactgcaacgtcttcacgtcgcagccgttggcaatcgcgatgctcgcatacgtgtggcgcaggtcgtggatgcgcacgccggaatcctccatacccgcacgcctgacggccggactccaaatgcgcgacctccacgtgttgacccacagattgccgccacgggccgcacggaacacataatcatcaggatcacgcccatcgcactgacgttccaaaccagccacaagaaattcagggaacgccacccaacgcgccttcccgtttttcggggaaccgagaatcatcttcccgtccttatcctccgcccaggtgcggcggatgcgcgctcgccgacggggaaagtccatgtccttgacctgcagagcgaaggtctcgccgatgcgcggcccgacgtaggcctgccatcgaacgatgagcgtgtcctgcgggtcgttctttactctgccggcctcgatggccagatcctccacctcggaaatcgagagaaataccatgtcgtcgtcatcgtcgacgacgcgcggagtggcgacggactgcatgggattcgcggtgatatatccctgtttcagagcatggccgagcacaccgcccatgaccacgcgcacgatgttgcggatcgaccgtggcttcaacgcgcgagtgttttccgttccgcgttttctgtcggccggatagccgccctccgacagttggttcacccatttctgtatcgcttccgtcttgatgtcccctatgggggtgtcgccccattgggggttgatgtagattctaagttctcgcttgtagcggcgcagggtgccgggtttgatgtcggctttcgttgccgtccactcctcggcgacccgacggaatggcttctgcgcgagcttggggtcgtggtagcggccgcgcctgatgtcgtcctccatggcggctttgaactcctccgcgtccgacaggagccggaacgttttggacttctcggtcttcacgccctgtacctcggcgtaccagcggcatcgccagcggtcgtactttccgtaggtgctgctgcggtgttcggcgggcaccttggccttcatggggtctttggcgttggcgagactgcgcttcatcgcagcagtcggcggattgccgttctcgtcgtttttgagccaacggtcaacgatgaacactcgtgccataggtatgctccatcttcatctcacgtgctcatagagcagcgccctgtagtcttcgatgatttggacggttatggtgagtacaatggtttgtgtggattgggagtacccggtcggcgaaggtttcggaagtgattccggagcctttcgttttactccggccattccggccagaatccgaccggccctgttgacgttggcgcgttagcagggcttttctttactgcttggcggttttgacggtgatggtggtgccgagcgcggtggtctcccagctcacgccgtcggcttcgctgtaggtgaagtccttggtggcgtcctgcgaggcgagcagggattgagccatggtttcggtgtcgccctggctggtccacttccagtcgccggccttggtcggggcctgataggtgcccttccaatagaggctcttggtgtcggtgccgatccagttgacctcgatggtgtcgccgctgatggtggcctccatgtacgagttcgggtcgttggagttggtttgcttccacgtgccggtcaggtcgtccagctggggtttgggctcttccttattggtctcggtctttgacgtgccatcggatttggccggcgcatcggaagcggcgttgctccctccgcaggcggtcagtccggcgagtaatagtgtggccgcgatcaatgcgactgacttcttcatggttctcttcttctttctcttagagggccacactgtcgtgcagccagtttttgtatgcctggattatccaaggcattacgttgagctcacgcgctatcgcgcattcatcgttgccgtataggatttcggcggtgatgtagtcggcttggcttatgagcattcgagcagcctccgcgtctgcgcgctgctccgtgtaggcgtcggccttgcatccaacgtcgtggtgcttggcgtggctgatctcgtgcgccagcacgcaccgacgctggatggacgagagcctgtcgctgagaatgatctcgttgcgttccacgtcgtatacgccctcaagcccatccggaagcggtcggtcacgtattcgactcgcccactgcagggcgatgtactccaaagcgtcctcgctcatggtatcctccagtatccatatgaacagcccagccgacactcgccgaatgtcgttggtactcaggattgggagcgcccggtcgacaaaggcttgggaacgatcctgagcccttttgtttcattctgtgcgtttctaatttgacttccttgacagtgcatggcagagtaaaaagtactcatccgcctaggtgcgtgaacgagtttcctgggtcgctacggcggcccttgtttattattttattggattatttttcccgcccttttcgcgcggtcgtatctgcgaagctgtccgttatagctgctctcgtaattgagatagtatgccgtgaccagcatgcagtatggcctttccttctccggatgcggctccagtataacgaggtatcgttcggggcgaacgagtatgtgtactcgcgttctgttgcgccaatcctcctcccatatcaacggtttctcgcattgcgtgtaggagcatgaaggacattcctcgcaatagtcgatgctgggacgggggtatctgatgcgctcgcaacggtccatatccgtcatgcgctgtcctgtttcatggtcttcctcggtagtgatatgcacgaaaccggcccatttgccatccgactcttcctcccgtcgtctcacatgcacgggcaattcacggtagtgagggtgggaaactatgaaatcgttctcgaacactgcgtacagtctgttctcgtaatgggagaaggtctcattgacgatttgagacatgagcggcggaacccagtgcggtgtcatgcgtggcctccagtccaggcaaagagattgaatttacgcgcgccaggagtcgtggattgggtgagcttcaacttggatcgattctgtatgcgccagatgatttccctttttgccccagccggtggcttgatgtctgtccgattcgccctgcacacggcaccattgatgacatccacgatttgcatcatctgcacttcatccgatcgtatcggctgtatctttttaatgcacttatgatcgaaatcataatggctgttcgcgcatatctcgttgagcttggcagccctttgcgcggaatgagtgtctttgacatccagatacacgttgtatgtgttcgatgaatcaaacaacctgttgagcatggtgaaatacatcttgtaataccaatcattatgcgattggttataatcttcatgccgcagatgggtcttgtcggcgacaagtaccctgaaccgcatatcgtcatcatcgaagaagtaatccacgagatcggtgtataggccgatttttggttcgctcgcttttgtccatttcacctcgacatgggcggagacgccatgcttcgctttgatgtctacgatcctgtccttgacctcttcttttttgtcctcgggcaggatgagcgcgcccaataccatcacattgctgttgtcccgctccaggtggcagctctcgtcgcaatacaggttgtattcggtcatggtcactcctttgcgattcgctcaatctgtatggaaattccggataactcgctcatggcatctcctcgtaggcttcctgttccgcctcgatgtcgccatgcttcgcggccatcgcatagtaatcacgagcgttcgcgtcatccgaatcggacgacaaattatattcgcccatctcagcaatgagcctccgatatgcggcatctataatgtcccgaggatcaacaccgattaactcgcacgtgttcagcaacgcttccataggcattgatggtttagcgttgagccatcgagagtaaccggacttcgaatgcccaagttttacggccacttcagcctgagaggtttcatgtctcgcaaaacttgctttaagctccagtccgacaagttgcgaaaacctgtggctgcgttcgtcctgaatattactcatgtgagtactttacatctcaaattaagcaattgcaattcacaaaacgcaataacgttgctcaaatgagacacgccgacgttgaccgtggttgtatcgagatatagcattgctcacatgagcaacgttaatgcatgggtcggccatcaagtcgaaacgaaaatacagcaaaaaggactgacgaaaaagttcgtatcagaaaaatctggtatgccatacagcagtcttaacagcaaaatcaagggctatcgaggatttgaccttgatgacatcgtggcaa

SEQ ID NO: 1671 - DNA, 12309 bp, Unknown
  R221_24m  MAG No. k141_141108
acgatcttgccgaacatgtcgccggcgatcattctggcgaacgcctcgggggcggcgtccaacccgctgaccacggaatcgatcaccggatgcaggtcggcgtgctccacgaagcgcagcaatcgtgcgaaatcctcgcgcgaacccatcgtgcagccctgcacgcggatgtcctggaagaacaaccgggtcagttcggcaccgggctggtcgccggtggtggcgccgcagatggcgatggtgccgccggggcgcacggatttcattgaatgaccccatgtggccgcccccacggactcgatcaccgcatcgaccttgcgcggcaaccgcgcaccggtctccagcgcggcgttcgcgccaagtttcagcgctttggcgcgcttgtccgcgtcacgcgagttgacgaacacttccagaccggcggcatgggcgagttggatggccgcagtggacacgccgccgcccgcgccctggatgagcacggagtcgcccggcttgatgccggcggcctcgaacaacagcgagtaggcggtcagccagctggtgccgagtgcggccgcctcggccgtggtgaggtttgcgggcttggcgaacacgttggcggacggcacggcagtcttctcggccatcgtgccggggtatttctcggagaggatcgtgcggcgctcgcccggggccacgcccgcgccatcggtgccgacgaacgtgtacagcaccacttcgctgccggccttgagcccatgcttgccggggatgtcctcgtccagaatgcccacggcatcggtgcccaggatcatcggcgtctgttcggcggcgagacccacaccctgtagcgaccagacgtcgtgatggtttacggtcaccgcgcgcaccgaaacggtcgaccagaacgggcgggcctggggttcgggctgctcgcccaccgccaacgcggcaagcggatcgtcatggttgacggtggatgcgtatacggccttcattgcgcgctccttggtatcaaaaggaattaccgcattcattgtcccacatcgcgcagcgaacgaatcacccatttacggagatgttgggggcattgattcgtcatgtggacctcggacaatgccgggcgttagcattcaacttcggaaagactagcgaagggagattcgagggtatgcgcaacgcgtcaggaaacggatttgattcaagcgattccttcgccgtctccggtgctgccgagggggccgcgcgccttcacgacatacccccgagcattaccccttcccatggcgacgactcccatctgctgagccgcattgccagcccggccgatgtcaaggcccttgcccccgacgagctcgccgaactctgccgtgagattcgcgccacgctgctggcatatggccaccaacacggcggtcatatcggctccaatctgggcatggtggaggccacggtggccctgcatcgcgtattcgattcgccgcgtgaccgtatcgtgttcgatgtatcccaccaaagctacgtgcataagatgcttacaggacgggccggcgcgtatatggatccgaaccgtttcggcgaggtgactggcttcaccaatcccgacgaaagcgaacacgaccagttcgtgctcggccacaccggtacctcgatctccttggcctgcggcctggcgaaaacccgcgacatggaggggccgggcagcggcatcggcaatgtggtcgccgtgatcggggacggttcgctcagttcgggcgtggcgttcgaggggctgaacaacgcggccgagcagggcggcaatctcatcatcgtgttcaacgacaacgagatgtcgatcgccggcgatttcggcggcatgtacggcccgctcgcccgtctgcgcgcatccggcggcaccgcccagccgaacctgttcaacgcgtttggcttggattatcggtatgtggaggccggcaacgatgtttccgcgctggtcgcggctttcgaggaagtgcgcgatatcgaccatccggtggtggtccatatccacacgctgaagggcgcgggatatgacagtgaggagactcacgccaatcaacaaaacgcctcgaccttaccggtctcactcgactcccccaccggcgtgcaccccaccgataacgtgaaccacagcgagccgtggcattcggatcactgcaacctgtccgatcacgaaccgcatgaaggccagtgcgaggcctcgcattggcagaatccggatgccgcaatcggcaagccggacgatccgcgcaagcattacggcaaaatggcgatggccacgctcgaaccgcgtttcgccaccgagccaggactcgtggtcatctcccccgccacgccgggctccaacggcatcacccacgaattccgcgaacgcgcgggttcgcattacgtggacacgggcatcaccgaatcgcatgccgtggcgtacgctgccggcatcgcacgggcgggtggcacgccggtggtggccaccacggcgtccttcttccagcgcgcgtacgaccagttcttccaggagatgagcctgaaccgttcgcgagtcacggtacttgattttctgggcggcttgtccggttcggacaatacgcattccggcgcatatgacgtgacgatgttctccaatattccaggggtcacgatgctggtgccgacttcggctcgcgactatctggctgatttggcatgggctaccgcgccggccggttcggcggacgcccctgctggtccggcggtgattcgggtgccgggcgaggcgattctggcggcggaacgggatgcgacgctgctgccggtgacgggtgggcagattgctgaccgcccccagtcagcttcgctgccagcctccgccagctccgccagctccgccagcgggggcatatctgccgcaacagtccgcgggaccgttagcgtaacggctcagcatgccggtgcgcgtcccatgctggattggcgggtcaatcagacgggctcgcaagtcgcgatcatcggactgggcaatgcgtatccgttggcggagcagacggccgccgcattgtctgacgattatggcatcacggcaacggttatcgacccgcgccagtgcacgtcgctggattcagacgtactggagtcgttgcgtgatggccaccagcaggtcatcacccttgaagacgggcagcttgaaggcggctggggcgagaaagtgaccgcatactatgcgaatcatcatgtctcggacggcagccgtaatcctcgtgtgctgaacttcggcgcagccaaggaatttaccgaccgcgtgtcgctgggcgaactgaacgaacgttatggactaacggtggagcaggtgacagaggcgatcactcgttgtttttgatggcgtctagggccgggattttaacggctttattggccgggccgaagccgaatagcaagccgatcagcgtggaaaacagcacggcgaacaggaacagccaccacggaatcaccgaataacgggtcacattctcgccaccaactatcgcctgccagagtatggtccagatagatgttccgccaccggtaccgtcgccggagcccccgccggcaccgctgaccataccgccagacatgccgccgctcatgccgcccgcatacaacgcgccgacaacgttgatgcccagcgatatcagtccgctcagcacacagccgatcaatccgccgaagaatccgatcgcgccggcctccgcaagaaacatgacgcgaatgtcacgaacgtagcagccaagcgccttcataatgccgatctcgcgcgtgcgctcggttacggacataaccattgtgttggcgatgccgatggccgcaaccaacagcgaaaccgcaccgataccgcccagaatcagctgaatcgcgcgcgactgttcttccaacgacttacgcatgtcttcataggaggaggtctcgtagcccaacgctttgatctgtgattcgacttcgggcacggacttgaggtcggcggccttgaccagcacttgatcataggcggtggcttttttggcggcggctggatcgactttggcggccagttccttcaacgcctgcaaatccatgaccagaccgtcggaggtggcatagcccttgttgtagtcgcccgccacaatgccggaagcccgcacatcgagggtgacgttttccgactgacccgcggcgctgccgcttgcgccgcccgcgccgccaccgccgcccgcgccgcctgtgccgccgccaccgccgccgtacatgttcatgctgtactggtcgccctgataattggtgccggtggtcagactgatttgcgtggcgagcgggtcgaagaacggatcttcgtcctgatcttcctcgcactggccggtggcctggttaaacgtgcatgaggaatactgaccgccacgtgtgctggtgcgttgttcgccgttcttcagggtgtccatgaaaccataggcgaaccattcgccggcaagcacctggtcttttttgaccggtttctcgccaccgacgagcttgtagcccatctggtcgagctgggtcatgtcgatgcccatgatctgcacgtaatcatagatgtaacggccgcccgcgccggctctggccgtcacgttataagggaagttcatcatcggcgtcacgccggatacgccgctcatcgcgcggaaggattccacggccttgtcgtcgagcttggtatcgcccatcttggacgagccgccatcgtccatcggaccggcataaccgttggtgtacacggtgacgatggacagatcgcccatcgatttgagcatcttctcgttctgctcgttaatgccttggcccaaagagaccatgagcacaatcgagcagcagccgacgataacgcccagcacggtcagaatcgtacgggatttacgccgccataggttttgtctgcagagccgcagtatgtcgccgaatcgcatggtcgggcctttcaggccttgtgggatgagccggctggtgcgactgatgaggctggggtgactggtgtgataggagcggtgtctgccgcagcaccatccgtcacgccggtatcggtcttatcatccttgccttcggaccaatcatcccagtcctcatcaatatcgttcttcttggccttctgcttgcgcctgcgacgcacgagcagcacaatcaccacgataatgaccacggcgatcacgacgatgaccacatacaccagcaccggcaatccctgattggcgttctggtccatgttcggatcggccatgccggaatcatccatcggctgcatatcggttacgggtatggtgagcgggaattccttggtcttggtctgtccgtcggaatcctcgtacgtgactttgagcgtggtcttcagctcgcctgacgcgtgcggtgtgaaggcgtaaccaatcgtgccggtggcgccggaagccacattgcccacgtactgggttttcatcgtggcatcgaaaccttcgccctccatcgtggcctcgacgttggcgatatcgcctttgcccttgttcacatattccatcgtgaccgtgttttcctggccggcgatcacctggtcgggcactacgggatcactgatttcgaaccggtcaggctgactgatcggcacggaaatcttgacgtcagactggcttgaggagcgggcgctggcgtccacatactcgtatcggaagttcacggtcacggactgggcaccgcttttcgcggaggcgagcgcctgcatcggcacgctttgcgtcatggcgtaaccggcccacagcgcgtcgacgtagaacgtgttcgtgcctcccgcgatggcgaagctctcgccgccgtccacggtgacgaccatgttcgtcaccgccacctgccccttgttctggaaggtgaagtcgagattgaatttggatccggcggccacggaatcacctccatacgcgaagttggtgatgatgatgttgggcaccggtccggcgatcggcgcggaatcgccgtcgcttccctgagacgtactgttcgtgccgcttgtgccgtctgtgccgtcgaccgcgtacgcctgatgcggaagggagatgacggcaagtgccagtgacagcgtggagagcaacgcgacgatgatggcgatggtgtggtgggagaggtgcttcatcggtcagttccttgggttctatgggcggacggcgtggacggtgtagttggggcggacggcgtggacggaacagttgggtgggaaaggtcggtgttgagccgatcgctggtgatgcggccatcgagcaaggtgacaatgcggtcggcgtatgaggccatctgcggatcgtgtgtgaccagcacgatggtctggttgaagtcatgggcgaatgcgcagatcatcgtcatgacctcggttttggttttggagtcaaggttgccggtcggctcatcggcgaacaccacctcgggcttggtcacaaacgcccgggcgatgccgacgcgctgctgttggccgcccgacatctggcgcgggtaatggctgagacgatggccgagcccgactcgtttgagtacgccacgcgccgcgcgctcgcgctgttccttgggcactccgcggaacatcagcggcattgccacgttttcgagcgcggtcagattgggtagcaggttgtacgactggaatacgaagccgagatgcttctggcggaaggccgccagctcacgctcgtcgagtttgctgacgggtacgccgccgatgcgcacgccgccgcgcgtcggtttttccatgccggccaactggttgagcagcgtggatttgccggagccggattcgccgaaaatgcagcagatctggccttgcgggatactgagattgacacggtcaagcgccaccaccgtctcatcctcgacggggtattccttgcgtaggtttcttacctcgatgattgctcgcggcacgggcccttcttccttcgttcgtcgccattggcggacgcgcgatagctggttattatccagcacatctcaagtcagagtatagccgttatgcaggagccgcaccccttaagggtgttcccggatggtgatgatgagcatgtgacttctaatctcaaggtcgacagttcaggctccagacggacccagaccggcataatactcaaaagcccctggcccccacagacgatgagggaccaagggtttattgcatcgtgaccccggacgggctcgaaccgtcgaccttgagattagaagtcacatgctctatccagctgagctacggggccaaactcatgtaagtctagccgtaggggtgtaaaacacctcggcgtaacgtcggcttgcaccggtaccatcggcgatatggggacaacggagagcaacgtagatcacgccgcatcgggccagaccgtcgcaggcgatagtggtgagctcactttcacatacgcacagggtcgttttgccagtgaaggcagggattgggaaagcccggttgtgaccaacatggctgcatccgtctctgccgatgccggcaatgcccccgccggcagcatcaccaacaccggcgccaacaacaccttcaccagcgccaccgaatcgtcgcttgccaccctgctgtccaaccaatgcccgttcgttatcaaggccaccattttcgagggcaatggcaaaaacgccattcgcgaacgtcacacattcaccggctcggtgctgcgccagctcgaccaagccagcgccctgctgaacggtatcaacgaatccggccaatacccggccatagccctgcgcgaagcattggtcaacgcactggaacatcgcgattacacgtactccggccccacactgatcaatatcttcgattcccgcctggaaatcgtctcgctcggcggcctgaccgatggtttggaaatcaacgatctgctcaacggcgtatgccagccacgcaccccgcgtttggctgaattgttcgccgatttgggcctctgcgagaactgcggtaccggtattcaacgcattatggacgcctacgcgcagagcgcggtcagtccgcaactgcgcgtaggccccacttcggtggcgatggtgctgcccatcccggtctcggccgaggccgcatccttgcatcggaccgataccgatgcttccgccgcgcccagcaccactgacgaagcgcagcgcgccaaaatgtattcattccccacgattcagcgcatgacggataacgccgcagatgctttggccggcgcacgcatcatcggctgcgcgccattgcagacgctgattctcggcagcggattcggcgagcgcccggacggtgacgaccaggtcagtacccgcccgctcgatacggcgacgctggaaccgtcgcctcaaacgttggagcagttcacgctcaatttcctcgcgttccgcggcgtgaagctcagccgtaaaaccatgcagaaagcgcttggcctgaacaaggatcagatgacgcagctcttggaccagctggagttgagcggcaagatcgaacgtcatacacacgccaagtccactacgtattcgctggcacatgcctcaggacggtagcgaccagggcgacaacgaccaaatcgtcaacaacccaagcagcaacgaccagagcaatacagcccaaggcgcgataaagcagcagctcagttctcgaatacgcgatcgcgaatcatgcgaccggattcgtcgagcgcggtggagaaccggccgtagtcggacagaatcacgcccatgtacagcatgtccacgagcgcggtatcggccacgcacgaaaaaatcgcattgccataaatcgtatgcgagtcacgacccgtcagcaacgtcacgtcggcccagctggccagcggcgcgccgatggcattggtaatggcgatggttttcgcaccatgcgatttcgccaatcgcaacgctttgaccgtatccgccgaactgcccgaatgagagaaggcgacggccacagcgccgcgggtcaagtgcccggcaccgatctgctgcaggtaagcgtcggtattgagacggcatgtcagtcccaggtagccgagcttggtgaacagatccatcgccggtgtcaacgagttctccacgccgaaaatatcgatgaactccgattcggcgagtagggcgaccgccttgcgataggccttggggtccaacgcactgtgcagctcatcgatcagcgccttcgcgccataggccgctttgccgggaatctcatcttcgccatcccacggattcagatcgaatccagccaacggattgaaggtcactttgtgctcggcggccggatggcgcaacacgtaccgcagttcacggtaaccgccgaaaccgagcttgcgggcgaaacgaatcaccgtcggctggctgacgtgggcgatgtcggccatctggccgacggtcaggtcggccgcctcctcgatatgatcccgaatatactgggccacggcgcgctccgccggacgcagcgacggatacacgtggtcgatgcgctcacgtattcccaccgaggattgcacagccgcgctcctagtcgtccgtattttccattcctgtttcgagggtaccggctgtataccggcgaacagtcgacttggattgaccgcaacatgaacggtgagcgaactcttccgtttacctttccgctccattccctctacaatcaaaaccatggtgcggattagcgtgggaagccccacccatcacacaagcgggcggctgtacggcgtgttcttcgaggacatcaaccatggtgcggatggcgggctgaacgccaacatggtgaacaactacagttttgacggcgtctatctcgaccatcacacgtggcgtatggccggcgccgaacgatggcgtacacaggccgattccctgcgtttctgggatttcatcaactgttccgccgccagcctcggcagtgagatacgcgggattcacggccagcgggtgaccaccgactgccccgccccgccaattcacgcacatagccgatacgctcgcatcacgtccgatgttccttccgaaaccggccctgcatatctggaaaacctcggctataacggaggcggcgacaacgggggcgagcccgcgttctccatcgtcgccgaccacacctattccgtcagtctcgcggtacgtccggttcatgggcgggcgaagctgtccgtcggcgtggtcgataggtacggtctgccgctcaccagcaccactcgattgtcgtatatcgtggacgcagatccgcttgacgatacggaagagaccggtctgaggcaggacgatggtgccaatgcgcaggattccggcgtttcgatcagtccggattcgtcggatggtgccatcgccatcggccgtgacggctggtaccggttcaacgccgacgtaaccggcctgaacaccgattacggcaagctgcgtatcaccattgacgccggcgaacgcaccacgttcgatctggatctggtgcagttcatggatgcggactattggggcgcgggcgacccgaaatggcgttacggcaagctgcgccgcgatctggtggaaaccattcaggcgttgcatccagcgtttctgcgattccccggcggctgcatcgtcgaaggtgtgacgcccggcaatgaatatcgctggaaggataccgtcggctccctggccgcgcgacgccaacagtattcgatgtggtcgttcaagatgccggatggttccagctattcgcagagctatcagatcggcttctacgagtatttctgcctgtgcgaggacctcaaggccaagccgctgcccactctgttcgccggcatcgcatgccagtcgcccggccgcgatccgcgccacatggatatcaattcggccactttccgcaacaatgtgattcaggactacctggacctcatcgaattcgcgaatggcgatccggagtccagctcgtgggccgcggtccggcgcgatatgggccatccagaaccgttcggcctggacatgatcggcgtgggcaacgaaaacttcggggctgactacgtggccaagtttgacatgatcagcgaggccattcacgaacgatacccggatatgctgtgtgtgatgagcgccggactgttccccttccagccgacgatgaaacgcagctgggaccatgcgcgagcgttggccgcaaccgattccggggcacatgattccgccaccggtgacgcgattatcgtcgacgaacattcttaccactcccccgaatggtttgcataccaagcgtcacgattcgacgcttacccgcgttgcggcgccggcgtctatttcggcgaatattcagccaacggctattttgccggccaaccacagactgaacagggcgcgaacacgtggaagtcggcactcggcgaggccgcgttcctgaccggttgcgagcgcaattccgacgtggtgcgcatgacctcctatgcaccgctgctcgcgcatatcccggctaaggggtgggcgcagaatcttatcgaactcaatccggcgcatgtgaaccccacggtgaattatgaggtggagcggctgttttccacgcatctgggcgacacgacatatgccgtgtccatcgagcagaccgcgtcacgccccgccaaacatctgtatgtcagtgccaccgggcatgacggggatgacgcctgccgttacatcaaaatcgtcaatacctccgattccccggtggatgtgacgttggaaatcgcgcgcggactggccgggctgggcgcctcgccatcgcgaccggtgcgtttggaggtgacgacgttaagcgccagtccgacggcgaaaaccactatcggataccgcggcgaggcttcgggggcgattgtgccggaacgtcgggcttacacattgccgtcgccgtcttcattgctggcgatgaagatcaagccgtacagcgtcacgctggtggcttcgcgctgattggcatcggccattaggccgattcctttgccgttagaatcaccctcaaggatgagggggaatcgtgcagattcagggaataataggggctatcccccatagcgaatacaagcacgggagggcaggatggaaaccacggcggccagaagaccgccggccaacgatgaaggagtatgcggtatgtttatcaatctgttccgcaggcagcgccctgcgctcgcccggctggcccgcaactccaacgcctatcgtcagccgatggttgcggccgtatcatcgtccgcagtcggcgtatccagcatcacctctgcatccaccacagccaacacagacggcgtatccggcgtatccacgctggatgccaccatcggccgcattcatgacatcccgcagtcggccatgagccgactgaccggctcccccaccgtatacgcgcggtagacc

SEQ ID NO: 1672 - DNA, 10310 bp, Unknown
  R221_24m  MAG No. k141_146625
gcggccaccgactgcccctgatattgggtgacaacggccacggcggccttatgaccattggcttcgacgatggcgaagtaattccaggtgtcctggatgccttggcctcggtgggcatgcacgatcatgtcggacggaatggttacgccttcggaagcaatgtccgcgttcatcaatgacgcgcctcccttggcgtccactgcggcgagcatgcgggccgcatcgcgggaggaactgtaattctcataaccggcattgctggccgccacatcgccgaaatcgcggttgaacgaggtgcccttatacccatgcgaagatgcccacgaattgacgccgctccagccacctaccgccgcggccgccatattgccggcattgttgtccatggaacccatcatcgcgtttgcctgcgctttggcgttgtcatcgccattgtcctgggccgcaagatagaccggcagatagagaccggcagccacgaattgcttgccggactgcgacgtggtcgcgatggtggcgtcctctgaggaatcggcgtatgttccatcgatgaccatggcggagacggccacatcggaggacgagtatgaatccgcgatgtcagacaactggctggatgtgatcaccggagtggaaggcttcgacttctccgtcgagcttttcttggacgaatcgtcgctgttcttgtctttggcgctatcagacgtgttcttcttggccttggacttggcgtcagaggaatccgtcgtgccatcatcggcggaatccgacgcatcggacccggtcgactgtaccgatgtttgcgcctgcggctgagctccccacaatcccatgctatgggtgacgaacaagccgatgaccaacgccacgacgcaaatcagcgcgatgagcacaatcaccaccgctttggtgtgatcgccgccaggacgcccggcgggaggttcaggagaagcaggtgccgcagggccagcggtcatgggtcccggtgccataggccccggcaccgcggaacccggcgccgttggcggcgcgacggcgggcaacggcgccgccggctgcttcaccagcgtcagcgcgttatcgtcataggcaggggccgccggattggcctcgggctgctccaatgggcttccgcactgcgaacagaaggcatttccttgctcgttggcaaacccacactccgtgcaatacaccatcaccgaaccccttattgctgtgacgttctcatcttcggattccatagtatcgccaccattgggtgatagtgttcgtgtgagtcggtattgacaagcataaaagttacgctaacgtaggttacggcagcgtaagaagcgtatcgtcaactcgtgaaacgggggcatcaccatggcatcaacaaccgacgacgtggaaaagacgatgcatcacgacgctcataacagcgcgacgattgcagaggatgccaccatcgcttccaagcgtcaggcggctatcgaggcgcgcgaacaggcgttgcaggccaaggctgatgccgtacgggccaaggcccagttcaaggccgaggccattcgagccaaagccgaggagaaggcccggcacaagctcgccaaagcggagcaccgtgcgctgaaaatcgagggcattgcccctgcggaagtggaacgcaagattcgtctcgacgtgcacggacgaccaaagccgttgatgcgcggctggattcacgcgattgccgctcccctgtcattggcggcaggcatcgtgcttatatgcctggcacatggcgcgagtctgaagtgggcgtgtgccgtgttcatgacagcgtcgctgattctgttcaccaattcggcctgctaccatctgggcgattggagcccgcgcgtcaccgatgtgctgcggcgtatcgatcatgtcaacatcttcctgctcattgccggcacgtataccccggtctcgtttgcgctggaaccgttctggcgcaatgtgatcatcatatcgatgtgggcgtgcacggccatcgccatcgtgattcatgtgatctggatcaatgcaccacgctggctgtatacggtggtgtacatcatcttcggcatctacggcctggcttatatggtgatgttctggaattcgccgtatgcggggccagccgtggtggtgctgctgtgcgccggcggtgcctgctacatcctcggcgccatcgtctacgccttgcgcaagcccgacccttggcctcgcgtcttcggcttccatgagattttccactgcggaacggtggccggatatgcctgccatatggtggccatctacatggtgatcgtctcgctgtggcaataaacgctacgacatataagtatgcccccgcctacgggggcatactagtcacttataactcaggccagcggcttggcggccttgaccgtcacggacagctcgcggccgttcggcgcggtgtaggaaacgacgtcgcccaccttggcaccttcgatggccttgccaatcggggaatccggggtcatgatgtcgtagtcggtgccggccacgatgtcacggctgccgagcacgtaggtcatctcattgccgttgagctcgatggtcaccacagagccctcgcccacggtgccttccggggcattctcgatgatcttggaatcgcgcagcttgacggtgagctcggtgatgcggccctcgttcttgctctgcgcctcacgggcggcctggtagccgccgttctcggacaagtcgccctcggcacgcgccacggcgatcttgtgcgcgatttcctcacgcagctcgccttcacgatgggcgagctcttccttcatcttgttgtatgcttcctgcgtcagcaggtagaccttgtcctcagccatatcgtcctcctgaaccgttgtcgatgctgaaacaattttcgttatttatgacaaaacgccggctatgaccccggcgttcgtcatgtgctgacctatggtcagcgggtggaaatgatgtcgatgacgaacaccagcgtgtcctcgccgccgatgccggcctgcgggatgccgcgggaaccgtagccgtattccggcggaatggaaaccaccagacgcgagcccacgttatggcccggcacggtctggtcccagcccttgatgacctgtcccacgccgatgccgaagctggcgggctgatgacggtcgaagctggagtcgaatggggtatccttaccccacaccacgccgtggtagttcacggtgacggtgtcgccgcgacgcacgatcgggccgtcgccctcggtcagctccacaaccttgaggcccttcggggcttcgggcgccgggaactcgataacgggcgtggtgccgaattcggcgttcacctgaggcatctgatctgccattagtcctccttcaaagacacaatgcgccctaccttagcaccatcggcgaatcggcggtagtccttcatccctgtgcgatacgacacgctggccgtatacgtcgattccggtcatcatgctggtgaataccagacatgtcaatcagcattcgacgacattgacggcaagcccgcccttggaggtctccttgtatttggccatcatgtcttcaccggtctgcttcatggtttcgatggcctgatcgagggtcacgatgtgtgagccgtcgccgagcatggccatacgcacggcgttgatggcggtgttggcggccatggcgttgcgttcgatgcatggaatctgcaccagtccgcccaccggatcgcaagtcaggcccaagttgtgttcgatgccgatctcagcagcattctccacctgttccggcgtgccgcccatgactgcggcaagtccggccgccgccatcgaacaggccgagccgacttcgccctggcaaccgacttccgcaccggaaattgaggcgttgcgtttgaacaggtatccgatggcaccggcggtcagcagaaacgtgaccacgccctgttcattggcgttgtccacgaaatgccagtaatagtgaagcacggcgggaatgatgccggcggaaccgttggtcggagcggttacgatgcgcccgcctccggcattctcctcagagacggccaaggcgaagagatccacccatgcggcgtcggaagactcgagcacggcgtctttgcgccggctatcgcggcgcagcacatcggaattcgaagcgagacgccgatacatcttcggcgcgcggcggggtacgtcaaggccaccgggcaatgtgggctccgccgaggtgcatccgtggtccacgcaggcgcgcataacacgccagatggcatcaatatcggatcggacctggatgcctgagcgtgaagcggtttcgttggcccatacaagttcggcgatgctgagatgatgttcccggcacaacgacaccagttcggcgcatgatgagaacgggtagggtgcctcgacgccgaaatcagtggatgatgattcgtccgcgtcggcaaaggaggtgccttccggaggacgttcatgaatgccgatcatcgggtcttcgggagcgcctttgcgcacgaatccgccgccgatggaataccagacctgttcgtcgaccaagcttgcggcggcgtcgaaagcctggaatcgcatgccattggggtgcgcggccatgcgcttccattgttcgaacaccacgtcgcggtcgtagtcgaaatggatgcgtttgaggccggcgaggttcagagtatcgtccaacgcgcaggtctcgcggatgcgcatcatgtggtcggtatccacggtggccggcagattgccttcgagcccggccatcgcagcacgatcggtgccgtggccgagaccggtcagcgccagagaaccgtaaagcgtgattttgacacgtgcggtgcgatcgaccaaatggtcggccagcaacgaggaggcaaaggcatgtgccgcgaccatcgggcctacggtgtgcgaggatgaaggtccgacgccgatggtgaacatgtcaagcacactgaacatttggctccttctcccctgctggttcggcatgccggtgtcaccaggcgtcatgccatcacgatatcgtattccagcctagcgcccggaatctttcgctttgcgcgatgatggccgcgcgcgtcgtgccggcgagcgataagtcagtcagtgagatagtgcggagaacatcataaccagtacgatgataccgatgatggccaatacgatctgcaccaccatcagcccgatggtcagtcccttcttggtggcgattttgggcgcgtacgcctgtgccaacaggaaggcgatgaagccgaacaccgcgtagttgacggtcagggccatcacatcgctgttcgacaacaccacgccgttcagcggctggttcagcgtgttcatcatcgtgctcatcacgaacatgccccacacgccgtagccgattaatccgacgacgccgtacagccatggcttgagtttgtcgttggcacgcagggtcagggcttcggcacaccacaacagggcgaagccgacgatgtaggtgaacgccacggcgatcagtatcacgatagtcgcccacggcaggagtgcggtcacattgccgatcatggacagatagaatcccgagcaggcgatggcaccaacggtgagtgcagtgcccgcaatgacggcttgggcaagcatggtgggcagggcgccttgttcgactcgttcgacatcggtccagcgtgaagccatgtggattcctcgtttcatcaggtacatcgtcacaacgccacatagcctaacggccttttgtttcggccttataagctctccacatagtaagctgcgagcccctctgacgaggggagctgtcggcgaagccgactgggggagagaccgcggcacagccgcaaaaaacggcatcggccacaggccgatttcaaggtgcctccggtgggactcgaacccgcaatcattcaacggtcaaaccccaccgattccaacgtcttctgaacattctcgacggtctgcgcccacattttgcccacatcctgagaaaacagcagaccgcccatgcgctcagacaggtcgtccagatcctcgtcgaacaggtcagcatacacgtcgagcgtcatggcggccgacttgtggccgagctgccgctgcacggtcttgacgttcgcgccggactgcaccatgaggctcgcggcggtatgccgcagatcgtgaatggtcatatgcccgcgctcgatgccggccctgcgcaacgcgaccgcgaaccagccatcgctccgagtcggattccaaccgttcgtcatgggctcgtccaaaggcttgcctggagcggtgaaaaggaaatccgacggactgcgcccctcgcattgcccggcaagcgatggtctgagaatctgcggaaacatgacgacgcgaacgcgagactcgaagccgaaacaccggaagactgacgacggcaatgaatatggcggcggtattcactcaggatgccgccgcctaccaatacgaagggaacaatgtcacgaatcaccatcgacgttttggaacagcaggccgagcacatgggtttgaaggttttggaatccgatattccaggcaccacctgcggattgtattgcgaccggctgcggacgatctggcttgccgactggttgaacgaccggcagaggctctgcgccctatgccatgagattgtgcacgcgaagtaccatgatcttggctgcggcacgcggttcggagtgaagtgcgagcgtagggcgcggcgcgagacggctttgatgctgataagcccgtccgagttcgccatggccgaacggatgtgggacggtgacacatggcatatggcagccgaattgaacgtgaccacgcaggtgcttgaggactaccggcgactgttggaggaccggtcgcgcatcgcatgattttccgttccggctctattgtaaaagaatgttatatatgtatatatgtttagtttcgcttatatctacagtgtcagaggcgataaaaataagtagacatatcgcttataagtagaacatttggtatagttaaagaaacaacagaaaaagccctccgaagctctagaccagcttcggagggcaaatggaaaaccacacacgattctccacgcaccagtctaaaccgaggcgtggagggaaagcgatggacttcgtgggataccgcaatacgaagctcgttgagcaactgacaaggcaaggccgcatcaccaagacattcaaaggcaagcgcacattcgactccgaccagttcgcactgctgcacatgatggcgtccgccacctacgactggcctttggatgacaagacgcaaggcttgggcaagatgccgcgcacctacacctacggctggctggagatggcacgcgccctcggcatgaccctccccgacggcatcgaagagatcgaggtcatcgggaacgagccaagagcaccgaaacttgaaaacgctgcctatcagcgcataagcaaggccgcgaagaagcttcaggcgaacggtcttatcaaatgcctgcgcaaaggaagcccacagaaacgcaacaacgcggtctggctgctcaccatcggcacgccggaggagaacgctgatgtcgaagcgtacgtgcgcgaacgtatgcgtctctgacccgtggcgcacgcgcagcggactggatgtgacaggcagattctcaaggatggcttgtttgagaaacgctcatgattcatcagccgtcgattggcgggataatccttgttgagacatattgcaggagagcaaggaggacgatatgagaagaatgagactgacggcaacgctcactgcggcgctattgctgcttgccggctgcggggcgcaacaaggagccaacgaaggcaatcagccgcacaagaagcccgagcaagcccagcaacagcccgaaccagagaccagcgagcgtgggaaccgcgtgaagcacatcggagacaccgcatacatctacgctgacgcctcaagaaagacggagtgggcacgatggacggtgacgaacatcacgctcgacgctccctgcaccgacgagtatgccgagcctccggagaacggtcacatggtcgtcatggacgtgactgcccagaccacgaaggacttgccaaccgaccagccgctgtatctgggcgtgacgggcgattggcagtacgtgctcaaggatggcacgatatcgaacgcacccgtgaatggttctgcggcgttgtgcctaccgcaggccgataggctgccggacgtaatcggacccgccagcaaggcccaaggaaagcttgtgttcgaccttccaaccacggacgggtatctggtctataaggacggcgacgtcaccggctgggaatacccgttgagctgaacgacacgaggcaagaggctcggagggttcggtaatgttaaattatgcaatatcgttgaagtgaaactcaaactcacgcccgaaactcaaactcgggtgcgaaaaatcgcatggaacacaatgcccctctctcagctatggctgggggaggggctctttcttatcggctcatcatcttggtcagcttgtagcgcaccgacctctccgcgtcgagaatggcattgcactcatgtcctacaagactcgctccggtcatcttgaacacgatgacatggtccctcatcggatcaccccagtaacgcatctccagcgggtctatcggcatgctgaaccggttgccgtggtttacggcgtagtcatggatggcctgcaatgcgtgttcggcgccttccctgtagccttccaagtaggcttcgtctggttcatcgttgctcatgcggtcaagtatagtgggtgtttttgtgttcatgcgtggtgcttgaatggcatcgttagctaaaagtgaaaggaatggtccaataccagtctaacgagtagtattcgagtggcgtaggaaataaaacctttaatattacattagttcgttcgattttacattagttggctcgattttacattagttggctttgtttgatgtggttttcagagaaaaagcactgaattcagagaaagatcactgaattcagagaaaaagagaccccggccacccgcataccgcgagcgccggggtgcgaatgtttcttcacgatctggctaatcctgacacattcattccggcgcaccgcgccatgtaaaaaagaatgttaaaacatgtattacttatatatgtgtaattgagattacatcattcttggggattctattactttaaattctctccgttatgtaatttgacttccccgttggaatgtgtttacaattccagcgacaaaagaaaaagcccttgggactctggaacagtcccaaggacaaacggaaaaccagctagattctccatgcaccagcatactgcaaggcgtggagggaaagacgttggaagagatgggataccagaacgcgcaagccgtatacgacatcagccgcaccggaaggctggcgaaaaaacgcggagaaaaccttgccgtgtacgccatggcgcaacttgtgctcgactacatggcgatcaacacctacgactgggacagggcacgcaaccagccgccggagaagctgcgcaaggtcaacgttccgtgccgctactacacgaagggctggcgggcgatagccgacgcatacggcatgattctgctcaccccggaacaagccatgagcgggaatgctgacaaggaaatggagaaacgcgagaacaccatccgaaagaacatcagcaacgcttggctgttcctccaagagcgcggcgtgataaagaagctcgaacccgcttcgctcggcaagaacgccggattcctgctgctaatcggcgacgacgaggagaaccgggcggtggaacggtgggcgcgccaatgcctcggactaccaatgagccggtgagccgtgggcatgtccacaagcgccgtgggtctgatccggtcagcaatccttcgtcttgcttttctcgccatccctatcgcgataagcatcgttaaacgggaaaagactacgggttatcacccaaaggatacctatgacctccacgaaagtcgaagccatccaagcgaccatcacattcgacggcaccgaatgatcgaaccagaaagaaaagaacacgtagccaaacacgacaacattcgtgacgaccagctgccaggtcacaaacttcagagattttgtcgcgaccctttcacgaagcttgttcgactgctcttccctatcggccttcagcttttcgatacgaagccgtatcgcggccgtcgactcagcatcaacctccggaacacgatccccgccgtccgaccggcgctcgtttccaccatccgaatcccgcacctgccgggattcaagctcctcggcctcacgctgggcagc

SEQ ID NO: 1673 - DNA, 29302 bp, Unknown
  R221_24m  MAG No. k141_148269
gccttggtcttgccttgggccgtgagccgccgcctgcgcccggtggccctgtcgggctctatgtctatcgcggcgtgccagattccatcggcgcttctgtatgtcgagccgccgccacccattgccatcgttggtctcccgtcgtgtgaaatgcgtagccaaatgcgtagccacaacgggccacccagaggcatccacagttacctgtgcgaaatgaagaccgttgaaattaagccgtttctaagattcccgaatagttagccgataatgtacgttatgtcagattagttatccttgacgaggattcagtcgcctgtatcaactagtccacgcataccaggccgacagccaaaaggccgacagccaaaggagcaccggagcgaccaccgcaattgcaagaatcgccgtgcctttcagccaatccttgtcatttcgtttccagtggaatgctcgccaaatgaaccatatcagcatgggaatctcatacagcgacagcaatggcaaaccgatgaaaaccaggtcgaagcccgcggcgcaggctccatcgcatcccatcatgaagaagtcctcgccgttgtgtttcagtgcgtttggaaataacggtttacggcttcttcgatctgctcgggcttctcgaggatctcgtacgcaccgtgttcctccatctcaccggccggagcgtagccccagcggcagccgatagcgtccaaattgcaggcgtgggcgccgtcaatgtcggtgtagcggtcgccgatcatcacggccctgtcccccgctgcagcatcaaaaccgattttgtcgaagcagtaccgaatcacctgatctttgtccagacgggaattgtctttggaagcaccatagatgccgtccaacagttcggtcaggtggaaatggtcgcagataggcatgcactggtattcgggcttgcagctggccagtgccaggtagtaaccgtcggcatgcagtttgagcagctgttcacggatgcctgggaatacgacgttcaccagtcgtccgggcaccttgttgccgggctcgttcggatcgtcgaacacggcacggtctccgtagtagctgcggtagatgtccacggcccgatccagatcttccgcaggcacatgattgcggcgcagagattcaataatcgccggtccgatgaagcgtcgcagttcggcggcgtccggaaccggtcgaccgatctcttcgaaggtcttgatgacggagccgataatgccgccgtcggacttggtaagcgtgccgtcgagatccaacaggaccactttcatcggatgctgtgccattgagattccactcccccttgttcatgtcgactgctttgaatggtcgtcaaacaatgcgacttgttccaacaatgattatgcccagtcgggatgactgggcatcaagttcacgtgttgttcagtaggagatcactcgtagtcgggaatccaaccgtcacggtgcatttgcaggcgcttttcgagcagggtggccagttcctcttcgctacggcgttccagcagcatgtcccagtgggtgcgggtgggtttgctgatttcgtcgccctcacggtcggcgtcgccctcacggtgggccacggaaccacaacggcactcccactcgtccgggatttcggcaccctcggcaaacggcaggatggtgcggtggcccttcgggcatacatacgccacatcgtttcgcgcggcgaaatcgacgttgtcgtcggactccagcgatttcgctccgatgctcatgcccctgaggctacgttctgccatatcggcatcctccttgaaagatctttaaccctactaatttacgcaacagttcggacttggccgctattccaagcttccgacgtcggctgacaaactcccgtcaaacagccccgtcagtccacgccggagtaggccaccacgccacgattgacccggtcggccgcttcgtgggcgaggcctgccagccgctctcccccgtcgaacggcagcggctgggcgacagcaatctgctgcagcacgtcagccagtcgtttggcagtgcgcacgaagtcgccgccggtcatgtcggtgccgtacaggcacgatcccagcgaaccgccatccgcccattcatacatgatgtcgagaatgccgaaatccggccgctgcatctcgtccagaccgtgatcctcgcacaggatatcgatgtcttcacaaatgcccttgagcttggacgaagcgatggcgatgggcccggagatgccgcccgggtagtgcctcggttcgccgtctcccccgcgtctggcctcgtataccagtgaagagagcacagcggccagtccgttggcgtcgagcttgtcgaacgtgccggcgagcagcgcctcgcacagttccaggtcatgttcactgtagatgcggcgcagcagcagacctttttcagtcaacgtcatgtcaatgtggccggccgcattgacatgacgttcgaggtaaccaagcccggtgagaacatcgcagatgcaatcgaactggcgtgccacggacccggtgcgggagtcgtagcgatcggtgacgcgctgcagttctcgagtctcgcgggcccagcggtggccccatttgaggtgttgctggaggtccgggcagttgcggcatggatgctcgtgttccgccttgcgcaaatcgcgaatgcgctggtcgaggttctggaaagcgcgtgaacgctcctgatcggtcaggaacacttcgtgcttcagtttgcggcggccttccttttcgatgtcgctcagctccatacgcagggtcatgaactgtttgaagtcgccgtgttcgcatgcgaacgcctgttcgtatccggccagcgcgttcttcagtgtgttaatctgcgattccagctgccaggccgattcgttggcctcccactgggcaaacgactggtccagggtgacgcgcgcggtctcgtagtcgctggagttgagcaggttcacggccatgttgaacgtgggtcggaagctcgagtgcagcgggtagacacgcttggatgacagcgaggcggccgtggcgggcacaaaaccgtgatggtcgaccacgatggcgtggccgatggtgtcgatgccgcgccgaccggcacgaccggtgagctgcgtgaattcgccgggcgtcaggcccacatgaccggtaccgtcgaacttttcgagtttctctaccaccacgcagcgggccggcatattgatgcccaatgccagtgtttccgtggcgaacaccattttgaccagaccttcttcgaacaatcgttcgactatctgacggaacagggcaatcatgccggcatgatgcgaagcgaagccttcttccaatgcaaagcggaacttggagaactgcagggctttcaggtcttcctgagtgagttgcccctccaccatctcatccacgatgcggcgaatcctggtcacttcctcatcggtggtgagctccagtccagcgttgatacactgttccacggcctggtcacagccgttgcgcgagaagatgaagtagatgccgggcaacattcccaggaagttaagctcgtccaccacggcccagcggcgcggggtgtggcgttccgctttcggggcacggtctttggcgcctttgccgccgcggcctctgccgaagcccttgcgcttatcggggcgttcctcgccgcgccggcgtgcggccttgcggtccaactggtcgagccggttgatgagttcggcgttgagtttggtggtctgctcgctgttgccgtcgcggcgatagaggtccagcacctcgggctcggtgtgttcgtccgcctgcacgatgacgtgctgttccaaaggcacggggcggtgttcgctgatcaccagttttgtgtcgcctcgcaccgaggcaatccagttggagaaatcctccacgttggacacggtggcggacaggccgacgatcttgaccgtcttgggcaggtggatgatgacttcctcccacacgggcccgcggaatcggtcggccagatagtgcacttcgtcgagaatcacgtagcgcagtgcgttcagcgtggtggaacgctcgtagagcatgttgcgcagcacttcggtggtcatgaccacgatgtccgcctcggaattgatcgaggtgtcgccggtgagcaggcctaccttgtccgggccgtacacgtcgaccagatcatggtatttctgattgctcaacgccttgatcggtgtggtgtagaaggctttgacgttgcgttcctgggcgaggtaaatggcaaaatccgccactacggttttgccggcaccggttggggccgcgaccagtacgttgctgccggcttcgagcgcgtcattggcttcggtctggaagtcgtccagttcgaaaggcagggattcggcgaatcgcgctgctgcggacgcccgatggcgttggaccttttggaatgatgcgtaccgctgcgaagggctcagcgtctgggaatcggcattgcccttatggtgttggtgacgtgccattgctgctttccgttagttgttgaatcgcttccagcgggcccatgcctgggtgtggcgttcgcgcttggcggccttgctgcgaatcacgttcgcatgggcctcggcataacgattctgtgccacgctgagcggctgagtgaacagaggcggctcgctggtgtcggcagaggtgccgggctcccccatcgcggccacgcgttcaccgagttggccgccgatgtcggacatgtctttcaaggcacggagtccatgaagggctgcatagatgagtccggcaacaatcatggccagcatgaacagggccagaatcagccatatccaccaaggcatgaaaggctccttacttgttctcgctgatgctcagttcgcgttcggcgcgtgccacgatcatggtgcgcaacgtttccggggcgaccgccgtgatatgacgcgcgtgggcgatgcagaaggccacgaaccaggaatcggaggaaacggtcagatgcaccttttcaccggcaccgcattgttcgacggtagcgcccggcaatgtcttgatgaatgccagatcgcgctgatcggtgatgaacaccgcgtcggtaccgttgtcgaaactccacttgcgcagttcgctcaccggcatgttcgggatgttgatctgcttggtgggcttgaccagttccgccttttcgatacgggccaatcgcagtacctgccagatgcgcggtttgccgttggccttgtcgagggtcttgtctttggagacgtaggcctttttgtccttgggtgcggcggaaccaacgtccgtgtagacggcggcataatacacgccttcgtcaatgaagatcttggcgggggccaccagcttgcggcgggtacgacctgtaccgtcggtgtactccatgtccaacagcgaatcggtgttgatcgcacgcttgacgatggagaagcttcggggctccagctcatagccggtcaggctcagccacggggtctgaccgggactgacatgacggcgcaaacgctcatacagggattcggcctgcccacgctgcttgtccggcagcaacggcgaatgcgccaggtagctgaccgaggcggtgagcatgctgaggtattgcggcgaaatgccggcaagacgttcaaggcccagcgaattggtggcggaaacaataccctcggcatccagcagcggccagtcaatatcgaagaactggctgccggccatctcaccatcgtcggaaacggtggtcagggtgttgatgtccttatggatgatgttgacgaatttcttgagttcatcatcgttctttggcttgccgataaagcgttcgcccagctcgctcatcgagaattcctcacccagatgagcggagaggaacagcatcagacgcaggcgacgatcaacctcactgcccgtttggaaagcggagccgttcttcttgttctgagccttgatagactcgggatcacccggctctcgcacatcgcgactaatcgacggggaaaccaccgaagcgctcacaggactggcggattcgtcggccagagtgaaccggctggcggcgtgcaaacggcgatgataagcgtccacagcctcttgcgggctgacaatcgtggcccccggatgctcaagcacaaacatggccaaatcgtcggaatcggtgtatgccacgttcaggtgttcgccatccacgtcaacggtggcggcgaaacgacgcgaatcaataaccttgaccagtgaatccggaatgggctgcgtccccaagccaggcgcaatcgaatccaagccaagcccgggaatcggggtctgcggcacacgcggcgtagtgcgcgacacatgctgggtgagctgggactgatccggctcggaagaaatcgacatcgaacgagccagatagttggcggcggcaagcaccggcatatcttccggctcgaacatcaggcggatgcgcggttcgtcgcccaactgcagacgataggacgcgaagtcctggccttccgacttggacgagtactcaggctgccgtgattcgatggcaatgcccatcgcagcgagcttggcgcgatcacgctggaactgcttggcgaacgcggccttggcggcctgatctgccagctctccatacgagtcggcgtaagccttgacgcgctgcgcaatttggcgggatgtgagccattgcgggaacgcggatgacaacacagccagtacgtccagctcgtgcttgccccatttgtcggaaaaacgccgacgtccgcttgtgccctctgccattagtcctcacgtatagttattgtttcgttataagtgcgtatgagtttccccacactcactctatcttagaggctttttccacagttgagcgccatttcacaaaaataatatcttttttatcgttcgaccgtgttgtaaatcacacccaatcgtccggttcgatgccttgcgggccaacgtattcgccgttcggcacgtagctcggctcacccttatcttcaagtttggcgtcggcgaacatcatgacgtcacgtccgaatgtccagtcgccctgaatggaaaccgagttggctgcggccaaagatggcacggcgtaggggaaccgttcgtcgaaatcgcggatgttcttgtagtatcgcggatcaagttcgacgttcgggaagatgtaattgccgtcttccatctcatacgtgtccgtcaggtggaagcgatcggaacgcataatgaacaaatcattggtggttttcaccggaaggaagcgcatacgatccacttggacgcagatagaaccgttgaacagaccgattgcggcacccatggcggtttccagctgaatcacctgttcggagttcgggtccgtgggattcacggtctttttgttacgaatcaccggcaacggcaacacaccatcgcattcggcgagcttgtctttcaaagcgtcgatgcgaatccagatcgagttggtgttgaagtaaggatgcttggcgatgtcttgggccgcttccttatcatccggatggacctggctcatttcacgcagtatcaggcgaccagtggccttgtctcgcacgatatggcctcccttgcgatcggccttggtgcggatagccacttcggccatgaacggggcacctgtgttttcgaagtgctgggccaacgtacgcgaggggcgtgcaccgagattgtcggaattggagatgaacaggtacttgaagccgcgctcctccaatacgtcaagcaggccggactcccagatggtggagaacaggtcgccgtggccgggcgggcaccattccagctccgggttcatggggtagctcaccggttcgccggtggcggccacgagtttgggttcctgatgctggatgatttccatcggcacgtcatgctggctgaacttgcgatgatgcttgagcgccttcatcgtgtccgccgaagtgcggaaagaattcatgaacgtcagcggcagttcgacgtccaggcgggtgcgagcggtaagcacctgaccgatgatgatgtcgatgaagcgcatctgcttggccttgtgcctacgcaccggcaacagcgacttggccttgtccaatcccatggaggtgcccagaccgccattgagcttgaggaatgcggtcttggcgaaggcgtccacggccttgtcgtggttgatggtctcatagacgtcgtggaagctgggcacgtggccaagcggctcgatgtcgtcctcacgaatccagctggaggcttcttcatggcgccatacgtcatacaaatggcggaactggttgatggcggtttcgctcatgccgtgctcgcgcatcttggcggccgaaagctcgaaagtctcatccacttcgggggtgtttacggtttcttcggggatatccgaggtgacggcgtcggtgtcgtcagcggcggcgatatccagttgggccttatcgtttatttcggtcaattcgggtccctttcatcaaatcaataggaaccagtctagcccctgtttggggcaaacacatacgacggggggcggaggcggtgaattgtcggtgataattccaataacacgccaagatgaagtccgtgtttaatccattacgaatggcttacaaaggtaagtccgtcgtcatgttgtctcatgttgtctgaaaacggaaaagccccggaagtcaaccactcagaagtggcggaattccggggctaatcggtcgggccggcgggatttgaacccgcgaccccttgacccccagtcaagtgcgctaccaaactgcgctacggcccgatggtgcaaaagcaccgagtagataatctaccagatatatgaaatctggcaaattacgcgcgtgtcacttccgcttcttcttctcgcggatgttcacggagatctgaatcggcgtgccttcgaagccgaattcctcgcgcagggagcgttcgatgtagcggcggtagccgtgctcgaggaagccggtggcgaagatcacgaaacgcggcgggcgcgtggacgcctgcgtggcgaagaggattcgcggctgcttgccaccacgcaacgggtgcgggtgggcggcctggatcttgccgaggaaggcgttgagcttgcctgtaggaatacgctgatcccaggattccaaggccttatccatggctcgcgtcagacggttggtgtgccagccggtcttggcggacaggttcacacgctcggcccacatcacacggtcgaattcggtgttccacaggcgttcgagacgctgcttgtcgaactcgtccatcgcatcccacttgttgaatacgagcacgattgcacggcccgcatccacggcggtggacatgaccttcaaatcctgatcggataccggctgcgaggcatcaaacagaatcagcgccaattcacagcgctcgatggcggcctgcgtgcgcagagaggaataatattccgcgcctgtgagcttgtgctggcgtcgcttgatgccggcggtgtcgatgaacagccagtcctcgccatcgatgttgacgatttcgtcgacggggtcgcgcgtggtgccggccaaatcgttgacgacggcacgttcttcgcgcgccagctgattgagcagagacgacttgcccacgttcgggcggcccaccagagccacgcggcgcaggccggaaggcgtgaggtagccggaagtcttctcggcctgcttgagcttgtcgagcgcgacgtccagcaggtcgcccactcccctgccgtgcatggcggaaatcgagtatggttcgccgaggccgagtttccagaattcggcggcaaggtattcgctggcctggtcgtcgatcttgttgacggccagcacgacaggcttgccggcggcacgcagcatcttgacgatgcgctcatcggtggtggtcatgcccacttgcccatcgaccacgaataccacggcatcggccaaggtcacggcaatctgtgcctgtgaggcgatggcggattcaatgccttccacgtcggcttcccagcctcctgtgtccaccagcttgaagtcggtgccggcccattccgcgtcatagctcacacggtctcgtgtaacgcccggcgtgtcttccacaacggcggcacggcggccgaggatacggttgaccagggatgatttgcccacgttcggacggcctacaacagccagcacgcccaccggcttgggaccggccttgcgcgcgccttccgtgaaaccacggccggaaatcagatcctcatcgccttcgtccagctcatagccttcgagattggcggcatactgctcgtattcttggttctcgatggcgtcctcgaccacaccgatgagcagatcgagcgtgtgggcgaagtccagatcggaattgtcgatggtggtaacgccatcggcggcggtcaggaagctggtgaccttggaatcggccttgtcgcgcgcggccacatcctcagcgcccacgcccttgacagcctggccggtgcgacgggcctgacggacctcctcacgggcggtcagcagcacgcgcacctcggcgtccggggacaccacggtggtgatatcgcggccctcggccacgatgcccagccccccggagaaggagtcggccgacgcctcgcgggcgatgtaggcgcgctgggcggcgatgagcacgttgcgcaccgggatgacgttcgacaccttggagacatggctggagacttcggaggaacgaatggcctcggagatgtcctcgtcgtcggcgaatacgcaggggttgtccgggtccacggagatatcgaaatggtcgccggtgaagaactcgcccaccgcttcggtgatgacacgctcatccacggtttcggcgtccagatcgatgccctgcttcaggcaccaccaagcgcaggcacgatacatcgcgcccgtgtcaaggtaggcgtatccgaaatacttggccagcgccttggacgtggacgacttgcccacgccggcggggccgtcgatggcaacgcgaatcacaggccaacctccttggacagcgaacggacttccgtctgggacagcacgcggtaggaaccgggcttcaaatcaccgagtttgatcgggccgatctgggtgcgcaccaagcgcttgaccgggaagccgattgagccgaagatacggcgcacgatgcggttcttgccggagtgcagcacgaccttgaccatcgtgtggtcgcgtgaggagtcgatgatcgcgcagtggtcgagcttgatccagccgtcgtcgagctgtacgccggtggtcacgagtcgacggcatacggtgccggagatcttgccttccagtgtggcgacgtaggtcttttcgacctcgtacttggggtgcatgacgtgctgcgagagttcgccgtcgttcgtcatgaggataagaccctcggaatcgtagtcgagacggcccatgtggaagatgcgctcgtacttgtcgcccacgatgtcgcgcaacgtgtagcggcccttcgggtcgtccatggcggagagcaccttgcggggcttgttcagtgccagagtgacgtggttcggattgacgcgtacgcgcgaaccgtctacgcgcacctgctgcttatgggggtcgacgcgagttccgagctcggtgaccagttcaccgtcgacctcgacacggccttcggtaatcatgtcctcgcacttgcggcgggaaccgaatcccgcttgggcaagcagcttctggagtcgaatggaattggaatcgtcttgcgctttcgcagcgcgggaatatgcgtttggcatcgttctcccaacgtggccggacagactctgtcatcgcagagactgtcgatttgtatacatacttcagagttggcggactggaatcccagccaattccaacctatatatcataccgcaacgtaggactgctgctagactggcaaccgtttgtgcgggttcgcccgtcttccaacagatgaaaaggaatgaacaatcatggaagaaaccaagcaacagccgctggccctgcgcgtgtgcgccgaattggccggcagcttcctgctgtgctttgccatttacgccttctccacatggggttcggccgtgtatggcatcaatatcgtgttcttcgcgttggctaccggcttggcatatgccgcagtcaccgccatcttctcccgcgtgtccggtggccagctgaatccggccatcaccgtagcctccgtgctggtttccaagacgaaaatcctggatggcatcctctatgtgatcgctcaggtcatcggtgccatcgccgccggcttcgccgtggtcaagctgctgcccacatccgagcaggtagctgccaaagtgtggctgactccggccgttaacggtttcgagaacggctccgtgtcttactcgctgctgacccagtatggcattacgttctcgattacgctggcgattgtcgtcgaggtcgttgcctctctgattgtcgttgccaccgccatgtcttctctgggtgatcacggcgagtcctcggaccgtcatgtcattgccatgggtcttgcctatggtctggccgccgccatcagctacccggttaccggtgccggtctcaatcccgcccgttccaccggtatcgcactggccgcgatgaatgagggtcttacgcaaaatccgctgcaacagctgtgggtgttctggattagcccggtcttggccgccgctgtggtggcgttggtcatgatcatcgcgcagatgatgaccactcccaaagtgccggctgccgccgatcttccacagacggatgccgatgcgaacgcggacacgctcgacgatggcgaattcttcgatcaggccgcctcgtctgatggcgattcagcggaaaaagatgttgccgaagagtccaaagaagctgaagtaggtaatcagcaggccgattcccaaggcgatgccgatgaaggagtcgaacgccactgagcgcactttccatgggcttttgtcctgaagaatcaggcgaacaagcccggtgatgatggccgtcacggcaagtatgaccgtggcggccatcgtatatccgaaagcaaccagcagtgtgatgacggcgacgacgccgagtacgcaccattcaaaccatggcttgccctcatgcgcttcggatacatagggatggttgtgcatgttgcgattccttctgtcgaacggttacgtgaccacaatagcaggcgaatagcaaaggtgggattccgcttggacccgttgacgggtcaggcggaatcccacctttgtgcgttttggctgagctgctcccctcagagagtcccgatcagtggaagaagtggcgggtgccggtgaggtacatggtcacgccggccttcttggccgcttcgatgacctcctcatcgcggatggatccgccgggctgcacgatggccttgacgcccgcgtcgataagcacctgggcaccatcggcgaacgggaagaacgcatcggatgccgcgaccgcaccggtggcgcgatcggcaccatcggccagcgtgttggcgcgctcgacggccaaatggcaggagtccacgcggttgacttggcccatgccgatgccgaccgtggcctggtcgtgggccagcaggatggcgttggacttcacgcagcggattgcacgccatgcgaacacgaggtccttcagcgtgtcggcgtcggcggcctcgccggccacgagcttccaggcgtccggatcgtcgccgacggcgttgatcagatcggtgtcctgcacaagcaggccgccatcgatctggcggatggcctcgtggcccttcggtggctcggccaccttgaggatgcgcaggttcttcttcttggtctgcagcagttcgagcgcggccggctcatagtcgggggcgacgatgacttcggtgaaaatcgggcgcacgctttcggccatctcaagagtgaccttggagttgcaggcgatcacaccgccgtaggcgctcatcgggtcgcaggcgtgagccttcttgtgggcctcggccgcggtcgcgccgatggccagaccgcacggattgttgtgcttgactacggccacggcaatggcgggagccatatcccatacggtgcgccaggcggcgtccgcgtccacgtagttgttgtagctcatcggcttgccgccgagctgctcggcgtgggcgaaaccggtctggttgagcgggtcaatgtagagggcggcctgctggtgggagttctcaccgtagcgcagggtgtgcgcacgatcccaggtgcgggtgaactgggccgggaacttggcggaatcgacttcagtgccctgatcgtccttgtccacctcgacggcgtccagagaggccggcttgggccagtgcttggcggtccactcgttgatggtggcgtcataggcggcggtgtgcgcgaaggccttggctgcaagccacttgcgctcgtccagagagaagccggtgccatcggccacgcgggaggcgaccagtgcataatcggccgggtcggtgacgatggccacggtggcgtggttcttggccgcgccgcgcaccatggaggggccgccgatgtcgatcttctcgatggtatcggcctcgttggcgccggagcgcacggtgtcggcgaacgggtacaggttgacgaccaccaagtcgaacggcttgatgccgaactcctcgagctgcttggcatgctcggggttggtcatatcagccagaatgccggcgtgaatgtacggatgcagcgtcttgacgcggccgtcgaggcattcggggaatccggtgacatcggacacctcggttaccttgacgcccagctcggcgagcttcctggcggtcgaaccggtggaaacgacttcggtgccggccttcacgaacgcttccgcgagtacttcgatgccttccttatgaaagaccgagaccagtgcccgacggatcggtcggttcgtgtttgtcatcctgttcctccttggattcttgtggttgtgacgccagggaccgcgcctgacggacgatgacggtcttcggggtcgcggcggtggtgcgggaatcattgatcctcccaaccaaccagcctatcgaaaaaacgagcactgtgccaatcagcgcgagcagccatgccgcggtaaatcccaatgcggtcgaatgaccgacgactctggtggaggccatgacgtcgacgccaatgtgagcgagacgatgatcgccaagcgatccattggacagagcgaacagcaatgtggatgccagtgagatcagcatcgcgctcaggcagaatgacccggcggagtagatcagcgaaaccagtactgggccgcgggtggacgcattccgtatattcaacggtctgcaggcgaatccttgcggcaggaatacagccagcaggcccacgagcgcagcgatggcgagaggcgcgttcaaggcaacggtacgccatagttcgctgctgaccggttcgggcagaataccgaatgccggtattgcaggaagctctttggattggccgagccataacgtgaaactggccaaatcaccgatggcgaatccgccgccgaagagccaggaaacagcccagagcatgacgttgggtagccagatcagcatggcgagggtggtgagaattcgtgaaccggtttccatcccggacaattcgaacaacgatacgacagcggcatggttacgtaccgaccatacgatgacggtaatcaatccaattgccaggtatatgcccagtatcgcgacggccaagacgacgccgattttcaggcagtggcgtatgtccgccggcacctgcttgcgagtccagtccctgaatgctcgcatcttggctgattccggtacggctgcgcataggaaaccgatcgagaatacgatggctgctttcagcaacaccagccactggtcatcgacaagacctaggtgtacggattgccggaatgcctcgttcaacccgagccaaacaatcaatccggcaacatacgcatgcggcccgtatgctttgattcgcatggtgagtgcattgatcagccatatcagcagtatggtcaacatcaatggcgtgatggtgagggtgaacgaatcggttctagagcccgatccctcactcagaagcacaacggcctgtgtcagcgaggttgtgccgacggtgagattgtcgccgccctcttccatggagacaaccaataacatcagcgctgtatagcaacctaatgcaacggcatagatggccatggatgcgagggcgactatggctccccgcacccattggcgaatcacggctttcatcacgattggttggaaccgatcagtcgatgttggccttggcgagtatgtcgcgcatgatttcagcggcctggcccggggtcttgcccacggggatacccgccgcttcgagcgcgttcttcttgtcctgggcggtgcccttgcctccggagacgatggcgccggcgtggcccatctgcttgccttcgggggcggtgaaaccggcgatgtaggcgacaaccggcttggtcatgtgctccttggcccatgcggcggcgtcctgttcggcgaagccgccgatctcgccgatcatcatgacagccttggtgtcggggtcggcttcgaatgcctgcagggcttccagcagcgtcgtgccgacgatcggatcgccgccggcgccgagacatgcggtgaagccgatatcggacagttcgcccatgagctggtaggtgagggtgccggatttggagaccagtccgagcgggccgcggccgacgatgccgtcggggatgatgcccaagttgacgccagggttgccgagcgtgatgaaaccggggcagttcggtccgatgatgcgcacgcccttcttgagcgccagctcgacgaagtatgcggaatcggccaccggaatgccttcagtgatgaccacgatgagttcgatgccggcttcgacggcttcgaccacggcggacttggcgaacttcggcggcacgaacaccacgctggccttggcgccggtggcttcacgtgcttcgccgcaggtggcgaacacggggatgtccacgtcggcaccgttcttggcaccggggaaggtgacggatgtgccggccttgcgcgggttcacgccgccgacgatattggtgccggccttgagcatgcgagctgtgtgggtcatgccctgatggccggtcatgccctggacgataacgggagcgccgtcttcgatgaacagcatcagcgaacctccttggactgggtcgcctcaccggcgagctgcgcggccttggctgccgcgccttccatggtttcggacacatggatattcggattgttggcggaagcgaggatatgcagaccctcggcggcggcgttgccatcgaaacgcacgacgatcggcttggaaccgccgagcttggcgaccgcttcgaggatgccgttggcgacttccacgcaggaggtgatgccgccatagacattgatgaacacggattcgacctgagggtcggacagtacgatctccaggctttcggccatgacggctgcggaggcgccgccgccgatgtccaggaagttggcgggcttgatgttggtgccctgttcctcgccagcgccggagacggcatccagggaactcatgacgagtcctgcgccgttgccgatcacaccgacctcgccgtgcaggtgcacgtagtgcaggccgtgttcgcgggcgcgctgttcgaaggggtcgggaacgatgagatccacgaaacgcgcccagccatcatggcggaaggaggcgttgtcatccaaggagatcttggcgtccaaggcgctcagctgcttggtggattcgtcatccgggtcgccgatcttggcgagcggattgatttccacgagcgtggcatcgttgtctttgaagcagcgccacatcttgagcagaatctgcgcggcctgatcgacgtccgcgtggtagaagccgatgctctgtgccatttcggtggcagcggccaggtcgaagtcgccgagcgcatcgatgtgcaggcgcttgacggcctccggatgttccttggcgatttcctcgacttcggtgccgccgttggcggtggccagcacgtcgaagtcgcgcgaggtgcggtccacggagatagacacgtaatattcgtgcaggatgttcttggcttcggccacaagcacgccggaaaccttgtgcccgtggatggtcatcggcaggatggactcggattcaagaatcgcctcgtcgcggttatgggcgatcttgacgccgccggcctgaccacgatgaccgatcttgacctgcgccttgattacgcagggatagccgattttgtccgccgcttcggcgacttcatgggagttctgggcaaagatggcgtccggggtgggaatgtcctgttcctcgagcagctgacgcgcctggtattcgtaaagatccatcgatccttccctgactatgtaattggtccggcatataactgtacacagtacatgccggaccttgaaaactaactgtacgttgggtgagacggaatctcaggccggcatcgcgatcagcgagctgctgggcttgccgccgagcttatccagaccgtcgagaccatcgagccgcatcacaaaactgaagcccaccacagtgccgcccgccttttcgataaggtcggtgccggctttggcggtgccgcctgtggcgatgagatcatcgacaatgagcactcgctcccccgcctgtacggcgtcggtttcgatttcgacgctggctgtgccgtattcgaggtcataggattcaccgatggtttcgggcggcaatttaccggccttgcgcacggcgatgaaacccttgcccagatgggcggccatggccgggccgaacaggaacccgcgcgattcgagaccggcaatggagtcgaattcgctcggggacaccggcagagccgtttcaagcgccttgagcagaatcttcaagcccttggggtcggcgagcactggcatgaaatcacggaagataatgccttccttgggaaaccccggtatggaacgcaccaaggacaccagatattcggcgtcctgttgcccgaccttgctcaatgcgtcgatggtgatgtccgactgtgccatagtgctcgccccttttatgcctttgcgatgcgatactcggatggtgctaccgaatcgaacagcttacttcgtcttggtttcgttgtcgtcaccggtctcgtcagcggtgtcttcctcggacacgacggacgcctcgatcggaacctgaccagcctcatcgttagccggagcctcggtgtcttcgtcgggcagcgggttgccgttctcgtcgacctcatcatcggacacataggccgggcgggtgtactcacgggcgatggcgttgaagccgaaacgcagcttggagccttcggagtcgatgacgatctcctcatactgctcgtcgacttcgacgaccttgccgatcacctggccgatggtgatgacctcggtgccgggctgcaggttgcgacggaagtcctgcttctcctgctgttgctgcttggccttcttggactgccaccacatcatgccgccgaacacgacgacgatcacgatgagcataatgtactgttgttccacgaaacaactccttcaaacgagcgacattgacgaaacgccgccaagtgtgcaaacaggagaaagtctagaagagcttgctgacatcatctttgggcgtaattcccaaatgctgccatgccttctcggtagccacgcggcctttgggcgtgcgaatcataaaaccttcgcgcacaagatacggctcgcacacggtttccacggtttccgattcctcgcccaccatggccgccagattgttcaggcccacgggtccaccgttgaagttgcgcacgatggcattgagcacggcgatgtccagccggtcgaggccttcggagtcgatctggtacagggccagcgcctccttgacgtcgtccggccgcaccacgatcaggtcgtggacgatggcccagtcgcgtacacggcgtagcaatcggttggcgatacgcggcgtgccgcgcgaacgcaacgcaagctcatgagcggaacccgcatcaaggtttacgcccagtacgttggccgaacgttcgatgagcttttccaactcctcatgcggatagaagtcgagatgtgcggtgaagccaaagcgtgcgcgcaacgggcttggcagcataccttcgcgcgtggtggcaccgatgacggtgaatcgcggcagggtcagcgggatggagcttgcgcccgggcctttgccgaccatcacatcgacgcggaagtcctccatcgcgatatacagcagctcttcggcggcgcgcggcagacgatggatctcgtcgatgaacagcacttcgccgacgtcgagggagctcagaatcgaagcaagatcaccggcatgttgaaccgcagggccggaagtcacgcgaatcggcacttcaagctcattggcaacgatcatggccaacgtggttttgcccaagccaggagggccggcaagcagaatatggtccggtggcacatcgcgtttgcgggccgcgtccaggaacagttgcagctgggccttgagccgtggctgtccgataaagccttcgagaacatgggggcgcagctcctcgtcgctgaccggctcgttgccgatcggctgggaggagaccatgcgcaacgactcttcgttggcaccggtgtttgaggtaccgtaatccgttgtctcgctcatcagcggcccctatccatcagcgccaaagccagacgtagcacacgcggcacatcgtcggtggcaagcggcgtgggaatatcgttttcggcgcaagcctcggcaacggcctgctgggcgtcctgctgacgccagccaagtgaaatcagtccttcgacaacctgttccgtaccggtatccaccggagacttggatattgccgcctgagcggaagcaccctcgatctgactcaaatcaatagagcccttaagctcgaggatgattttctgtgcgcccttcttgcccagccccggagccttggccagcgcggtggcgtcgctgtcggcgatggcgtgggccagctgactcggcgtcagtgtggagagtaacgattgggccactttaggtccaatgccggagaccttgatgagttgcagaaaggttttcttggcgtcccgatccaggaatccatgcagggtaatggcatcctgagagaggttcatataggtgaagacgcgggtgtcttgcccggcgtgcagacggctcaggtcggtggcggacatgcgcacttcgtagcccactcccccaacatcaatcaatgcggtatcggtttcgaccgattcaacccgcccggtcagcatgccgatcatacaggtactccttcagggctccaggattcaagactcgaacaactgttcgaaagtatactacatgcctcggtcgtgattgatgcggcggcgcgtggatttctgtgcggcctcagcccactggcgttgcgcggcggtcagatgttgttcgcgttcgccgccctgcaatgcgcctgccgggcgcagcgcatggcaaatggccaaagccaaggcatcggcggcatcggcgggagtcggcattttggtgaggttcaaaatacgtgtcaccatacgctccacctgaatcttctgcgcctgcccgttaccggtgatagccagcttggcttcggtaggcgtatgcaacgccacgggaatattgcgttgcgcggcggcgagcatggcgaggccggcggcctgtgcggtaccgagtacggtgttgcggttggattgtgcgaacactcgttcgatggatacggcatcgggtgcgaagcgatccattttctcggacaggccgttgtagatggccagtagacgcagatcctgggtgatatccggtgaggaccgcaccacgtccacgtgaataaacgaaagccggcggtgctcgccggcttcgatcacgccgaccccgcaacgtgtgagcccggggtcgacgccaaggataatcacgaggattactcctcgtcgagctgggccatcacctcgtcggaagcggtccagttggagtagatgttctgcacatcgtcgaggtcatcgaggttgtcgatgagcttggacaccttgcgggcatcgtcgaggctcaactccacctcgttcttcggctgcatgacctggtcggcggaatcgtagtcgaagccggcgtcctgcagagccttgcgcacggtgaacaggtcggacggaccggtcacaacggtgaacacctcaccgtcatcggtaacgtcctcggcaccggcttcggcggcggtttcgaacagcttgtcgaagtccacgccctcggacggcaccacgatctggcccttgcgctcgaagttgaaggacacggagccggaggtggccagggagccgttgcccttggtcagggtggaacggacttcggcggccgcacggttgcggttgtcggtaaggcattcgatgatgaggccaacgccggcaggagcgtagccctcgtagacgatgtcttcgtagttggcggcgccgtcttcagcaccggcaccacgcttgacggcacgagcgatgttgtcggccggcatggaggccttcttggccttgtagatggcatcgtacagggacgggttgccgtccgggtcgccaccgccgaggcgggcggcgatttcgatgttcttgatgagcttggcgaagagcttgccgcgcttggcgtcgatggcggccttcttgtgcttggtggtcgcccacttggaatgacctgacataatgctcctagcaattattgaaacggatgatgtcaaacgaaacgattgtaggccgttaatcagacatacccgtgatgtttccgatgattgtcttgttatgcgtaccgataagaccggtcacgcggggtgccgcacctgtgttaggcaagcggcagatgatactgcggagccagctgttcgaatgcctgggcataggcttctcgctggtcggacagcagaataggcatggtgcgtgtctgggcgacgatgggcatgaagttcgcgtcaccattccagcgaggcactacatgctgatggaggtgagcggcgactcctgcgcctgctacttcgccctgattaatgccgatattgtaaccgtgcggacgggagacggtttccatcaccttcatggcgagggtggtggccttctcgaattcgaacagttcggcatcgtcgagttcggtgatgaatccgacgtgacggtacgggcagatcatgagatgcccgacattgtatgggtagaggttcatgatggcgaacacgtgcgtgccacgccaggcgatgaggccgtcttcgtcggatttcttgggtccggcgcagaacgggcattccttcgtcttgggcttggttgggcgatcctcgctgttgcgcagcacataggtcatgcgctgcggagtccacagtcgttcgaccgtgtcctcctgaggcggaaagtccgccggattatcgacacgcacgtcagtcattttcgcaccctttcttggctcccctctctgaggggagctgtccgtgaaacggactgaggggagtgcgagccatgcaggactcccctcagtcgcctacggagccagctcccctcagagaggggagccagtaccattcacatcactcagccacagcggcgttgaagtcgtcggcggagttcacctggacgcgcttcttgatgacggtgaggatctgctcgcgggccttgtccaccggaacgccgttgagctggctgccgtcacggaagcggaagctgaccgcgttgttgttcatgtcttcctcaccgacgatgaggatgaacggcaccttggacttggaggcgttgcgaatcttcttgccgaagcgatcgtcggagtagtcgatctcgcaacggaccatctcgtcctcaagggacttgacgaaaccggccagatgcggggcgaactcgtcggcaaccggcacgccgagcacctgcacgggggccagccacgccgggaaggcgcctgcgtagtgctcgagcagcacggcgaagaagcgttcgatggagccgaacagggcgcggtgaatcatcaccggacgctggtgggtaccgtcctgcgcgatgtactcgagctggaaacgctcgggcaggttgaagtcgagctggatggtcgagacctgccaggtgcggccgatggcgtcgcgggcctgcacggagatcttcgggccgtagaaggcggcgccgcacggatcgtcgacgagctcgaggttggattccttggcgacctcggcgagcgtgttggtggcctcctcccagatctcgtcggagccgacgtacttgttcgggtccttggtggacagctcgaggtagaagtcggtcaggccaaagtccttgagcaggttcagcacgaaggtcagcaggctggtgagctcgtctttcatctgctcgcgggtgcagtagatgtgggagtcgtcctgggtgaggccgcgcacgcgggtcaggccgtggacctcgccggacttctcgtagcggtacacggtgccgaactcgaagaggcgcagcggcagctcgcggtaggagcgctgacgggacttgaagatcaggttgtgcatcgggcagttcatcggcttcaggtagtagtcggcgcccggcttggtgatgttgccgtccgcgtccttttcctcgtcgaggtgcatgggcgggtacatgccgtccttgtaccagtgcaggtggccggaggtctcgtacaggccgcccttggtgatgtgcggggtctgcacgaagctgtagtggtgcttgcggtgcatctcacgggagtagtcctccatcgcgttgatcacggcggcgcccttcgggtggaacacggccaggccggggccaatttcatccgggaaggagaacaggtccatctcggcgccgagcttgcggtgatcgcgcttggcggcctcctcgagacgggtctggtaggccttgaggtcttccttggtggcccacgcggtgccgtagatgcgctgcatggtcgggttcttctcggaaccacgccagtaggcggcggcggaacgctcgatcttgaaggccttgatgtagcgggtgttcggcaggtgcggaccgcggcacaggtccttccaaaccacattgccatcacggtctacgttgtcgtagaagctgagctccttttcggagatctcggtggcggcggccgggtcgaggtgtgcttccttgtcttcgatcagttcgatcttaaagggctggtcggcctcttccttcagagcctcttcctcagtcacggaacggcggcggaaggactgggaggacttgatgatgcgctgcatgcgcttctcgatgtccttgaggtcgtccggggtgaagggctggtcgacctggaagtcgtagtagaagccgtccttgatgacggggccgacgccgagcttggcgttcgggtagacttcctgcacggcctgggccatgacgtgggtggccgagtgacgcatgattgcgaggccgtcttcggagtcgagggcgatggggtcgacggtatcgccatcgttcagcggcgtgtacaggtcacggttctcgccgttgatcttgaccgcgatgatgttcttgtcttccgcgaacagttctacgccggtggtggttgcttccacctccttcgcttcgccgttgacggttatggagatggtagcttgcgccatgatttgtcctttgctatcggggcccacggtactaatgtgcaggcctggactggttaatcaacgtaggacacgataggttggacgtgcgacaaataccaccagcatctgaaccaatacgaaaaaaacctcgccgaggcgaggtttcgttgtggagcggacaacgggactcgaacccgcggtctcaaccttggcaaggttgcgctttaccaactaagctatgtccgcaaaggaatccgccgtgagaagcggaatccagtgggcgatgtaggaatcgaacctacgaccccttcggtgtgaacgaagtgcgctagccgctgcgccaatcgcccgaatactcggttcttcagttatatccagtcgaattgcttcgactttcgtgggcgatacaagattcgaacttgtgaccccttccgtgtcagggaagtgcgctaccactgcgccaaccgcccgggtcatatttcatcccattgaattgcttcgctggtctgagaggtgggtacgagagtcgaactcgtctatacggctttgcaggccgctgcctaaccgcttggctaacccaccgtaaggtctgtcaactcacggacctagagcggacaacgggactcgaacccgcggtctcaaccttggcaaggttgcgctttaccaactaagctatgtccgcgtgtgtttccttggcgaggtctccctgccgaagcacgagtgtttactatactcacatgcgtgtagttcgtccagctgcggcgtgtcgcctgtaattgcatactctcgcttatggctaaagcgtgcgcttcgggcaatgaattccagttactctagaggtatgagtgaagcagcgaaggacaccggcgcagtattgatcgccgcattcgagggatggaatgatgcctgtcaggcggcgacgaacgcggtgcgccatctggtcaagcgatatgagtcccgcgagattcgtcatattagatgtgatgatttctatgactatcaggttgcccgtcctatgctgtgccatgttgcgggacgcaccaatcttatctggccgcagaccacgttctacgacatcacgttggacgcaggcaagcatatctatgcgcagatcgcccccgaaccgaactatcggtggaaggaatactgtagccagagtctggccattgccgatgagctggatgtcaatcggatcattacgttaggttcgatgttctccgattgcccgcatacccgtccgttgcccatcgccgtcagcgacggagactgtcaatgcgaaggagaccggtcgtataacggcccggtaggcattcctaccgttttggatgtggccgccgcgcagcaaggttttgctcattcctcgatgtgggtgtccatcccccaatatttgggcagcgacgaatgttctgccggcactatgcgattgctggatgcgttgggcaagcatatcggcttcaccttcgatacggcagatctgaagcagaaagccgaacagtggaaggcgcaagcctcgatactggttcgttgtaatgaccagcttcacgattacgtggagcatttggagcacgactacgacttgcagcagaaagccgaggcggaggcttccttgggagcgccccaggccgaacaactagtcaaagaagcagaagcgtttctgcgccagatgggcaattagcccatatatggcgtgctcccgctggatgaacagccctgtggacaattcatagcagtgcaccatgtgcacgtcgcacaaaatgtcgggagctggctcgcgtagcgagactgagggtggttctgctggcatattccagtgaccacccccagtcagcttcgctgacggctcccgccagcgggagcaccattatattggagtcgtctatcgacccgtcttatgccgcagccgccacggagggatcgatggccggcagcacgcccacaatcagcagcaaggcgacgaccacagccaaaccgatgcggtagatggcgaaggccttataggagaagttcgatacgaacttcaggaatccgatgatcacgatgtagccgagtacgaagctgatgaccatggctacgagggtcggcccccagccggggaacatcgcatcggttttgtagttcttcacggccttgatggcttcgagcaaacctgagccgaacaccgcggggatggccatcaggaagctcagacgtacagcggcctcacgcgtgtagcccagtgcgcgaccgacggtgatggtgccgccggagcgggacacaccaggaatcagcgccatggactggcccaaaccgaagaggaacgcatcacgatacgtcatatcattcatggttttgttctggcgagccttggcatccaccatccacagcagaatgccgaataccaacagcacggttaccgtaatccacaggttgcgcaacgaggtctcgatgacgttctgcagagtgaagccgaggatgataatcggaatcgagccgacgataatgttccagccgagtgtggcgtaattgtcgccgcggcccatgcgggccttccaatccttgccgttcttgccgaacaggcagctgaaccagtgagtaaggatattgatgatgtcgtgacggaaatacagaatcaccgcaagttcggtgccgatttggatgatggcggtaaacgccgcaccgggatcagagcccagcatcaaatcgccgaaaatacggatatgtgcgctggaggataccgggagatactcggtcagcgcctgaacgatgccgagaatgatcgcttggaaaaaattcataacccctcgtgatttctaagtatttgatgtgttatgacgatgaacaccctacccaagggggtgtagaacaacactaagaatcggtaacatccacggcttctacaatgaaagtggatatagtacgtaagcgacgaagggagcattatggccacgtatcgcaaaagcagggcattcgcaccggaaggattcttcgaatgcgagggtcgaggactcgaatggttgggagcggctcatgcgcagggcggcccgcgcgtggtgcaggtatacggctggggcaaggattatctggatatcgaacgtgtgggcagcgcgtcccccacgcctcaggcggcacgagcttttggtgcggctctggcccatatgcatgatgtgggtgccgaatatttcgggtctgcgcctgacggatataacggcacatgctatttcgggccattgcaggacccagtgaaaatggataccggcgagtggaccgacccgatcagctatttcgctgatggacgtctgcgcccgatggtcaaccttggtgtgaggcgtggcgagctggataagcgcgatgtcgaactgaccgagcgcgtgattgaagcgttgccggatctgatgggccgagccgcgtccgacaagccggcgcgcatccacggtgatctgtggagcggcaatgtgatgtggaccgccgattccgggcagcccgaggctgtgctcatcgacccggcggcacatggcggtcatcgcgaggaggatctggctatgctgcacctgttcggcatgagctatctgagcgaaatcaccgagggctaccagtccgtgcatccgttgaaggccggatggcaggagcgtatcacgctctggcagctctaccccatcgccggccactgtgtcttcttcggcggcggctacgtcaacgaataccgctccatgtgccgctccctgctgaagtaacagacttggctcccctctctgaggggagccaagaacgcatccactctcagctcagcgcgtccttcaacttgctgaagaa

SEQ ID NO: 1674 - DNA, 19710 bp, Unknown
  R221_24m  MAG No. k141_149052
catgccagtcatgaatgatgaagtgcccgacgagggcgattatgatgccggccgtggccgcggcgaattcgacaacatcacgcccgaggacttcatccacgggggcggttccggccacggcaacccgccgggctggctgggaccggccgacatcaaccgggcgcgtcatcagatgcccatcgcatacgtggagatcgtgcccgtgcgcaccgatgagatgggccgcatctcccaggtgggctcgctgctgcgcgtatccgaggacgggtcgatcgaacgcacgctgatcaccggccgtgtgctgtaccacgagacgctgcgcgaggccatcgcccgcaatgtggccaaggacctgggcgacatcgccctgccgctgctgccggtcggactccagccgttcaccgtggccgaattcttccctacgccgggactgagcgaatactacgatccgcgccagcacgccatcgcactgtgctacgtggtacctatcgccggcgactgcaagccacaggacgagacgctggatgtggaatgggtggatcccaagagcgacgtaatgaacacgttcgtggcgcagatggtcaacggccacgggcgcatcgtgcggcaggcgttggcctgggccggaatctgacagttgttttgcttcccgctggtgggacgtgaatgtgaaggagtaattcatggcaatcgaattggccaatcatatctatcgcgatggcgaaggcgtgccggtggtgctgatgaacgcctacccggtggaccaccgcatgtgggacgtgtgcgcgaaggcgctcgccgactccgccgacctgaacgatgtgccggacttcccgatctgggcgccggatatggccggctccggcgcatccccggtgccgagcgatgccgattctggcccccgcatggcgaacggcgcgtacagcgaggcgctggatcgcctggccggagcctacgtggacctgatcaaggccgccggctacgagcaggcgatctgggtcggactgtcgatgggcggctacgtggcgatggacatccagcgcctgtaccccgaaacggtggccggactggccttgtgcgacacgatggccgcgtccgacggcgtgggcggagagaaccgactgaagatggcggacgccgccgaacagacgaactcggtcgaaccggtcatgcacttcgcgcaaccggccgatggcgattccaccgtcaagaagactcctgaattcatcgcgaccatgaccggctggatcaacgaacagaacccggctggtctggcttggcgtcagcgcatgacctatggccggcccgaactgggggaggtgccggaaacgatcagcgcaccgagcctggtggtatccggcgaactggacccctctagcaatccgagtgtgatgcgtccgctcgccgagcgaatcgccggcgccgaattcatcgacattccggactgcggccatttcagcgccgtcgaacacccggacaccgtggcgcgagcactgctctcgctcgtcaggcgcgtgcagaacgcgcagaagaacgcataggagacctcgatgggcactgacattcatttctcacctctggcactgacccatgcgctgccattcctgccgctcgcgcaaggtgacatcgactatcaggtggaccggcgcggtgaacccggtctgatcgacgagctgttggccgagccgaccaccaaagtcgtgcttacgcgcggcggacttgtcgccgtaccgcgcggccaaggtgagctcgtggactatgagaacgtgaaaatgcggctcgccacgttgccgggcgcctatgtgtccgccgaactggcacgctaccccgaagcggtcgccatgttcctcggctcctatgtcggggcgcgcggcgaatccgtggtcgccgtggatatcacgcgcgtgccggaagccggcgttcccggtgttggcgggattgctggtgtttccggtgctgccggcggcgtgctcggcacccaggattccggcaccgtggacggcgcgctgggcaagaacggcatcagcggaggtgctgccgccggaatacggcagccgggaaacgccaagggcaatggcggcgtagccgcagccaaaatctccgggccgctcggtgtaccggattcggccggacaaggtgcggacgatgccttcgatgattcggtcggcgcgcccgtacagcccttggccccgaagcccacgctgttgcaacaggccgtgacccggttcgactgggtggacctgcgcggattcgcccctcacgccaacgcgcgcgaggctgggcaagccaccagtgccatcaccttaagcatctggcacagccgccagcggttctgccccacctgtggcgcggcggtccggccggcgctcgccggatgggcgcagcgatgcaccaacgaggcggacggcaaccgtgtgctgttcccacgcgtggagccggcggtcatcaccgccatcgtggacgggcacgatcgtctgctgctgcaacacaacgcggcatggaaggattcgaggctgtattcggtgtccgccggatttgtggaggcgggggagaaccttgaacacgcctgccgccgcgaggccatggaagagaccggcatcaagctcggcgaggtacggtacctgggctcgcagccgtggccgttcccggcttcgctgatgatggcgttcaaggcacatgcgatcaccaccgacgtgcatgtggacggcgaggagaccatgaccgcgcgatgggtcacacgcgacgaatacacggccgagctcatcgccggccgtatggcggcgccgggccgcgccaccatcgcccgctacatgattgaggaatggctcggtcgcgagctgtgacggaccgcgaagataggttaagcttatgactatgagtgatgacaacgaaaacgaacagccgctgaacctcgacattcccgaccacctcgaatactccgaggagcatgcttgggtggaccgttcggtcgaccccgcaatcatcggcataaccgaatacgccgccgaccagcttggcgaacttgtgttcgtggatttgcctgagcctggcgcccgtgtggaggccggcgacgagatcgtggagcttgaatcctccaaggccgtccagccgttgatcagccccgtggcgggtacggtcaagtatgtgaaccgtgacgtggcggacgacccgtccgtggtcaacggcgatccgtacggcgaaggctggctgctgaaggtcgagcttgacgacgatgagccggagctgctgagcgccgacgaatacgcgaaggtcgtgcggtagttccacccatagctcccctccctgaggggagccagtatgtggcatcaaacctatatgcatcgtgcctcttatggaggggagccaagaaaatgaggcgtatggcctatattggtgtctatgagaagcccacgcgaggattttgaggcggcaggcaagcgactgccttgggatgctgctgcttgcaatgcagcgctgtccgccaccgcgccagtctctgacgtcaaggcatccgccaatggcgccgacaatgccagcaatgccagcaatgctgaacattccgatgacatgcccaccgtgccgattcccgcacgcaaggctgccacgacgttcgacaccccctccaagcgtgagcgcatcgaggtcaagccgccgatcacccgattcatacgtcgtgccgtcacccgcgtgttcggcgtatggtcacacatctccactcaggtggtgcgccaatggggctggtatccgcgagtggaaccctatgtgggttatggcaccggcgattactcgcgcctgatctgccgtacggtatacgcccccaagcatgcgcaatccggcgaactgatccgcggcatccgcggcatgcttgccgtgcccgcgccgcgcacccacgtgcaggccagcattgatgacacgccgctcaacaccgtgcagatcggcgtctccgaggtctatgacaaggtggaccgcacgcgcgatctcggcagcgaatacgccatctccgattccgccggatacctcgacctcgtggccgagcatcgtctggtgcccggcatccatcgcgtctcctacagcgtggccaaccgcaaacccgtgagcgccaacctgtacaccatccccgccagtgccaaagtcggcatcatctccgatgtggacgacaccatcatgatcacacaggccccggtgccatggaaggccgcgtacaacctgctgttcctcgaccccaagaagaaagcctccgtgccgggcatgagcgtgctgttcacccgcatcgccgacttgttccccggcgcaccgttcttctatctttcgacatcgccctggaatgtggagagttcgattcgcaacttcatcactgaccatggttttcccgaaggcccgctgctgctgcgcgacctcgacccgaggcccaagaccttcgtgcccaccggcccccagcacaaacttgagtttgccgaacaacttatggccgacttcccggacatgaagttcattctggtgggcgatgacgggcagaaggacccgaccacgtacgccaccatcgcccgcagatatcccggacgtgtactggcgatcgtcattcgtgagttgagcccgcgcgaatcaaccggattggcgtcggtgacgggactcacctcgacccagccgactccggtaaccgatgtaccagtattcaccggcaccaccggctcgaacattctgaagaccatgctgccgtatctgaagacggtgttgcgataagcgcggcgtgatgaacgccgaatgcgtcctggtgtggtgcctcgcctataatcgcgtggtatgactgacgagagcacaaacgccgcggccgcgatgccgccttacgccaagcgcgagccgaagcgccgcgaattccacggtgacgttttcgaagacgattacgagtggatgcgagacaaagactccgatgatgtgcgcagctacgtagctgccgaaaaccagtactgcgagcgtcgcatggcgcatctggcggatttccggcatacgttgtttgaagagctgaaatcgcatgtggaagagaccgatatgtctgttcctacgcgcatcaacgattactggtacttcacccgcacgcagcagggcaaacagtatggcgtgcaatgccgcatccccgtgcgcgatgccgatgactgggacccgccggtcgtggatccgcaaggcgcgcccggctccatgcccggtgaacaggtcgtttttgatgcgaacaaggaatccgaggggcatgacttcttccggctcggcggcttggatctgagcaaggacggccgttggatgctgtacggcgtggatgttgcgggagacgaacgatatgatttccgcattcgcgaccttgccgggctggagaccggggagccggtcagcgaactgcccgaacagttcaccggcattggcagcgcatgcttcacgccggacggccaatgggtgttctgggtggaattggacgattcctggcggccgctcgccgtgtggcggcatcgtgttggcacggcggtcgaatcggatgtgtgcgtgtaccgagaaaccgatgaacggttctgggtgggcgtcggcatcagttttgatgagcgcaatatcgtgatcggcaccggttccaaaaccactaccgaagtgctgatgctgccggtggccacgcctgaaggcgaattccaagccttcattccacgtcagaacgatattgaatatgatgtgagctttgcctgttttgaaggcgcgggggagaacggcgcggatgtgccgctcgccgtggtctaccacaacgccgccaatccgaatttcgaaatcgacgtcattgacatgcgtggccatgagccgccgtaccgactcggcgaaggcgtgtgcatcgccgccgggtcgccgtacggctgtgaacatggtgagccggataagccgattaccgaggcatacttcaacgccgccaatccggcgatattgcagggtgcccacggtctgggcatcgaaggcatcgcgttgcatcgcaactttgtgtccctgagctaccgtgccgacggccagccgcacgtggcatacatgaccaagagcgcggccgccgccgacttcctggccggacggccgtggcggtttacggaattgctgccgcctgccctggaggacgactgggacatggtcgccgccgatcgcgaaaacttcaccggcgatcatggcgaaatcttgtggaccgaagatgaggcccccacggatcacacgtcatcttccgatggtgccagcgacgaccacctgcccggtgagacccggcgcttgtacaccatcggcgtcggcggcaacccctcgtatgaggcgccgcgcatgcgctactcgttcgccagctacacccgcccgggcgagctgcacgaaatcgatcccgccaccggcgaagatgcgctgctgaaacgagccaccgtgttgggcgacttcaatccacgcgattacatggaacgccgtgtgtggattaccgcgcgcgacggcgaacgcattcctgtttccctcgtctggcaccgcgattgcccggcgcaggattcgccgatgttcattaccggatatggtgcatacgagatttcctccgatccggggttctcggtctctcgtctgagcatgttggatcgcggtgtgctgtacgccgtgccgcacattcgcggtggcggcgaaatggggcgcgcctggtatgaacaggggcgcagactgaacaagaagcattcctttgaggacttcgtggacgccacgcgcgcgctgcagaaggcgcatttggctgatgcttggcgcaccgtggccaacggcggatccgctggcggcctgctgatgggcgcgattgccaatatggcacccgaatgctacgccggtgttgaggcggatgtgccgttcgtggacgcgttgacctccattcttgacccggacttgccgttgaccgtcaccgaatgggacgaatggggagacccgttgcatgaccctgaggtgtatcagtacatgaagtcgtacacgccatacgagaatgtgccggtggccgtactcgagggcggcgacgacgaggctgccggtgacggcagtgctgatggggctgccgccggcgcggtcgccgccgcgcaattcccgagaatcttcattaccacctcgatgaacgacacccgcgtgctgtacgtcgagccgctcaaatggctggctcgtctgcagtccgccggcgtggacgcggtggctaagatcgaggtcgaggccggtcacggcggtctatccgggcgttacaaacaatgggaagaggtttcctatgagaacgcttggtgcatggatgtgatggggctcgctcattaggtcatttcgtcgttcattaggtcggtgtcctcttctatgtgagactgaaatgccgccatttcagtccctgaaatgaacccacgccgacctaatgaacactaaaatgacctaatgaatgtctcgacacgatacgcatgttggttgtgtccactagctgagcgggttcgggccggcaggtggtcgcgcgagtaggctccttgaactatggcaaagacatataaaatcgccgttattcccggcgacggtattggcaaggaagtcactccgtgggctcagaaggctttggaaaaggccgctgaaggcgtagctgacttcgagtatgagaacttcgacttgggtgccgagcgctatctgcgcgatggtgcgatcctgcccgaggacgaagaggggcgcatcaaggccaacgacgcgattctgctcggcgccgtgggcgatccgcgcatcaaggccggcattctggaacgcggcctgctgctcaagctgcgcttcgacctcgaccagtacgtgaacctgcgtccctccaagctgtacaagggcgtcacctcgccgctcgccaaccccggcgacatcgacttcgtggtggtgcgtgaaggcaccgaaggtctgtactgcggcgccggcggcgcggtgcgccgcaacaccccgcaggaggtggccaccgaggtgtccatcaacaccgcatacggtgtggagcgtgtggtgcgttacgccttcaagctcgctatgaagcgcaagaagcacgtcaccctggtgcacaagaagaacgtgctcgtcaacgccggtgatatgtggcaacgcatcgtcgacaaggtcggcgaggaataccctgaggtcacccacgactaccagcacatcgatgcggccaccatcttcctggtctccgacccgagccgtttcgatgtgattctcacagacaacctcttcggcgacattctgaccgatgaggccggctccgtggtgggcggcgtgggctactccgcctccggctgcatcaacgcctccgacgagttcccgtccatgttcgagccgattcacggttccgctccggacatcgccggtcagaacaaggccaacccgaccgccgccatcctctccgccgccatgctgctcgagcatctcggctttgatgatgcggccaagaagattcacaccgccgtcgaagcggacatcgaggagctcggctccaccgtgcgctccaccgaccaggtcggcaaggacattctggcccgcatgtgatgtcccacttggctcccctccagaggggagccaagtttatactgagttgcatgcaaatgcgacatggggaatgcaaaaccgttggcggcaaactagtcgccgtgaccgtatccgtcgatgatgacggcaccgcacagtcatgccatatcagcggtgatttctttattgaatcagtttcggatgccgaatctcatgctttgttgcgtgacttggaacaggctctaattagtgatgattcattgcggtccgtattggacgctcaccctagttgccaaattatcggcacagatgaagttgccatcaaaaccgcatatagccgagccgtaagcagcaacttgcccccgctggtgggggctcccgcgcagcgggtgggggtggtcagccccgatgcgccgaacaccccggcatccatcaatacacaaaccaagcagcccgacaaaagctctgaataccgggagcgctggaacgccctcagacctcaactcaccgtgatccacgaccatccgcgtactccggacgagcaaatggccattgacgagacctgggcgcgtgaagtcgcagcaggaacacgacagccgaccatacggttctgggagtgggcgggcccggctgtggtcatcggccgtttccaatcggcccaggacgaggtgaatctggacattgccgagcagctcggtttcgacgtggtgcgccgttgcacgggtggtggcgcgatgtttatcgaaccgggcaacaccattacctattctctgtatgcaccgctcgatttcgttcagggcgtaagcatcgaagaatcctaccggctctgtgactggtggctggtcgaagcgctgcacgaacttggcttggatgtgcggttcgcgggcctcaatgatatcgcctcgcagtacggcaagatcgggggagcggcgcaacggcgcttccccgtaggctcaggcggcgcggtgttgcaccatgtgaccatggcgtatgacatcgatgcggccaagatgagccgtgtgctcaacaccagtcgcgagaagatgtcagacaaagcggtgaaatcagcagtcaaacgtgtggacccgatgaaaagccagacgggtctcagccgcgaacacatcgtcgaacaccttattgactggtttgcggcgtgatttcaccgatggccgtatacgattttgccggtggccgtgcgtggttttgtcatgggcgagcgcggtaaccgcgacagtgccgtttttcgcggtaacacattcgtcagcatgtcgtacggctatcggatcgcgccacacatgaagtgacgaatgatggcatgcttctgacgaaacctgtggggcgcgttacaatatgacggatggccgacgacggtcgtaggacaataaggatggtgcgatgagcttggaaacgccaaacgcttttgctgacgaggagaacatcctgctgcatacggcattgttcaagcaggtatcgccagccgaagccgaggagctgctgccgcatttgaagcgtgcgaccttcgataagggcgactatatcttctccgaaggcgataccgatcagcgcatgtatctactggagcaggggcgcgtcaagctgattcgcacttcttccgatgaccgcgtgcagctgctgtccatccacgcgccgggcgaagtgcttggcgagattccggtattcgaccctcatggtggcccgcgcaccgcgtccgcggtgtccatgagccatggcacgcgcgtggtctggctggagcatgatgccctgttcgcatggcttgatgagcatccgcgtgtggccatcgacatgttgcaggtcatggccaaccgccagcgcggcaacaacgaacgcatctccgacttggtattcatggatgtgccggcgcgtctggccaagacattgctcaacttgggctcacgtttcggcgagccggtggaacagggcctcaaagtgccgcatgacctgactcaggaagagctggcccaactggtgggctccagtcgtgagaccgtgaacaaggcgttgatggacttttccaaccgcggatggatcgcacgtgacggtcgatcgatcatcatcttccagccaggcatgctgattcgacgctcgcggcgctgaccgttcggctgacttccagccaatgttacgctagtgcggttcttgtgatgatatgttcacggaagctgaccgcgagcccggttggtagggcaccccatttagaatggggcccatgcccaaaaagaagtccctcactctccaacgtgtgcttgttctcctcttggcctatatcatgcttgccgtctgcggtggcgtggcggccagcgtgttgtttgtaccgggtgtggtcggtgccaataaagccgccaaagcggtgattccgtcgctcaaggtagaaaacgtggacttcgacgtgaccggtctgccccagaagtcgacgatgtacgcgcgagacggttccaccgttatcgcgacgttctacaaccaaaaccgtatcgtcgtgccgctgaagaagatttccaaaaccatgcagcaggcagtggtggcgcgcgaggaccgtcgattctggactcacgccggcgtcgacgtgcaaggcgtgatgcgtgcgttcgtgcagacctacctcgtcaaaggctcccagcagggtggttcgtcgctgacccagcagtacgtcaagaacgtgctgctcatgcaggcgatcgaggacgacgacccgatcgcccagtaccatgccaccgaagacaccgtcgcccgtaagattcgcgagatgctgatctccgtgcagatggagaagaagtattccaaggccgagattctgcagggctatctgaacatcgcccagttcggcaacaacctgtatggcgtggaaaccgcagcccagcgctacttcagcgtgtccgccgccgatttgaacgtggtgcagtccgccaccatcgcggctatcaccaagaacccgagccagtacgatccgctggtcgaggagaaccagaaggaaagcgagaaccagcgcaacatcgtgctcaagctgatgctgcaggaggggtacatcacccagaagcagtacaccgaagccgtgaacacgccgctgaaggacacgctgaaggtgcaggccgtgaacgtcggctgccaggacaccggcgactacgcatacttctgtgatttcgtggtgcatcgcatccagaactccgaagaattcggcaagactcgtgcggagcgtaacaagctgctgcaggagggtggcctgaagatcgtcaccacgttggatgtggaagcgaattccacgatgatggagaccgcgcgtaataccattccaccggacgatcccagcggcatggaaatagccatggccgcagtcaaaccgggaaccggcgaggtgctgagctttggcctgaatcgttactatgacgccactccggcagccgcgaacgatccgaccaagtcgggccagaactatgccgtcgatctggtggacggcggcggctccggttggaccattggttcgtcttggaagccgatcaacctgattgcgtggatggaggcgggtcattcgatcaacgacaacctacagaccaccacgacgtaccccacgaccgacttcgcctgcaacaactacaagggcggtgccgattcgtggaacgtgtcgaacgccatgggcgccggcacggtgaacccggaaagcccgttcctcggtctggtgcgatcgcacaacaccacccaggcctccatgggcgccatcctcaaactgtgcaaggtggcggacaccgcgaccaaactgggataccatgacgccgccacgggtgagaccatcgacaaaacccaggtgtatacaccatccatgatgatcggctcggtgaatgtgtccccgctgaccatggcgagcatcttcgccgtatacgcctcgaatggtgtgcaatgcaacccgattgccatcagcaaggtgaccgataaggacggcaacgatctcaaggttccatccgcgaactgccatcaggcggtggataaggacatcatccaaacactcgcttataccctgaaccaaggtacggtgcggccggatggtgccggttggtcattcagattggctgacgggcgtaagtcgtttggtaagaccggtaccagtgaggatcttgcggtgtccggtggatcgttcattcctaatcagattgcggcgttcgctgtggtcggcgatgcacagaacccgtacaccaaccgtatttccaacattgccatcaacggccggtacaacagctattgggatggttcgacaatcgcagctccggccgttaccaacttcttcaatagctacatttccaagaagaaaataccgattgacaacgattacggccagcccgtctcgaagtacaccacgactggcaagtacctgggcattggcggacgaacgttcagcgtgccgcagaccactacgaatggcaacagccaatcgcagacgaccaccaatggtcaatcccagtcgcagtctcagtcgcagaacactgggcaaaacaacacccaaacccagggcaccaattcagagcggtcgaatgatggccagtgattggtgattggcgtttgacatttggtgattgcaggccggctgagtctacgtaacatagtcgactgcgatgcccaaattacgtagtttgcgggcgttacctgtttcaggtgacgcccgttttacaatacttaatgacaacgccagcgcgttcatcgaatattcgccatgaacgcgcattggaaaggggaacgatgagcgacgacgatctgacgcatgagaattttgattttcgtggattcgacgtgccggatctcaaagcggtgacgctggcttcgtcttcggacggcgaacagtccaagcagccgaagaccaagcacgaggatgcatcgaggaaccgtaggcacggtaagaagaagtcaaaatccgacgcacggtccaagaagcgggccggcgcgggcaagacgagcgaatcgttcgatgattatgaggattatgaggaaagggaagctgtgagcaaggcagataagaaagccagcaaggaccgtccgggactgtttgcgccaatgacgctgcgcgaagtgaccgtgcgtaatcgtatttggttgccgccgatgtgcacgtattcgtcgttcgcctgcgatggtaggcccacgccgttccactaccagcattacgtgtctcgtgcgttcggcggattcggcatggtgatcgtcgaatccaccgccgtggctcctgaagggcgtatcacgccgtgcgatctgggcctgtgggaagacgggcagattgatgcttggcgctggatcgtggacggtattcgcgaggcgggtgcggtgcctgccatccagctcaaccatgcggggcgtaaggcttcgaccggttgcttcgccgttggttacgacggtcagagtgtgccggaggaggcgggcggctggcccaccatggcaccgtctgaaatcgcgttcggcgggctgcgtacgccgcgcgcgctgtctgtggatgagattcatggtctggtcggtgcgttcgccgcggcggcgggccgtgcggtggccgccggcttccaggctattcagattcatgctgcgcatggctatctgatttctcagttccttgacccgctgagcaatgagcgtgatgacgaatatggtggcgatttgaccggtcgctctcgtttcctggtcgaggttgtggatgccgtgcgcggggccgtccccgagggcgtgccggttctggtgcgcatttcggccacggattgggccgctggcggttgggatttggatcagaccattgcactatccaaggtgctgaaggagcatggcgtcgatgtgatggacgtgtccactggcggcatcatgtcgggagtgtcgattccggtcaagccgaactatcaggtgccgttcgccgagcaggtcaagtccaaggccgatattccggtgaccgcggtgggtcttatcaccaagccgaagcaggcggccaagattttggcccgtggcgaagccgatgccgtggaaattggccgcgccgcattgcgcgatccgtactggccgttgcgtgcggccaacaagctgggcataccgtccacagaggtcccctacgccccgcaatacgtggccggtgcgtactgaatcctcatggggcggtgactttcccatggggcggtaaaaccctcatggggcggtaacccacaacggcggtattctgcggaatgtgaaatttggctaaccgccccatgggacaatcaccgccccatgagggttttaccgccccatgggtaatagggcaatatgtgagttcactccacgtccacgccgacggcgtcggagacgtgctcgaatccgtcgcggcgcagcagctgggccagaccgcgcttcaacacggtgatctgctgcgggcctcggtacatcagcgagctgatgaacatgaccaggctggagccggaacgaatcttcgcataggcttgctcgggggtaaagacgccaccgatgccggcgatggcgaaccggtcgccatactccttatacaccttgcgaatcagctcggtgctggcgttggtgcacgggccgccggacaggccgccctcccaatcgcgcggaatctcgaggccggtgcggtccttctgcagattggcgatggacagcccctgcacattgtgctcggccagcacatcgagcagctccttgtactcgccccacggcttgttcaacggcatcttgaccagcgtgggctgcgggcggtcgatcttgtcgagcgccgtaaacagacggtcgagcgcttccggagtcgcggtgaacggttcgccgacgtgcgtgttcgggcaggagacgttgacctccaccatcgcggtgcggccggcggcgcggcgcatcgaaatgcagtaatcctcaatgccttcgtccaaatcgccgcactggtcgtcgttggtgcgggcgatcgacacagacagctgcatctggcgggcctgagtccaagccttctcggcgcgctcgatgaccttgtccgaaccgatgttggcgaggccgacgtgcaccatcatcgaatcgtattcaggcagacggtggaaccacggcttggcgttgcccgggcagggacgcgaggtggtggagcctacggtttcaaaaccgaagccggcatggtccagcaccacgggcatgtcgcagttcttgtcgaggccggcggacaggccgaacgggttggtgaaatcgacgcccatcacattcgtttccagaatggggtcggtgtagtcgagcatcagctgctcggcgagcagcagcggcgggacgttcttgacgacgtggcagaactcgatcatctgatcgtgtgcctcatcggggcggtggttgaacacgaagttcggtttgatgatgtgcttgtagccgaaggtgaacagatcggtggtggctttgttgacggcgtcgtgccagaagctttcagaaacgtaagtcataccgcctattgtctcacgcttgggctggtgcggctaggcgattcctgcctaggcgaattggggaaggggctaccgcgtgtcgaggcgcacgcaggcgtcggctcggcagaagatacatgaatcgggatgcaccaggtatcaggcgtgactcgccgctgagcaacgcgctcgggagagtcgtcggtcgtgagtcatcgcgctagtggtcgctgcgagaatatcggttcgcacaatgtgcgattttgcgcggttttgtggaaatgaacacctgaattgcccggaattttcgagagattgtccccaaaacgctcaagccggtttggtttgtgagcttttgtgtgcgataatgttcacatgatttcgtcacaacgtcagcacctcatcttgagcaggttgcgcacgcgcggggcagtgcgcattacggcgctatcgaaggaactgggtgtgtcagcgatgaccatccgccgcgatatcgccgaacttgccgacaagggactgctgaagcgcgtccatggcggcgcggtgactaccagtaccttgctcagcgaacccctgttctctgtcaagtcccagatggatctcggcctgaaggacgccatcgcccaggaagccatcaaatatgtggctcccggcgatgtgatcgccatcggcggcggcaccacggcctatgtcttcgcccagcatctgctcgaatcgcagcagtccagcggcatcaccatcctcaccaattcgattcccgtggccgaactggtccaggccctcgaatccaaggacgtggaggtgatcgtcaccggcggcgtgatcacccgatcgaactcgcttgtcggtccgatcgcggacaaggtcgtcgcctcgctgcgtgtcaacaccgtattcctcggcacccactcggtgtcgattccccgtggcttcctgatgccgaattcgctggaagccgcaaccgatatggcgatgatggacatcgccgatcgtaccatagttttgaccgatcacaccaagtggagctgcacatcgctgtcgctgtttgcgcgcttcgaccaggtggacacggtcattactgacgacgggctcgatcccgactccgccgccaaaaccaaggatttggtaaaggaactcgtgctggcccaccagagcgagatcattgaggaaagtgagtaaacccatggctgatttcgccaactacacccccggggagtatgcgaaggagcacatccgcatcacgccgacgacgcttgccgacggtcgtgacttcttctacctggacgacgaccccgagttcgtctccggtgccaagacccgcgagctcaaggacccgcgcccgctggactaccgtttcgccccgcacctggacgccgacggcaacgaagtgccgtacgccgccccgcagatgcgccgcgacccgctgaccggcgactggatcccgatggccaccgcccgtatgaaccgcccgatcaccgccggccccggcgctaccgccaagggcaacccgctggccgcccgcaagcccggtgacccgtaccaggacggcgaagtgccggacaccgactacaacgtcgtcgtgttcgagaaccgcttcccctccatggtgcgcgtgcccggcgtctccgaggacgtgacctacgttgacggcaacccgctgtgggagaagaagctcgccgccggccgctgcgaggtcatctgcttcgacccgaacgaggatggcctgccggccgatctgccggtctcccgcctgcgcaccgtggttgaggcttgggccttccgtaccgccgaaatctccaagatggaaggcatcgagcagatcttcccgttcgagaaccacggccaggaaatcggcgtctccctcgctcacccgcacggccaggtctactgctacccgttcatcgccccgaagatggagaaggaactccagcacaccgaggcctaccacgagaagaccggcggcaacctgcttaaggacatcatgaacgccgagctcgaagccggcgaacgcatcgtgatgcgcaaccacagctgggtcgcctacgtgccggccgccgcccgttggcccctcgaggtccacgtggctccggtgcgcgacgtgctcaccctcgaccagctcaacgacgaagagcgttgggacctcgcctccatgtactcgcacctcctgaagcgcggcaacgccttcttcgacaagggcgacggcaagggcatggatctgccgtacatcgccgcctggcaccaggccccgatccacgacgcccgccgcgagaactaccgcctgaacctgcagttcttctccttccgccgcgccgccaacaagatcaagtacctcgccggctccgaatccggcatggccgcctggatctccgacaccacgccggaactcatcgccaagcgcttccacgagctcggctccatcgacatcgccgactgatagaaagaaaacatcaatgactgctgttgaattcattgagccgctgacccatgaggaaggcgtctcgcaagccaccaagctgttcgtcgatacctacggcgctgcgcccgagggcgtgtgggctgctccgggccgtgtgaacctgatcggtgagcacaccgattacaacgccggcctgtgcctgccgatcgctctgccgcaccgcactttcatcgccctgaagccgcgcgaagacaccaaggttcgcgtcgtctccgacgtggctcccgacaaggtcgccgaagctgatctcgatggcctcaaggcccgtggcgtggacggctggtccgcctacccgaccggtgtggcctgggcgctgcgtcaggctggtttcgacaaggtcaagggctttgacgccgccttcgtctcctgcgtgccgctgggctccggcctgagctcctccgccgccatgacctgctccaccgctctggctctggacgacgtgtacggccttggctacggcgattccgacgccggccgtgtgaccctcatcaacgccgccatcaagtccgagaacgagatggccggtgcctccaccggcggtcttgaccagaacgcttccatgcgttgcaccgccggccatgcgctgctgcttgactgccgcccggagttgaccccgctggagaacgtctcccagcaggagttcgacctcgacaagtacaacctcgagctgcttgtggtcgatacccaggctccgcaccagctcaacgatggtcagtacgctcagcgtcgcgccacctgcgaggaagccgccaagattcttggtgtggccaacctgcgtgtgaccgccgacggcatctccaaggccgatgaccagttccaggccctcaaggaaacgcttgacgccctgcctgacgagaccatgaagaagcgcgtgcgccatgtggtcaccgagatcgagcgcgtgcgttccttcgtgcgtgccttcgctcagggcgacatcaaggctgcgggccgtctgttcaacgcttcccacgattcgctggccgccgactacgaggtcactgtccccgagctggacatcgccgtggacgtggcccgcaagaacggcgcctacggtgcgcgtatgaccggcggcggcttcggcggctccatcatcgcgttggtggacaagggccagggccacgagattgcacagaagattgctgaccgcttcgaaaaggaaggtttcaacgcacctcgcgccttgccggcgttcgctgcggcttccgcgagccgcgaggcctgatctcggaagctgatgcaaaaacgcgcgttggcgcacgtccatgcaaaaggacgtgcgcccacgcg

SEQ ID NO: 1675 - DNA, 2867 bp, Unknown
  R221_24m  MAG No. k141_150101
acaccggagatacgcaatgagccaaacacctgacgcataccatcagcctgtggaatcgccgcaaccgaaacctcaccatttcgagccggccgatgcggtgattccgcaactgggcaacctcaccgcgtccgtcatccgctcgttcgacggcgaggtgtcgtcgattcccgacatcctcaagctcacgctcggcgaaccggatttcgcgacccccgacttcatcaaacaggccgcggtcgaaagcctggcccgcaatcgcacgcattacgcgccgaacgcgggcacccccggactgcggcaggcgatctccgactatctggcccgcagacgcgacctgcattacccggccgaggacatcgtcgtgaccgagggcgcgagcgaggcgatcagcagcgcgctgaccgccctgctgcatccgggcgcgaccctgctgtacgccacgcccgggttcggcctgtaccgaagcatggccgccctgaccgacaccgaggcaatcgaaatcgacaccacggacaccgatttcgtactgaccccggacgcactggagcgtgcgctgcgttcggtcgaaggccgggatgcggtgctggtgatcaactcgccgaacaatcccaccggcgtgaccctgaccgccgaccagttgcgcgcgttggccgaagtcgtcgaacgccatgacgtgacggtgctgagcgacgaggtgtatgcggagatcagctacgaggcgcgcccggcgccgtccatcgcgctgttcgcgcccgaacgcaccatcgtggtggacagcacgtcgaagaactacgcgatgaccggctggcgcctcggcttcttcgccgccccgcacgccctgagtgcgcagctgctcaaagtacatcagattcacgtgtccacggccgccatgttcaccatggacgccgcgcaagtggcctacgaacgcggcgacgaatccatcgaccgcatggtggccgaataccagaaccgtcgcgactatctggtggacgcgctcaccgggctcggctacacgatggcccgaccgtccggcgcgttctacgcgtacgtcgaggtgccgcccatcttcgatggcagcagctacgactatgcgcggcttctggcccggcgcgcgaaagtcgccggcattccgggcgaggcgttcgtcagcggaccgtcccggtacgtacggttcagttacgcggcctcactggacgcgctgcacgaggcggtgaaccggatccgacggttccgggaacaataggacttatcgggctccgacgccacgcgcccgcctgtgttctggttcaagcgctcccccgccactgatcttttcgacgtattccaatcccatcaatcttcagaaaggccaccatcatgacctccatcgccttctaccacaccatcgacgaggagcggccgttcgccgaggcgtgggccgccgaacacggcgtccacgtcgaatgcttcccgttcgagctgcatgaggacacactgcacaccgtcaagggtttcggcggcatctcctacaagcagcgcagcgcgccgagcccgaaccccgacttctaccgtcgcctcagcgagtacggcatccggcagatctccctgcgttcggccggctacgacaccatcgacctggccgccgcccatcgcaacaacatccgtatcaccaacgtgccgtcctactcgccgcccgcggtcgccgagctcacgctcagccacatcatgcgcctgatccggcacgtgccgcagttcgacgagcgcgcctcccacaacgatttctccgtgcacgggctcatctcgcgggagatcagcgaactgacgatcggcatcatcggcgtgggccgcatcggctcgaccgtggcacgcatcttccatgcgctcggcgcgcgcgtgctcggcaacgacatcaacgagaaccacgaactcgacccgctgctcacctgggtgagcaaggacgagctgatcgcgcaatccgacgtggtgacgatgcacacgtatctcgacgccaccacccgccatctcatcgacgcacaccgtctctcacagatgaagccgaccgcctatctggtcaacaattcgcgcggcggcgtggtcgatacgcccgcgctcatcgacgccctgaacaaccatgtgatcgccggcgccgcgctcgacgtgcttgaaggcgaggccaagctgttcggcaacgaactgccctccgaccagccaatcgacaaccagtactacaacgcactccacgccttgccgaacgtggtgatcacgccgcatatcgcgttcttcaccgacgtggcggtcaaaaacatggcccagcagtccctggacgacgcgctggccatcatcaccggcggcaccagcccgcacgaaatcaccccgtacgacaatctgtaaagtctgtaaaggaaggacggcataaccccatggccaagccaatcaccgattcccaaatccgcatccgccgcatgctccccgaggattacgaggaggcgtatgccctgtgggagcgcacgcccggcatgcatctgcagtcgctcaacaacacgtacggcggcatcgcgctgctgctgtccaagaacccggacagctgcttcgtggccgtggacggcgcaggcaaggtcgtggccacggcgctcggcgccacggacggccgcaaaggctacctctaccatgtggcggtcgacgagcagtggcgcggcaagggcatcggcaccacgctcatcaaccgcatctacgacgtgttcaaggccatcggcatcgtcaagatcggcatcctcgtggtggcggacaacatcgaaggccaggaattctggaagaagcagggctggaacacgcgccccgacgtcatctacttcgaccacaacctgtgatgtgcggcacggcgttgctta

SEQ ID NO: 1676 - DNA, 22177 bp, Unknown
  R221_24m  MAG No. k141_151532
caacgccgtggtcgagcccgacaaggccatccgcgacaccatctacccgaacttcggtctgggcggcgatggcgatctcggcgacgcgagcttctccgatgccgacctgtccgacctgaacttctcgaatctcgagttcggtgatctgaagctcggcgacgacttcaacccggatgatttctactccgatcagggcggtcagcctgacatcgaggagtaaccctcctcacccccgataagatggcccggaactcgtctggttccgggccatctcgcattttcagacagcagtattgttcttgtcgatttacgggggtagtgtggcaacttaggagtgtgggtaccgctcccagtggtttgtgactcggtacgtgcacggaagtcgtaagagaagagacaagtgttggagggccacctatggtggggttaaacacattggtcggcaagcggtacaagatccttgcccagatcggcaagggtggtatgtccaccgtctatctggcaatggattcctcgctgaacaagcaatgggccatcaaggaaattcgcagtgcctctgatccggtgcagcgcgacttggtcattaagagcctgaccgtcgaagccaatatgattaagcgcttcgatcacccggcgattccacgtatcgtcgacctgatcgaagaaaagggcagcctgttcgtcgttatggattacgtcgaaggccagaccttggcgagcctgctcaagaaggaaggcccgcagtccgaagaagacgtggtcgattggggcatccagctgtgcgatgtgctcgactatctgcaccgccgcaagcatccggtgatcttccgcgatatgaagccctcgaatgtgatgctgacccctgagggcgcaatcaagcttatcgacttcggcattgcactggagaccggcaaggatgcggacagcaagccgctggtcggtgacgaccgccagctcggtacgccgggcttcggcgctcccgaacagttcgccgataacggcaccgtggacgcacgtaccgatatctacgcgctcggtgccaccctgttctacctgctgactggctcacacccgcgcaagaacggcattgtgccgattcgtgagatcaacccggagctttcgcagggcttggaactggtgattgccaaggccaccagcaagaatccggacgatcgcttccagacctgcgccgacttcgcgtatgcgctgaaacactacaagcaggaagacgccgcataccgcaaggcgctgaattccaagtggtggggcttcctcggcacggcgatcgcctccgtggtctgcctggccctcgccggcggcagcctggtgctagccaaccacgcgcagaacaccgattacgactactggatgaaccaggcggcgcagaccaccgacgcatccgccgcagaagccgcctacgtgcgcgcagtggaaatcaagaccaatgccattgaaccgtacgagcagctgatcaagcgttacaccgctgacagtgatttcagcgacgacgaagagcagatctacaacacgctgatcaaccagcacgccgactcgttgcgcaaggactccaccaagtgggccgagctgagcttcgacaccggccgcatgtattggtactactactccggctccaagatggccggccaaagcgcgtccgccgccaacaccgatccacagcgatacgcccgcatccgcgccgcttcgcagtggatgcacaacgcggcacaagagagtagcttcagcaacgtcaagctcgccaagatctacgccgacattgccgacttcaacacggagatcgtgccgctgatcaacgaaggatccgattcaggcaagtacaagccgtacttcagcaagctgaacgaactggtgaagtccgccgctcgggaagataacggtgtgatcagcctcgaatccgcgaacctgaccttggacgcgttgcgcgtgtacccgcgcaagttccgcgcggacggcatcacgcaacagcagatgagcgatttggccgatgccgccgcatcgcttgccgacaagaccgaaaccaccaccgatgagctggatgccagcaagaaagccgcgcaacaggccgaaaagcccaccaaggacgccatcgccaacgctttcgttgatatcaagggggacgccaagtgaacgccgatatctataggactctggcagtcgtattcctggctttggccgtgattcttgcggtcgtggccgtagtgctgttccgcaagttcaacattcccgccgtgcgtgacgccctgaccggcaagcgcgcggaacgtgagatcgccgaactgcgtggagtgcgcgccggttcgtgggccaacgccgagaatctgggcgaaggctcgcgccgcaagcgcaagaagggtgccctttccgataccaccaccggtacgcatgacaccagcgacatcgaattccgcccggtgaccggtaccggttccggctctctgggttccgccagcaccaagggtggcattactcgccccggcgaagacaagccgtccgcagtgcccggtgccaagcaaaaggcttccgccgctccggccgtggtggacgaggaagacgaaagcacccgtctgggtaccaaggccgcactcgaatctgtggttgagattccggtgtccatggcttccgccgccgaattggcggacgagggcgagacctcgctgatgcaattccgcaagacgaatgaagcatcgtccgacgacgatgaatcccgtaccatcctggttcgtggagggaagaacaagtaatgagcttcgtaactaattccagtttctggcgcaagtcgttgatcggtgcggccgtggctgtggcggctcttgccatgggtgctaccgccgtggtagccagcgccgattcgacttccgacctcaagcccgagcagaccaccggctccgtggtgtccgcacgctccttcaaggccgtcaaggcacagccggctgccgccactacgccgaagatggatttggcttggtatgccgccgataaggacggcaaggtggccgataatgcccagccgctgaccgatggccgcaccaatgcctcgaatgttcgtctgggcgtgacgattactgggtttgatggtttccccgcgggccaatttgaccgtaacggacaatacgtaggtgcggataaagacaaggttgcctttaccgtgaccgtgggcaacttgggcgtcaaggaagtcaagtatggcgacttccaccgtacaggcaatgtgcaggacggctacacctacaccgttgagccgaatgatggtccggcgttcgctctgagcggtgaaccggttacgctcgatgtgacggttgccgcgccggctgattctacagcggcagatgccgccattgacctgaatcagttcaaggatggcgacggcacgagcaccatcacggctcctcaattgtcttatgacagcaccaagcccgccgccgtggatacggcggtgttcggcggcgttgctgatactgattggctgaaaggcaaagacacgaccgacggtacctggttcacgaccacgtcgccgtccgtaacctttactccggttgcggctgaggcagccaatgtcgtgtcttatgaggtgacgtatccgaatggcaacggcaccaagaccgatacggtcaaggcagatgaagcatggaccgtgcctaacggcaagaccgacctgaccaagaccacggttacggtcaccaattggttcggcagcgcttccgatgcgaagccgttgagcgatttgctcgacgcgaagaccgttattgttgacccgaatgccggcactggtctgtccctgaatctgaccggtaccaccccggataagggtgctgtcaacaacggcaccacgtattacagcaaggtcggcggcttctcggtgagcagcacgagcgcatacttcgccgatgaactcgccctgctcaaggcgaacggtatcaagttgctgaccgttccggctgccgacggcaccggtgccccaaccccggtgtgcgatgccgctgatcttacgaatggtgccgtggactgcggcgatgccggactggacctgaagcccggtaaccacaccgtaagcctgaactccgcgctgccgggcgcgccgactgtaacgcagtcgttcgccatcgacaccaccgctcctaccgttgcgtggaagggctactccaagaacggcggcattgatattccgttcggaaagacactcttcgcagtcggccgtaaagaacgtgccctgaccttcaccgttacggatgatggtgccggtgtgggcaaggtgattgcaagcggtatcgatcctgagacgggcaagcaggccacggtcacgttgaccaacaacggtgacggcacctacacattcccgctcaccaaggccggaacctatgatttgacggacttcaccatccaagccacggacaatgcaggtacgcagtccaaggctgaaaaggtaaacgcaattgccggcgataagttcacctacacgaagattcgtatcggcaagaatgtccagccgaagaccacggtatcggtaagcggcaccgactacatcaacggcactcccaaggtcacactgaccgtcaagaacaacccgtggctggcggacgaactgaagggtctgcaagaaggtgccggcaccaagggcctgaacctgctcaccagcacattgaccgccggtgacaagaccgtgtacgggggcacattcccggtggccggtgccacggtgaacggcgccggtgacgagatcgtcatcgcagcggatgccgccaagccgttgattgacgccaagaacacaaacggccagtatgccattacggtaaccgataaccccacattgctggcagtgttgggtgacgtgaccaataacgccaagaccttcggcgtggatacgcaggctccgagcttcaccggtgccgcctaccaggcaggcagagatgaactgacctccaccaaggacgattccatcagtgtcgtgtcccgttctgccgccaccatcactttggacgcgcgcgatctgctgcccgattccacggcaacaggtgccggcaaagacgatgcacaaacctctggtctggcaaaggtcgaagccaaggtcgattacaccacgtggaatggtgacaaggtcaccggcaagtggaccgaacttcagcgtgtgaacaacgaccccaacaaggtccaactgacgctcggcgaccaggacggcaagtacacgctggccggcgtatccctcagagccaccgataaggcgaccacgaagcccaatgtcagcgatgccgaaaccacattggccacggtgaaggccgcactggccaagtccactgataccaccgtggccgctgcggccaagcagctgccggatacgctgggcgtgagcaagcagaccgcgaaggcgactctgcagctcaacgatgctgacccgcagaagacctacaaggaagatctcaccaacatctccctcaaggtcgccggtgaccccgcgttcgcctaccgctgggatgtggtcaaggctggttatgccaatacagacttgctgaccggcgcggtgcaatacggcgacgccggttcgaagtccttcacgttcaagatcagtgacgccacctataaggacggcgtcatcacgctgggcaccgcaaacctgcccaagcggaccgaaaccgacaaggatgccaccggcaagcagttcaacggcgactaccagctgacgctccagaagaacttcggcaacaatgtcgagctgttcaacgctcaaagcaccggcactaccaactacctgttggacaccaagcgcccagtgctgaccaagatcagcggtccggccggtgccaagggcgagaccatcgtcgataccaccgtgcaaggcaagagctacacggtcttcgccaaggccggtgcacagacgttcacggtctggatcaaggacttgctgcccaacggccagtcctcgaacgactccgccaagaacgaagcccatacgtccggcatcaaggatgactccgttaagctgaccattcctgacggcactgatctgaagggcaagacgcttgccgagggcaagacggtgaatgtcacactcgacaacgaaggcaagggacagttgacccttgatcaggaaggcttctacgacctgagcaagatcacggtaagtgtcaatgacaacctcggcaacgcgctggacaaggaaagcttcaagaaagctccggttcaggacaatgtcaaggattacgacgccgtcgttgccgatgtgaacggcaacgacaccaaggcatccttcgcggtcaccaagtccgacaactccgtgcccgactccagtgataacaacaacaagtacttccgtggcaaggtcaaggtggcctacaccatcaccgaccactggttcccgatttacgccaagctcaacgccggcaagacgaacctgctcgctggtagtacttcgaacaccacgccgttgaccggtggccagaacgagcagaacatcaagccgttggatgccagcgatgcacagtggactgaaggcgatggctacacgtggacgctctccggccagaagctgttgatcaacggcaagaccaacgaagtggaaggcaattacacgctgcacctcgcctatgccggtctacaggcaaaggccaatgaggcatccacccagtccaaagacgtggtgctcgactggaccgctccgaagctgggcgacctgaccgcttccagtgaagcaccgaagaagtgggattggatcttctccactgatgtcttcacggccacgctgaacggcatcagcgataatgtgtccggtgtgactgcggactccaccgcgttctccaccaagcacttcgacaactggctttccggcaagaacgacccggctcccgtctatgcgggcgacgcggccgccggcagcatcagcttcacgatggatggcgacagccagcgcgtctaccttggtgaaaccagcctcaccattcgcgatgaggccggcaacccggtcgacaccggcaagctgaatgcctacgaaggcgtgaacggcaaccaagccgccaacgcgctgaagggattgaacggcgtggccatcgacaccgtggctcccaccatcgcagtctcctacgacaacaatgatgtgcgcaacggcaagtactacaaggcccaccgtgccggtaccgtgacactgaccgaatcgaacttcgatttctccaagaagtatgagggcgatcgtgtggtcgtcaccacgtcggtcgacggcaagaaggccaccattccggtctcctccttcaagaacgcgagtggtgacctgaagacgtacgtggccaccttcgccgccgacagcgacggcgactggactgtggacgccgcctacaccgatccgggcgatcacccgtcgaatacgattcatgaggagttcacggtcgacaccgtggctccgaagctgaccctcaccttcgacaacaacaacgtgaagaacggcaaatactacgcggccgatcgcaacgctaccattcgcgaagtcgagcgcaacttctccgaggacgaatcggtcatcaccgtcaccgccaaggacgataacggcgcggacaccgcagcccccggcccggcgggctggcagcgcaccggcggcacgcgcgaatccaccgagtggacgaactccgtggcattcacgggcgaggcgcacttcaccatcaaggccaccgccaccgatctggccggcaacaaggccgaagaggtgagcgaacccgagttcgtggttgacaagaccaagccgcagatcaagatcgaccgcgtggaagacaagaccgcgtacgccggtaccgtggcaccgttgatcgacttcaacgatgtcaacatcgacatgaagaacgtgagctacacgctggtcggcgaccatcgcggcgaactcaagggcgacaagatgcccaagaacgtcaccaccgatgcggccaacgaccgcaccgtggacttcacggacttcgaacgcaaggtcgacttcgatgacgtgtacaccatcaaggcgcacggcaccgatctggctggcaacacgttcgagaccaagaagaccttctccgtgaaccgcttcggctccacctacacgttcgatgcggacaccacgaacctgcgcggcacctacctgaagaaggcgcaggacgtgcagataacggagatcaacgtctccggtcttgacctgagcaagcgccagatcgtgatcgccaaggacgacaaggcgaccacgctcaccaacaacgactacaaggtcgcgacctctgacgacaagggctggagccgtacggtgtacaccgtgccggcatcccgctttaactccgacggcttctaccgtgtgcaggtgcagtccatggacgaggcgggcaacctctcgcagaacaccatggacaagaagaacgccgaccgtaagggcactgccgaagtgaacttcgccgtcgactcgaccgcgccgactgcttcgctgctcggcatcaagtccggcaccgtgtactacagccagcagggacagcccgcatcggtggacgccaaagacaacctcggcatcaagtccaccgaagtgtatgtcgacggccagctcaaagacagctggaagggcgatgccacgctcaagtccacgccgagtctgacgttcgacgccgacgccaagagccacgagatcgtgatccacacgatcgacaaggcaggcaacgaggcgacgtccacctacgacaacatctacgtggcctccaactggtggcagtacgccacccacaccccgtggctgcgcaacacgatgatcttcggtgcactggtggtcttggccgccatcgccggagcgattgtcgcggtgaaccagcgcagaaagcagtttgcgtaccgcaagaacccgttcgagcggtgaggtgactgcactcgtttcccgttaacgagggttgtttgcggggcgttgcggtgagtaattgctgatgccatagtggaccagtccaattgattctgggctggcccactaccgttgatgagggattgcgtgatgtggtgttggctgggtatgggttgtctggtcaccggctgtggtgttgaacggcatcgcttgtcgtgcgtagacgttggagcaaaggccatgggtggtccatcggcaacacaattatgaatgcccgaaccgggtataccgattttcggggtatccacgacatgaagaatatcgcggctgtcgacacccgtcggacggtgtgggacaccatgaatattggccagcattttttggcgtatgccaacgcgacgtatgacacgttgaatacggcgaaagtggtgaagccgtttgtgaatccgactgcggatggtggtctgcagtggaagcattcgccacaggattatttcaagacgctcgttccggatccagatcagttatggaatttcaagaccatacatcaggcaccaggcaagttgtccgatggggcggctgaggcatctaatgccattcgagttggtatcagtgatctataaaggatggatgattgacgatgagcaggaaatcggatgctgctgagcgtgggcgggaggcttacgcgcggtggaaggagctttcggaggatgagaagaatgaggatcttcgtcggcgtcttctcgcctccgatcagaataatcccgtggtcagggatatgttgaagactgtcgagaaggatatccggggtcgttcctcggcgaatggtggtccgactctggagtatgagagtcatggcttgttggcgttgacggttcctcatctgcatggtccgcgtccggggcgtcgtgcgttcggaatgcgtggcgtggtgttgaagtctttgtggttcctgtttgtttttgtggtgtccgtggtggtgcaggtagtgttcatggatgcggcgaaggcgaatgggtcgggtgattggtggccgttggcggccgtccccaatgttggggtgttcgtcattgtgtttgcgtcgatagcgttgtctccgttcatcgtttacacgattggcagtttgtggcctcgtctgaccgtgcctttcgtgatgttcgcctccttggcgatgcttgcggttggttcgtttgtgggtcaggaggttggtcgtaggtggttgtgggaccggtatgtggcgactggcttgttgaagccgggggatttcgtggactggtcgtctgatcgtctgcctgcgcctttggcgcaacccgcgtcgggtggttggtgggtgattggcttggtggccggtgtactgctggtgtcgggttccctgttcctgtaccgggaggatcggcatcgtgggtcgaatattcttcctcgctatatatcgtatggtggcggcgtggttggcttggtcgcggccatcggcatcgcgttgacccgtcatgtgagcggtttcgcgttggtggcggccccgctggttgcgttgttcgtcgggttcctgtggttcccgttggatttggcggctgcctgtttttgtgtggataatcgtcgtgagtcgtgtggcgagtggccggccgcgttctggctcaccgccgaggcgttgttcgtcattggcgtgtgtacggcgctgcccatggcgtgacggctggttgtgtgctgggatggtagtgtgaaggagggtgagtggggatgtccattcggttggatgagcgacggtatgtcgaggagttgaagtggctggttgcggatttccggatgtggaagaatccgctggttccgttgccggatggcttcgaggacgatctggcgtggaggtcctatcgtgtgtttgggcagacgagtcccgccgatatcatcgctttggccgtccgcacccgtgatgaggatttggttgcccagggcgagggatttatatctgattcagtttccatgattgatgatgaggatgtgttcggctggctgttccgcatgatttggggcaaggagttgcagcttcgccagcagatagccgatgcggatgtggagaatctggacgccacttttgatttcctgacttcggcatgtcggttggcggcccatattcttcttggctggggcgaaggggatacctccagcgcgtatatcgcgaggttgttcctcattgaacagtacgatgacgcgctcaattgcattcttccgtactccaatgtgtcgttgaacgcgaacgaaaccgaattggtggtgtcggatttgcgcgatcgcgccatagccgcggcgatgcggcgtggcgagaccgccgcgatggagatgaagctgcataaggcggaagacggtcctcattattcgtcaggcgaggattctaccgcgtctgacgacggggaggggcttgacgtcgcggatgatggccgtccgttcccgcaatccgatgtactgtacctgttcgatgcggaccacgtcatcgaggcgtatcgctatttcctcgaccatgccgatggcgatgcggatggtgatggcgagcttgataatggcaatccctggcgcaggccggatttcgtgcaggacaagctgctgaccttggcgggagcgggaatcgtggagcctttggtttccaccgcgttggagcagggtgatggagaccggctcgaggctgcgttgaatctgcttaccatataccggggaatcgtttgtgatgacggcatactggcgttgcccatcatcgccgcgcgcacgttgcaggattcggacgggctgcggcccgatgcggatctcgaccaacgtatgcggtacctggagtcctcgcgtgacctgtgctcgagcatggcggccatgctgctcgcgcgcattcccgacccctcatggagccgcagactggccatggatctcctgaacgccgatatggagtcgtatgtgcggcacgttcgcgagctagccgagtcgtgagcattcgcttcggaaggtcttgccgtatcgggttggatgccaatagaatcggtttgattggtgttgccgagaaaactgtatgaaggattgcacgaacaacaaggaggttgctgggtggccgaaaacctgacgattgtggaagaatcagtaagcacgctgatgcaggggtttcaacagtattcgtgatcggctaaatctggatgagcagattaccgagccgagttctgacaatgtcggctgttccgagctggtcgatgcggttttcgcattcaaccatcaggtcagcgatacgaagaacaagtacaagaagaagacggagaatcttcgtgacttcttggaaaacgtgaaaaccgggtccgatgaggccgatgaggcgattgccaaggccatttccgatgccgtgcaccaatcttgactgcctgctatgagcattatcgaccggcgatggggagaatccgttgactgaattcttacatatttcattgatacctccacagggatggagagaaatcctgttggatcctgctgaccgggaacggcagattcggcaggctcttgaaccgatgaaacacgtcatcgccgactggcgagaagtttatccggcattacgcaaatatctggcgaactcttacgagcaatcatggaaagctggtgtacgatacgccataaccacggaacttgatgatgccagccccatattggtaatggctacattcatggtctcagtgcttccatccgctgtgccgtatggtacagcggatgaggaattggatgccatcgtggagtcgctgctcacggagcgggaaggcctgcccgaaggtgatgaactgcacatgagcaaaacgtcattcaataaactcggtcctgcggtacaggcatcttctgtagaaaccgttcatggccaacaaggtaagcccgtaggtaggttggcgatgttgcgtacgttcatcccctgtgcgggaaaggtaattcttgctaccggcattacgcctcaggtggaattgtctgacacgttgttcgagctgtttaccagaattacggcgacattgcgagtctcggtggaaaccgaatcggacgaatcggatcaataggggagttggggaattatgaagaatctcgattatttggactgggccgtagtgggccagccggacaatccggtgtcgggtgataccgagggaatcgcgcgtatggcatggaagtacaagtgtttgtcgcgggatttctccgaaatggcgtccgcattgaagaatctggacacaaaggccggcatgcagggcgagtgggttgtcaagttcgaggagaagctgcaggatcttcctagggatttcggccgatttgctgacagctttggtgaggtgtcctgtcagctgcgtggctggatgcagtctttggacgggttccagtcggatgccaaaacccagttggaacgtgccatcgccgcacgcgacgagaaggagcggtatgagcggctgtcttgtggggcgcgctcggcattggcgcaggcgggggcggtgtttgacgagttgcccgatgccgccacggatgtgcagcgcaggaatgcgcgtgaggcgaaggaagccgcacagcagatgctggacgggtacagcgaccatgtcgagaccgcgggcgatgagtgggcagatgcgaaacgtcgtgtacgtgatatccgcttggcctatgagagtggtacgggcggcagacatcgggtccatgggatgtggcgaaaatgttcattccggggcttgcccagttgaatgatgcggcggatgcggtgaacaatgccggtgaaggatttgtttatgcgggttccgcgattcgttcctttatggtggagaggtgattgatatggtgagaagtggtggtcggccaccgtgggagcgtggagccgctggtgtgggcggtgatgccgaggctggcggttctgatgtcggcggtgagaatcgtgttctggcgaatggcgcgttgggcgagttcatcgacatgtgcattcctgtgggtggcaggcgtgtgttcactcgtttgggggttgccttgtggactatcatgtggtttgtgctgttccttgcgcaggtaggtttgcaagcccggtatgcgttcttcgaacgtgattccgctagaggtggtgtgtggttcctgcagatggccggtatctcgttgtcgagcgattggtggcctgtggcggtctttttcgacgtgggtgttgttccgggactattgctgtggctggctgctcatgttatgcgcaagccgtggattgctgttgccggggacgttctgattgttcagtgtgtcgccggtgccgtgggcgcggagattggaaagaccgttatgtatgcgatgtatggtccccatgtcgaaagtttgattgactccacgactggacgtccggacagactgtattacgacagttctcctgctgtggtggtgcctggtttggttgtggctggggttgccgtggtggttgccgtggtgcttgtggtgttgcgtggggtgggtgtttccccgcgtgtgcgtgtgggtggcaatgtggttgccggtttgggattaatgggcatgttgtgggtcggcccggccgatgcgaatcagttgttctgggtgaattccgtgatggcggtcggcatggtgttgttctggattcccggtgagcttcgtgcgatccggcgttgtgtcttggaggggcgtgatgcctcgtggcagcctgtggctgctggtttcctggtgcttgatttcgtcatgttgatgctgcttgcctacgcggccgccacgggtgtgtgatgtgggtgcggcgtgtttgctgttcggatgttggtatggagggtgttgctgtggttgttgacggtgagggttttgtcgggtgtgtccgtggtttgagggatgcgttggctggtttgcctgttgtggttggcttgttgccgtcgagtcgtgcggctcatggggttgtggcgcgtggctatgacgtgttcgggcagggggcgttatcttggtgtgctgcggtatgtcgatgacgacatgcgtgtggtgccggacggtgccggtccagtgtatgcgatgggcggcgtgtattggcggatcggcgtgcttgccgctttgtctgtggcggatatgttggcacaggcatggtgggtgaacatgagcctgagcatcgggtttgatccgtggtggctgggcgtgctgggcatcgatggtagctcgttcgatttcctgggattcatggccggcgtgtgtgccgtattgccggtggttggcatactgttggtcttgcccgcgttcatctggccacgtgaacgcacgttgtttcacatcatgatgctgtgcttctgggaaggcacttcgcgcatgctgggtgccggtttgggccgaacgatcctctatatgcgtggcgtacgtgacggcgtgatcgatcatttcgcgggaagcggcgtgcctggcccgttgaaggaatcggacacggtagttgggatgtggcccgcagtggtagggggcattgtgtttgccgtgattgctttcgtgttcgccgtgattcctcgcagacaaaggcagggtgcggcaaagcccatgattggcattggaatcgcggcaagcatcggcttgttcggcatagtgctggtggaatgcggttgggtgcccatttcttttgtgctgttgttggtcgccctgtttatggcttgggcggtgctgccaagcgaagtggcgattgcccgtcaatgcgccagcaagcgggtcgaaccgttctggatgtggtattccgccgaactcatctgggtcgagactctgttcatattccttgccatcatggttgccatctcaggaatctgacatggccggtgaagcttaccggggctcatgcgcaacgaaccatttccaagcgggcacttgtttgatgacataattgctgttgcggtattcgcgctcgattccatcgccgacgatgatggttccttcatggagcttttgttcggccatgagttcccagagcgcgcgggtttctctctcgatggtccgattgtcatccatgcgtgccgtgacctgatatagctcatattgttcatgttcgagtgcatcgcccatcacaaaatcaacttcatagccatgttccttggtatggcatgacgatatgccgtcgcgacgataacctgcggttcggcggcgtagttcgagataaacggcgttttccaatcgttggccatcatctctggcgcttgccatgcttgaggctgcggccagcccgggatctatggcgtatatttttgatgtggaagtggtgctctctttgagcgacatagagaagtctttcattcgaaacaccagataggcgtcttcaaaatattccaataaatctcccagtagcacacggctggtggctagtccggctgaacgcaattcgttttctatcttgcgaatagacaatggcttgccgttgctgccaagcaagcgtcgtgccaatgcggaggcaactcttggacgcgcgatgtcataacgttccactacatcgcgggatacgacacgctgcacatatgactggagcagggtcacacgttgaggcgttggcagtccctcgattgctgggaatccgccctcttctaggtaggagatcaatgcggccgacagcattaatcgttctttggtggaatatccagctgcttcgttccggctgagcaattctgattcggcgataccgcgcgcgcggacaaactcacggaatgagaaaggcaaaagctcgaagtccaatgctcggcctcgaaattcggtggaaatttcttttgagagcattttcgaggaagagccggtgacatagatcgttgcttttgtggtgtctacgatgcgacgtagccaagcgccccagttctgcatttcctgtaattcgtcaaaaaacaggtacaagccggtgtctaggctttcgggatgcatggagcaaaaggtttcgattacttcatcgcccacacttggagtgatgtcgccgagcctgtcatcttcaaaattgatatagcagatttggttccagctgacaccggatgtatgtagggcctctatctcttggaataggcggtagcttttcccgctgcggcgcatgcctacgatgaccttcaccagattgcctactctcggggtcagtggcttacctagatccaagtcgcgcggcacaatcgggtggaaatcttcgattctaaaatcgcgcagcttttcggcgatgatcggatttgccataatgtgcctttcaagaaaacggtaatgctaccttaccaatattgaggaaaactggtaaccttatcttaccaatttttagttttttggtaaagttacttagccggagttgtgttactgtgttgacgagttttgcgtctccgcaaagcgttggccttggtacaggactagacttaagtgctatgagagcgaagactgttaaggatcggcgtacgggggctcagacgctgaccatacataccacgcgaggcgagtcgttggatcttgggcaggcacaatggcttgctgaaggccattggtatatgctgccgttccggtttgaaagtaatggcgcggaaatcctcttctattacgacgtgactcattgcgagaccatgcatggcgtgttgaggtcggtagtgcctggcggccaatatgtgggcatactcgtggcggtattgtccgttatggagcaatgcgaggagcatcgcgtgccgctgtcgtacgtgcagtgggaccccaaaagcgtgtatatctccgcacaggggtatccgctgttcgtggtggtgccggcgctgggactggaacccgatcgcaacaccgccaccactttgctgcagacattggccgatgcacgccggacccggcttgaggatgccgttgtgcaaggctatcagcgtgcgctcgccgagttcctggggcgcaattcactggttaatgcagatgctctgcatgattttatggcgtatttgctgcccggcactgttcagccgcgtcaagcgcagtcagcgcagtcgactcatgaagataatggttcggagacgcaattcggcgcgaccgtagtgtctgacggcaccatggtcggtgccacgcgatttggcgccacagtattgagctccaagcctaaacttcagacgacgccgcaacaggccgcaatgccgacgacttccgcggcaccgtcaacgcatgcaacgccggcggctcctgcaatgccggcagcacacgcggcaccggcacagccgactcctgtaacgtcggcctcgcccgtgacacagccggctcctgcaatgccgattgccgtaaatcttccccgcaagcaggaaacgcagcccgctcgtgagaatctcgttcgcgaacaatatatccgtgaagattccgcccgcggtgtggcatccaatgtggcggctgccgctgccgcgggtgataccgctactgctgccgtggccgagactaacacgggtaacgctgctgccgccgctcacgttgctcacaccgtcaacaacgttgatgctgctcgcgttcccgccactagcaacgtcgttcgccctatcctccctgtcagcgccgtcagcacagcactgcgcgccgatgagaacgacagcgaaggcgagacgatgctgcgcctctacacggacaagtccagaggctttaccgtcacacgattgcgcgacggtaaagcaataacagtgcacgccacacgagccaccatcgggcgatcgaaaaccgcggacattcacatgggcggcaataccaacgtcagccgtatccatgcggtgattgacatgctggatgacggacgtttttgcatcaccgacaatcattcggccaacggcactgcggtaggtggccgcgaactggcaagcggcggatgcgaatatgcggcatctggcggcgatttcacgctggccgacgacacattcgtgatctctctcctacaatagaaggcagagaagaaccgaagcgatgacgctgatagcgggggagaagaactatgaaacgatgtgcacaatgcggcaatgcggttcctgacaatatgatgttctgcacgcggtgcggagccccggtaccggcggacgctacggtagtggcatcgcgcgggattccgcagccgggtgtgccgcagccgcagccgcagccgagcgtacctcggccgaatgcgcctcaaacgaatattccgcaaccgggcatttccagtccgaacggtccaatgcccggcggccaggtgccgggcagcccggtacccggagcgtatgccggtgccgccggtgccgttcctccggcaggaatcccgacctcgaacaatggcatgccaactggtgcaggcgtgcccaacaacggcaatggtgccggcaacaacggcaaaaagccccgtaaaatcgtgccaatcatcatagcgattattgtggtagtggcgctgatagccggcggcatcacgggctttatattctggcgtaacgcgcatcagaaggccgaggccaagccaacaactacctccagcaccaccaaattgaaacctaagacaaagactaagacaaccaccacagaccagcagaagaccaagtccgagcccgccaagccggcagccaccgaagtgacgatgaccgatttctcatgcgacggcaactccgccagtgactggaagtggactggcggcgcgatggtctcgaacgtcatccactgctgggatggggattcctcggtcgattcggattcgtcgtccaaatcctcaagtgattccctggacggcagcggcgagtatgccttcggcgtctggacgccggcgctggatgaatcgaaggaaatccacgtatccatgctcgaatcgggggagaaggagtattccgagccccaggtcgccgccacgtacggcgataatccggcggtattcgtgttctatgcggtgaaaaccaaggcagtgggcaccacgccggaaagcgtgcatctgttcgctcacgaggtcgatctcgataccggcgaactgtctgaccgcatcgacctgcgaaccgaggaagacaaccttatcgactatgagcagggttacgaatactcgttgctcgccgagtcccgcaacatggtggccatcaagaaaacgtggcatagcgatgaaaaatacaccgctaacaaggacgagcgctcagcgaccatcaaccacacgcaggtgatgggcgtaactcatgacagtgataccgccaaggtattgcagaccttccaagacaaaatcgtgcttaccactgattctggcgggtaccagtatgcgaaacaggtcaatgcctccgcgagcggcgtgagcttgtacgacgcatatatggtgcgagacaattcgtaccacctgtattcggtcgaagacaacaaggaaatcatgagtttcccgttgaattactgcgatacggactactcaagttgtgatttgagccgaatgcggtatctcggcaagaacatgtatgtgaccgatgattcgtatagcggcaagtttgtcatcgatagcacgaccggcaaacggcaatcgttggaagacgtgctgggactgagcaaggatgaggacgtcaaggccattgaccaattctccgacggcaccctctacgtgcagacggatggtaacggcaacgaaagcaaacgcgtgttcctgctgtcgtccgatctgaagcccacggaagtgttggatgggccgcagtggggtcgtctgttgttgaccgacggcagtttcaagggcatcaactatctgaccaagaccatatacgtgaagaccacggatgagcagatcatcgttgatgcgcaaggcaagtccgtgggcaagtacacgcaattgccattgggtgatgattccacggtgtgcgaccatgccgctatggaatggatggcgtggagcccggaatccagcggagacgtgattgtgaccatcggtcaggccccgggcgaccccgcaccggatctgagcaacagttcgtcgcaaagcgagagtgattcggattcgtcggattcggagtcggactcgtcaagttcgtcgagctcatccagcgataacaagtcagactcgaagaagtaactactgcgttcagcggtcagtgaccgcccagcccggtataggcatagccgagcaaccgtcactgaccgcccgccaacggcaacaataaaccgcaggtaccgtacgggtacaagttgttctcacagcttgcttggtacgttacctgcggtttattgatatctgggggggggtatcgctggcctgtacagtccagaggtcactgctgttcggagaactggaagaactggtctccgatacgcaccgtggcaggcgcgctgagcttgagcggtgtgcccttggtgacttgggtctcctggccgtcggcgatgatgtaggtgccgttcaacgagccatagtcctcgatccacaacgcgccatcggtatcgatgctgatggcggcgtgattacgggacgtggtgcgggtcgggtcttcgatacgctcggccttggcaccctgcggcacatccatggatggcttgcggcccaacagtgtgctcttgtcgatcacgatggtctggccggtgacatcgttatgcagcagatacgttttcttcggtgccttggaagtgaacgacgaggagagcacggtgctgtcccaatcctcgatgtcgttttcggcggcgtgcggtgtggtgtctaccggagcggcagtgggctcagcggcggcagtggcggcgggctctgcggtaaaagcggcattggttgccgcttccgcggtgctgggctgcccgtagtcgttctgcggttcggctgtgccaactgcggaatccggggtgccttccaccggatcgtcagaataccaacccagttcaggtgctggagggtagggaagtttggccatgatgatgccgtcctttcactgacgaaaagccagagcggcgttgattgccgggtcgccgagctggcccagccattcgatcagtgccggataggtgttgggattacgtgcgatgcaggcgcgtagttcaggcgcgtactgggcaatctgggcgattagcatctggtcggtggtggtcagggcctgttcggcggtgaagccataaggattggtggccacaggctcctcgaatgccgcctgagccgcgggctgctgggctgcgtactggtcggcagcgggctgagcagcggcgtactggtcggcagcgggctgggcagctgcgtactggtcggcagcgggctgggcagcggcgtactggtcggcggcgtaagcgtctgcaggctgctgctcggcagcctgcagggccgcctgtgacggggcttcctgatcctggaccgggccgccgaatgcctcggcggtgaacccgtattgcgccagggtctcgcgggcgcgctcatcgccgaactcggcgatccaacgcttcaagccggggtagcaacgcggatttacggcgacg

SEQ ID NO: 1677 - DNA, 16950 bp, Unknown
  R221_24m  MAG No. k141_152177
cggcgaacacgacgagtgcgcaggaggagaaggtcagcacgcgcttgcggccgatcttgtccgcgtacaggcaggacagcacgatgaacagggcgaacacgcagatggagatcatgagcatgagcaggtattcctggttggtgaagccaaggccgccgccgccttcgccctgctccttggtgccccaagcgagggaccaggtggccagcgtgtagaacagcgtgtaggtcacggccacgaggaaggtggcctgcagcacctgacgccaagacttgcggaagacctcggtcagcggggacttgacgaccttcttctgctcctgagccatacggaagatcggggtctcctccatgtgaacgcgaaccacgaggccgacgatcaccaggatggcggacagcaggaacggcacacgccagccccaagccagcatcgcgtcctgattgttgaaggattcgagcacgaagtaggtgccgttggacaggaagaagccgatcggggcaccgagctccgggaaggagccgtacagtgcgcgcttgtcttcaggcgcgttctcggtggcgaccagtgccgcgccggaccattcgccgcccaggccgatgccctggatgaagcgcagcaggcagaggatggcgactgcgccaacgccgacctgatcgtaggtgggcaggcagccaatcaggaaggtgccgacacccatggtcatcaggctgacgaccagcgtggtcttgcggcccatgcggtcaccgaagtggccgaagatcagcgagcccagcgggcgggcgatgaaggcgatggcgaaggtcagcaagctcatcagcagtgcgacggtggggttgtccttcgcggagaagaagatgtgcgggaagtagtttgccgcggcggtgccgtaggcgtagaagtcatagaattcgatggcggtaccgaccatcgatgcggcgatcacggtcttgaccgaatcgcgtaccaaggtagcggctttacctgccgcctgccctaagccagtctcttcgactgctgcagtcattgttactcctgttttgctctcgttcactctcattggcgggcgattatttcgtctcacagggaggttgttgttctgttgctgtgttgttgccgtgtactgtccgctaccgtttccgtctgcgggattctgccgtaagccttgtgagcgcaacaaaaaaagccccgcaacttgcagggccttaccgattgtgtcagcttgattggccctgccttcgttgacggggcttcaagcatcaatgccgaattagtccgccagcgaagacgggctaataattcgtgcggatacaaacgcagaagcattgaatccagtcatcgcgtggcctcctttcggtatttcctcaggccgttcgacctgaactgaaatgtaaacataggtttggctgtcttgccaatccagcaagggttcacattgtggacgccacgtcgccgagacgaacgcccccgccgcggggaggaacgccgccggcggccggggagccggatcggcccgtcattgcgcggactcggcggtgagggtgacgattccggccagcagcaccatgacgatggcggacgggaagagcaggtaatagccgaagctgtgctcgaaggcgttcaccagtagcgcgccgatgatggcggcgagcgccagaccggccgagttggcgagcgcataaatgccgaggtcgtggccggctcggcgcgggtcgggcaaagagtccattaccagttcaaggcctaacgcatcgtagacgccgaaggcgaatccggagatcagcgcgaagagcagcatgccgttttcgcgtgccgtgccggtggaccagacgccgagcccccatgccaccgccacgccgatggcatacagcaggcaggatgccgccaccactgcagtggtggcgatgttccgttcctcgatcttctcggagatcggcccagcggcccaggacgcgagcgcagcaccgatgagcgttgccgcggccatgccggcgatgaggaggcccgcgggaatggtcaatggcgcggaagtgaacaccacagccttgccatacacccaaaagcgcacgagataccacagaaagaccccggtcagcccaacgcccgtcatcatgcacacgcgagcggcgaacacacgggcgaatgcaggcgcatgtgccggcggacgcagctggtcaaacacctggctcgactcgaatcgttgatgtggctgctcctggctggaaggctccttgggcagcatgatcacggtcaggatgccggaaaccgcaaacagcacggcggtgtaggcaaacggcgtgaaggagtcgaacatcacgccgagcgcacccatgcatacaccaagcgcttggccaagcatcacgccgataccgtgccagcgctcaatgcgcggacggaatttgtccggaacccgttcgctgatggcgctggccaacggcacggaaatcatcgcataggcaaactgcatgagcgcccagaagaaacacagcactacgaggcctgtgttccgccccagaaccagcgtgatcagcgcgcacagcacgccacccgccaccatccacggggtacggcggcccagaggaatacgtgtgcggtcggacagcgcggagaccaagggcatcgcgaacatggaggccaccacgccaacgactaccagcacggccagaggcaccaccaagtcagtggcgacgggcagcggacggctggtggacggattgatggtgaccgatatggcagaagcggtgtcgtagtcgaacaatcgcgccacggcgttgggcatggcgatggtgttcaacgccgcccaaggcgcgccgaccagaatcgaagccacgaaaaagccccaattaagacgggaaatctgaacagcggtgggtcgctgaccattggcggcgaccatcggatcgcgcatatcgagatatgcagacgacagatcaggcgcaggggcatccacgctggccgcggcagcggcagcagccgacgaaccggcggccgccagacgcacggcctgggcctcgggctgatcggcggatgcctcgggaggacgccgacgatctttgatggccagtcgggccacggcatccttgtcttcgggactcaatgccttgtcgagatccgggcggtcgtcaatacccgggcgcacgtacggttccaacatgttgctgctctttctttgctctcatcaccggcgggaggtaccggccagctccgactgagcatgacccgcaaccccgccacatgcaaaaccgcccgagcgcactagcttcagtgcactgcgggcggtttgttttccatggacccagcttacgccggacgcactacttggagcgcgcacagcggagtggcgtttatgggccaacggttagtcgatatcggcaatcggcgggttgctcagcagatcatcagtctcgtggtcaccggcggcatcggtccaggcgaggctggcgaccggagtggtgttatccgtgccgagtccgcggccgggctcgaagatgagggcggccttggtcttgccgtcggcagcgatccagcggaaggtgatggatgtgtcgccgtcggcttcgtagctgaactcgccattgaatgcaggcagttcgttgcggaacttggccagggcgttcagggccttcaccaccgggcgctcgaggttttcgtcgatttcggcggtggagtagtaatggcgattgatgtcacggccgttgttggtcttgcgcagcagttccatgtcgttgcggccggcgagtgcgcccacgtagtagacctgcggcactccgggcaggaagaactggactgcgcgggcggccagatagtgctggtcgttgcagccgagcgcggagtagtacgtgctgttgacctgatagaggtcgaggttgctggcggcggcaccggtggcggcctgggattcgccgtgggtgttggcgtggatggtgttgaccagattatcgacgtcctcgtcgggcacgaggcccttgaggctgcggtcgagctgatcggagccgatgtcgatcacgccgatgccgtcgtgcgtatcgagcacggtgacggcgttgtccgggcggatttcggtccagtggaccacgggttccacgtgaccggtgaacagcgagtgcaggagcagcggcggcagggcgaagtcgtagacgcggtccaccttggaggcgatttcaacctgcttcttgtagtagctatgcacctcaatgagaatttcgaggcctcgcttgacgccttcctcgcgtaggcgggagatgagcttgaacgtcttcggagtcatgaagcagctggtgccggcctccttggcgccgtagcccacggcgtcgagacggatgtagctgacgtgggatgcggccatctgatcgaagatggacatgaggtattcccagcccttgtcggaatcggtgtcaatatcaacctgctgcggagtgaagctgacccagaccaggcgggtcttgccggcgaacttgtagtgggtgaacggcaggcccgggcgcgggcggtagatgccggccagttcctcttcggtggcgccgttcgggaagacggagctcatggtcagaaacatcgggtaatactcggattcctcacctttttcaagcacgtcttggaactgcttggattcccagctcatgtggttgacgatggcatcgaccatgatgccgtgggtcttggaaagttcagcgacgtcgtcccagctgccgagacgcgggtcgactttggtgtggtcgatcgggtcaaagcctgcatccgcaccatcgaacggagtgaagaacggcaggatatgcacgccgtcatacacgccgtcgaagcgggtgcgcaggatgtcggtcatcgagctaagagtgccatcgccgagacgatcggcgtaagcgatgagctgcactttgtttttcatgggacctcccttggttcatggatgcaggtgcaatgtgtacgcagtgtatgcgtgcttttacatacttatacgtatcgaaccggtttgatattacctcgaaagggacgttgatgtccagtaataccgcaaaatgcgcgtgtcgaaccggtttgatgcggtgttctatgcagcttagcctgtccgactccaatgtgtccgattcgggcacaaccttctataattgagcattatgacctccacaccttctgttcacgacgtcgcgattcgtgcgaatgtctccgcgtccacggtttcgcgcgccttcacacggccggagcttgtctccgaaaaaactcgaaacagagtgttgcaagccgcctccgagctcaatttctccatttccagatcatcgatggcgctcaagtccgggcagagcttccgtatcgcgctactgctgagcaccccggtcacgacatggttcggaggcaacatcttcgaagggctcgacatggtctttcatcccgccggctatgatatctccatctaccccatcaacaatgtaaaaagcagggcggatttctttgacgttctgccggcgcgacgcaatgcggacgcagtgatagtcccctcgttcaacgtggattccagagaggtcgcgcgcctgaaaacgatgaatgtgcccattgcgggcatcaacaccgtctccaacgaaaacatgtcggtatgggcggccatcgacgatgcgcatggactgcggcttatcgtccggcatctggtgtccctgaggcatcgccgcatcacatacgtgtgcagggacccgcaatcgttgctgacactcagtgcggctcagcgcatcaggggattcaaggaggcctgcgcgcaggcccatatcaaagacgacgttctggttattccggacggagacgattcgttgcagtcgaccttcaacacattgatcaatatgcagcccatgcccaccgcgatctgctgccaagaggacggcatcgccataccattgatgtgccgtttacgggaattcgggttgaagattcccggcgacatctcgatcaccggtttcgatgacggaacctactcgcaggaattgggactgaccaccatacgccagcagccgcgattgatggggcacgacgtcgcggaaaaactgctcgatcttatcaatcataagacgatttccgaaccgtaccgaacctatccggccgagctgatcatccgatccaccaccgcgactccgcgggacgtcgacgaataggcgccgaataggggaagcggggccgtagagaggatacggccccgcttcggggatggggaggaggaacgatttactgctcgtcgccattcaacgtggtggcctccggcagcacaccgttggtgtcctcgaaggtcttccactccttggcccagccattggtgtatgcgtcggcgacggcgtcccacttcccggtttggttggcgtactccacaagagcgtcctgcacgtctgcaccccaggcgtcaagcgtggagaagctcctcaccatcggaacgccattcgtctcgtacttacgggcggcggcggtcagcgggttgtcgggctgatcctcatctccgtacgcggtgctcggcacggcgaagcccatatcctgagacatgaccttcttgccttcgtcgctgctgaacagccactcgatgaagtcgaaggtcgcctgcttgtccttctcgctggcgttcttgttcacggcccaggacgcgtcgtagatgccagcggggccgtactcctcctcgccggggatacccatgaaatacggcagcatgcccagatcctcatcggcgacctcgttgtccttgacctgcgtgtaggcccatacgccgttcgggtagaaggccacctctcccagcgagaactccgcggtcacgtcctcatacgtcttggaggtcaacagcgtgcgcgaggtcggacagttgttcatctccaagtcgaacagggccttgtagttgtccacgtacgtgcccttgatctcaggcatgaacgtggtgttgttgtccttatattcgtagaacagcggaatacgcgtcatatgggatgcgaaccggtacaggtccgaagattcgagtccgggggtcgccatggcgccttcgatgccgagatcgtccttatgggcctgcatgtcctccaccacggccttgaacgtatcccagtccttgatatcgtcggcggagtcgatgaccgcatagtccttcgaggcgtagtcgttgacgatcttcttgttatagatgatgccgtaccattccgcggcgtacggcaacgtgtagtggttgccgtcggtttgatacgagttggccttgccctcgtcggtcagcagcttgaaggcggcggagtcctggaccggctccatgtagtccttccacttgatgaaattggggtagccggtgatgctccacatcgtcggggcttcggtcttggccaactcggaggccagcgtattgtcgtagccgtcggcggccgtgagcaccttgacctgcacgcccgtctccttggtgtactgatcggcgagatcctccaactggtcgacgatctccttcttgttgttcacgaagtagaccttgcctttgtccggatcggccgccgacgaggatccgcaccccgccatcgcgcccatcgccatgacggccgcggcgacgatcgccatcattttcttggttttcatggttctttcctttccttgatgaaccgattggttcttgaaatgattggggctcagcccttgaccgccccagcggtgacgcccttgatgatgtacttctgtccgcacaggtagaacaccaggatgggcagcagcgccagtaccagagcgcccatcatcgcgcccatgtccacggatccgtatccgcccttcaggtactggatggcgatggacagcgtcttgaaccgttgaagatccaggcacagataggccatcaggaagtcgttccacacccacatcgtctccaggatcgccacggagataagagccggacgcatcatcggcaggacgatggtgaagaacgtgcggatggagccggcgccatcgatcatggccgcctcctcgatctccgagggaatcgacttaatcacgccggtgaagatgaacaccggcaatcccgcgccgaatcccagatacaccagccacatgccccacggcgtgttgaggtccaatgtgtcggtgagcttgctgagggggaacatgaccatctggaagggcaccaccacgcttgcgataaacgcgagatacataagcttggcgacccagttgttgaccctgacgatccaccatgcgcacatggagcagcacagcaggatcagcgccacggacccaagcgtaagtatgatcgtccatccgaagctcggaaggatatccgtcttttctatgccgcgctcgtaattctccaacccgacgaatgtgtcgccggtcggcaggctgaacacgtccttggagatgtagacgcgctttttgaaggagttgatgaagaccagcgcgatcggatagatccatatcagcgagatgatggcgaaaatggtcgtccacagcggcccgtgcctgagtttgtcggtcatgcctcgacctccttgctggtcgtaatgcggttctggatgaatgcgaccacagccacgatgatgaagaagatgacggccttcgcctgcgcgacgccctcgaatccggtgcggccgtacatggtgcggtagatgttgaacgcgagcatttcggatgcgtttgacggcgcgccgttggtcagggccaggttctggtcgaacatcttgaatccgttggccaccgtcaggaagctgcacaccgtcaccgacggcatcatcagcgggatgatgatcctgcgcataatctgaccgttcgatgcgccatcgacctgcgcggcctcgatcagatcagtcggcaggctttggaagcctgcaacgtagatgaccatcatatagccaatctgctgccagcacatcagaatgaccatgccccagaagccatagaccgccgacgtggtcagggaacggtcccacagcgcgaggacgccgttcaacagcagctgccagatatagcccagcacgatgccgccgatgaggttcggcatgaagaacaccgagcggaacagattcgccccgcgcatcgccttggtgaacatataggccagcaggaacgagacgacattgacgacgatggtcgtcgcgatggtgaacagcaccgaccgccacagcgcggctccgaattcgggatccgaaagcgcatccacataattcttcagccccacccacttggcatcggtcaccgtcctgaacgaggtaaagctcaggtagatacccatggcaagcggcacgacgaagaacaccgcgaaacacaacactgtaggtagtgcgaagagcgcccaccctctgcgcaccacttttccgacagtggtcattgtctgcatctcctctccgagatcgatatctgcagaagattcattcttgaatccatgcgcagcgtcatattgcaacgaagaccaaaatcttcttgtcttgaaaatagcatattttgcacacggttgcaaactctctttgaaaaatgctatgttattagcacagaatcactgaaaacacaggagtacatccgtatgaatacccaacctttcacgaacagcaaaggcgtcatttcagggaactgctggagaatcggagtcctctccgattcgctgctacgactggaatggtcagacaccggcgagttcaacgatgatgcgacgctcatggccgtcaaccgcgatttcggcacacccccggaatattccacctcgatcgccgacggtctgctgaccgtggaaacgaccgcgctacgtctgacctacgacatgcggcccttcagcaaggagggactcagcatcgtggtcaaaggcgtgaaagacaccaaaaccaatacctggcatttcggcgatgcgcaggagggcaacatgaaaggcacggcccgcacgctcgattgggccgacggcgccattcccctgaacgatggcgtggtctcccgcgacggctggtcggttctcgacgattcgaacacctgcctattcgccgacaatggtgacatcaagccccggaagaacgccgggattgacctgtacttcttcgggcacggccaccgttatgccgatgcggtggccgatttctgccgtctttcgggaaggtcgccgctactcccccgatacgccttgggcaactggtggagtcgtttccaccgctacacaagcgaagagtatgtagcattgatggatcggttcaagtccgagggcatcccgttcaccacctcggtgatcgacatggactggcatctggtggacgacgtcgaccccaagtacggctccggctggaccggctacacctggaaccgcaagctgatccccgatccgcaacgttttctgggggatctgcacgagcgcggctgccacgtctccctgaacgtgcatccgcgcgacggcatccgcgcgttcgaggactgctatccttcagcggcgaaaacgatggggattcccccggacagcggcgagccggtcgagttcgacctgaccgacccgcgcttcgtcagggcctacttcgacatacaccacgacctggaggccgacggcatcgacttctggtggatcgactggcagcagggcggcgtgacccgccagcccggcctggacccgctgtgggtgctcaaccacatgcactactgcgattccgcgcgcgacggccgctggccgctgatcctctcccggttcgccggccccggctcgcagcggtatccggtcggcttctccggcgacacgatcgtgacctgggagtcgttgagattccagccgtatttcacggccaccgcgtcgaacatcggttacggctggtggagccatgacatcggcggccacatgttcggctaccgcgacgaggagctggaagcccgctggtaccagctgggcgtgttcagcccgatcaaccgcctgcattccagctgctcgccgttctccggcaaggaaccatggaacttccgcccggagatccgtgcgatcatggacgatgcgctccgcctgcgccatcgcatgattccgtacctccacaccatgaactggcgcgcatcccggacaggccttcccctggtggagcccatgtattggggatcgcccgacatcgacgccgcataccacgttcccaacgaatacatgttcggcaccgaactgctggccgcgcccatcacggaaccgatggataaatcctcccgacggggcaaggccgacgtatggctgccgcagggcgactggttcgacttcttcaccgggcgccggtatagcgcgtcttcgcccaacggacggcgcatgaccgtctggcgtccgctcgacggaattcccgtgttcgcgaaggccggcggcatcgtgccgatgcagcccctgtccgagggggattccatcaactccgtcgacaacccgcagcatctggagatcatcgtcttccccggagcggacggcgacttcacgctgatggaggattcgggacattactctcggcagatcaccccggcgaccaccgcgatcacctatcgatggcgcaaggacggcgccacatccgcactcacggtatcgccagcccagggagacgttcacgctctgccggcccggagaacatgggatttcctgttccgaggcattaccgacagcgacatatccgtacaggccgacggcgcatccgtcgattcggatcgccggtatgatgccgaaaccctcacattgcaggtaacggtcgccgacgtatccacccgcagcgagatacgtgtcaccatcggcgacacgacgatggcccccgatccccgcatggaagacgtcttcgacatccttcggcatgccgaaatgcgatatctgaccaaggaacaggcttatgccgccatagcggagaacggcatcgacgcattggccacgatggattcactcgagcacgtcagcgggccggacatggaagattgctccgattcgcatatgccgagcgccgtccgtcaagcgctgacggaggtgctgctccgatcctagcccgcatgtcgcctctcccggaatacgccacgggagaggcgacagcagcccgtcacagacccatgtccaggcgaacgccgggccgtcaacacgtcgaggcacgacgcaccagatcgtaggaggtcacatacgtgcggaacggatccgccgacccctcgatgcgcgcgatcagcatatccacggcatgtcgcgcgtaatcatccacatgcgggtcgatcgtcgtcaatccgggcatgcagtactcggcatccggcacgttgtcgaacccaatgacctgcatatcctgcggcacgcgcacgccgcgccgctgcagctcatgaatcaccccgatggcgagcgcgtcgttcaggcacatgaccgcatccggacgcggcgcatccggatcgtccaacagccccgccaccgcatcgcggccgccggactgcacccaatccgcgttacggaccagccgccaatcgacctgcaggccacgctcctcatgggccaacacatagccgcgggtacgcatcgtgctggtggtttcgggccgcgactcgcggtcggcatccgggcatgcgttctccgcggtgccgccgatcaacgcgatcctacggcatcccgaatccagcagcgcccccaccgcggtgcgtacggcctccacgttcggcatcgtgacccaatcggccagtccctgcgtatcgtaatcgcccacaatcaccaacggatacggctggtgcagtatcgtgcgatccgtgatcggcgagcccatgaagaaaatccagccgtccgcggccagcttcttcgtctccgggatcgcctgcgccaagccgccggcgctgttgtaggtatcggtgatcaccgcgtacccgcgggaacgtgccgccgccacgatgctgtcggcgagatagggcatgaacggctggcagaaatcggtgatggccagtccgatgagcttcgtgccgccggttttcatggcgcgggcggacacgttaacgcggtatccgaggcgttcgatggcatcctggacacgctggcgcgtctccgggcgcatactgccggtgttgttcagcacattcgacaccgttttgatggagacgcccgtctcgcgcgccacgtcggtgatggtcacccgtttcgccacagcacccctctcgtcgcaccatcgggcatgttccgcacggttcaggcggaacgcccgtctgattccagcataacgcgttttccccggccggtccggtcccctccgcccggcccgggaagcaagggccgtgcgatccgtccttctccggaacggaccgcgcggcccatcgcgtcacttgatgtgcagggcggtccaactcaccggcggcagggagacgcggaccacgccggactcggcatcgtacatggccgacccattggcgtgcggggtcacacggttctggtcgtagagcgtattcgcggcgaacagatcgtcgtcgtgcagcgtctgcgcctcgacggatgccggctgcgcgccgtcctgcagcctgatctcgaactcggcggtcgcctcgagcgaacggttcaccgcaaacacggcgagcgagccgtcggcgcagcgcacggccacggcgttcacgccgtcgacctcgccatagcgcggcgtatccacggtgccggcggacagcttcggctccagcacggtgccgcccttggccaggcgcgcggtcacggagaacgggtggaacgtggtctggcgccaggccgggccgcccggctccgtcatgatcggggcgatgacattgaccagctgcgccaggctggcggcgcgcacgcggtcggcgttcttgagcagcgtgatcatcagatcgccgaacaccacggcgtcggcggcggtgtagatgtcctccagcagacgcggggccaccggccagttgccgatgccctcgggggtcttgctcggctcctcaccctggtaccagacattccattcatcgaacgagatgtacacgtcgtgcgcgctcttcagatgggccttggtggcgtcgatggtggcggccacgtccttgatgaagccgtccatatccacgccggaggccaggaagctggccatgtcgcgcgtgccgtcctccttgaagaacggctggtagtaggcgtggcaggagacgaagttcacgttctcgtaggtcttctcaagaacggtctgctcccacttgccgaaggtcggcatgccatgggcggaggagccgcacaccaccagttccacatccggatcgatctggcgcatgccggcggccacggaggcggcgagcatgccgtagtcctcggcggacttgtggccgagctgccacgggccgtccatctcgttgcccaggcaccacatgcggatatcgaacggcttgtcggcgccgttggcgcggcgacgttccgacagctcggtgccgccgggcacgttcgcgtactccagcaggtccagggcctcctgcaggccgcgcgtgcccaggttgacggcctccatcagctcgttgccgccggtggcctcaagccattcggccatctcgtgcaggccgaattcgttggtttcggtggaatgccaggccagatcgagtcgacggggacgttcctgcttggggccgatgccgtcctcccagcggtagccggacacgaagttgccgcccgggtagcggatggtggtggcgccgagttccttgaccaggtcgatgacgtccttgcggaagccgtgctcgtcggcggtcgggtggtcgggctcgtagatgccggtgtacacgcaacggccaaggtgctcgacgaacgaaccgaacagacgattgttgaccggagcgacctcaaaatcgtcatcgacgacgagacgtgcggtcagatggtcctgctggggcatgggattcctttctacatatctgcatgcactctgcatacgtgacacgtatccatacaacgatgtaccgcggaggcgcgggcgaccggggacatccgtgtggcagccaccagtgtagtacaaccttgtactgactgccggaaggcgcgtcgcagagacggctgagaccttttggcgcaccactgcagcaaaaaagatcccaagaagtcgaattacagtcccatccgacgcatagccaccgtgaacatacggcaaaaggcatcaaccacgtcacccgtccacccgctacattcacaagcagtaccgcccactctgcatcattcgcatatgcaaaggccgcgaaccgtacgatgacggttcgcggccccctgacatgccattaggccacccggctcgcaccggctgttcggcctgccggctcagccctcgcgcttgggcgcctggctggccacgcgggtcaggcgcggcgggcggcgcgtggacacgaacagcggctgcacctcgaccagcgggttgtacggcgccaggccgaaccacttgaccggggaaccggccacgcggcggatcgcgtacttgatctgcagcgagagggcgccacggccggagaccttcgactcgggcatcagcgccttgtggatcaccacgtagcggatggtgccgatgccgggatcggcgtcaagcttcggggagatcgactgctggttcggcagctcgccggtcttctccagatcgtgcatgatctgatgcaggtaggccgggatggactgcgagaccttgaagccgaggcggatgcgcacacggaacaggtagtcggtaccgaagctctcgaccgaatactcacgggtgaacggctcgtcggtggtctcgacggccaccgcccaccatgcgcgggcgcgcttggggtggtcggcgaagatcgagaagaagatgtccgtatcgagacgcttcaggtccggatcgctggtcaggtagacgatgttgtccgcgaaccggtggatgcggctatcgccgtgcagcttgtccagcgcggggaggaagtccttcggcatcatgtgccgacgctgcgagcgctccagtttggtgccctcgttccacgtgtacatgatcatgaggatcgccagcgtgagcagcagcgtgaaccagccgccgtgcaggaacttggccatcgaggcggcgaagaacaggacctggatcgccaggaacacgacggtgaacacaacggcgccgaacttgttgctgcggtgccacaggtagatgcccagcaggatcgtggtggtgatcatcgtgatggtcagtgccaagccgtaggccgccgagatatgttccgaatcgcggaacagcagcagcacggccagcgtggccacgcacagcaccacgttgacgaccggaatgtacagctggccgcgggtacgggcagggtaacggacctgcagatgcggcatccagttgaggccggtggcctcggagaccatggtgaacgcgcccgtaatcagcgcctgggaggcgatgatgccggcggtgaccgacagcacgacggccacatagcgcacgttcggatccatcatctggaagaacgggttgatcccctcggcgtcggccagttcggggttgttctggttgcgcagcatccacgcgccctgcccgaagtagttgagcaccagcgccaccttgatgaacggccaggtgaagtagatgttgccgcggcccacgtggcccatatccgagtacagcgcctcggcgccggtggtcgaaaggaacacggtgcccatcagcgccagaccggtggcgttattcggactgaacaggaacttgatgccgtagtacgggttgagtgcggcgagcacggaccagtcgttgccgatggctaccacgccgacgatcgccaggaacgcgaaccagaccatcaccaccgagccgaagaccttgccgatcgattcggtgccgcgcgactgcacggcgaacaggatcacgatgatcaccgcggtgatcatcatcgtcagatccttgttctcggtgaacagatgctccaacgccggcagcgtcttcaggccttcgacggcggacgagatcgacacggccggcgtcagcaccgagtccgccaggaaggccgcgccgccgagcatggccggcatgacgagccatgcgccgtatttgcgaatcaacgagtacagagcaaagatgattctgcaga

SEQ ID NO: 1678 - DNA, 11347 bp, Unknown
  R221_24m  MAG No. k141_155059
agaaccgcccgccgcaaccgacccggcatagatggtatccacgcctcgtccggtgcgttcaacatatccggcagctttcagaatcagggcaagctgcggattgcgggaacgcggttgtgcagtaagcaggttatcttcggaaacaccctctatgaatcctccgggattagctatggtcaacccatcatcatcaaccaggaatctcaccgaacccattcgtgcataatcgcgatggcaaaaagcgttaatcattgcctcacggaatgcccctcgatcgaagtctggcagatcgacacgaatcaagccgctcatgacttcgtggctgggattccatggctccatcagctcgcctacacgatcaaacatatccaccaaaggcaacacgaacggatccatattgacctttggagacatgcctttcatcacttgaaaaacagccgatgcggctggaaccgatcgatgaatagcatcaaccgaaccaatggtgagcagaccagcaacagatggctgcaatccatacgggccatcaacaaccagctcaagtgcccgatcgaaatcctcatcagtaaaagacaacaacgagttttgcgcattggcactgcgaatatggcttctcaacttgttccgtgagtctggattcaaatcgtccaaccgagcctctggtgcaggttgcgcgctgaaatcgtagaaccgttgctgagataaacggctaatgaattgggaaacaaacagcggaacgacctcaggcgagccgtctgctttcagccggcgctgcaatgtcttcccctgactggtagatacgatttgctgactgttatccacctcaatactgactatcggcacctcgttctcatacaagagcgccacgcgagcgggaagctgcggaacagtcttattgaaaattagtgccgcaagtccattgatattgcgatgctcttcacatacgccggtcacagtgccatcgtcttcaataccgagatacagtgtgccgccttcggtattggctagagccactacgttgtcaacaatttcatcatgcgattgagggcgcttctgctcactcttgaactcaaccgtcaaactttctttggccggcaacatgagcatcccctttcaccatcttgcaataattcttacatgttaacagagagttcttacatgtaagaattattgcaagatggtgaaaggggtaaagagcaatccatcctgtcatctccagcaacttaaatccgatcatcgctgctttcggcatatctgatatcagccgctggtgccagtccaatcacccaattgaagctcaacacggccaaagactctacgccgcagtggattcgcgctcgatgagcttatagcccacattcacggtctgcgggaagaactcgtcgtccaggttctcgatacgccgcataagcaaggtcagcgcggtatccgccatgcccttgaaatcggtggccacggtggtcaaagtcggcacgctgtacatgctctggctcaggccgtcgaagccgataacgcgcacatcgcccggcacacttacgccatcgtccgccagaccacgcagaataccgagcgcaataccgtcgttcaggcagtacagaccgtcgtacttgcacttgcctttcttggccaagccgcgcccggtctcgataccgccgtcaatcgaccacgaggatttgatgaaatcacggcgctcgtcaaacggcagtccggccgcgagaatcgtctccttggcggcccgcatacgaatatcacgcgagccgggaatgatgttgggattgttgggatcgtgattgtcgccgacgatgccgatgcgcgcacagccacgcgcgataaggtgttcgattgccgcccgtgagccggcgtcgctcggcgcgttcacggtgtcgatgggcaggctggtgtcgtagttttccagcatgacggccgggtgccgcttcaggatatcgaccgcacgtggcgcattgatggcgatgatgccgtccgaaaacgtgtacgacagatcgttgtcgtcggtaagataccgggacagttcgatgagcatgtgcgagtcgcgcttgtgcacttcctcagccacacacatggccagatgggagaaatagtcgccctcgaggcccgaggtaaggaaggtgatggtatcggaccgcccagaacgcagggaccggccagacaggttgattttgtagccgagtttgcgggcggcgtcacacacgcgttgcgtggtttcgggcttgacgtaatccttgcctcgcagggccgcggaggcggtggtggcggtcactccggccagttcgccgacatcctttaaggtcaccatcgttaccatctccgcatatcacgaaccttatcgataagaatccatagtaccgcccacatctcagccgaggatgagaccctcggtcgaggccctgcccggcgactcgaacgccgcggtcaccgtggtgagcaccgacgctgcaaacgaaaacatgtcaaaccaagaaatggacatgacggagtcattgttttccgagagggatatgccgcgtccacgggcagacgtcacgtatcaatcacgccgataccgtcatataactgttttcgatgtgagaaagctcatagcttccgaccacagaaaccagccacagcaaccccataacagcgttatagttctgtttgtcggcgtcgacaagagccagcagcgccgatgaaatgcacaccaaggatgtttagcgaattgttcgcagttcgcgcgattcgatttgattcgattcgtgcagcccggatggttcacgggggcatgccgtcgtgatgtgcgtggatatgggcgatgcgactctcgttcgggtcggcaggtcatcgtacaccagttacgaaaggatccgtccatatatggcaaggtttaccgagaatcgttggaccagcgcgattattcccgcactgctgattcatatcccaatcggtaccgtctattgctggagcgtgttcaagcagcttatcgctgaccgtctccacgccagccccgcctccgtggaatggggcttctcactcgccatcttcttcctcggcatgtccgccgcgtttgccgggccaatggtggagaaaaacatcaagaaatccgcactcgtctccatggtctgcttcgtggtcggcttcgccggcacgggcgtgagcatcgccctgaacttcctgccgggcgtgttcatctgttatggcgcgatcatgggcatcggcctgggcgtcggttatctgactccggtcaagaacctgatgctttggttcgccgacaacaagggcctcgccaccggcatcgccgtcgccggcttcggcctggccaaggccattgccagcccactgatggaatatctcatcggcacggttggcctggtcagcatgttcttcatcctcgccgcggtctacgcggtgatgatgttcgtcggcttcctgctcatcaagcgtccggccggctgggtgtacgatcccgcgacctcacacgtcagccgcaagacaatcctcaagaagcccgtgttctggggcatctggatagccttctatatcaacatcacctgcggcctggccctcatcagccaagagaaggacatcctgcacgatgtgctcaaggccttcccgcagtatgccaacctgagccccgccaagtttgccgccgccatctccggcatcatcggactggtgctcgccgtggactccgtgttcaacacggctggccgcgtgggcttctccacactctccgaccacctgaagcgccgcgagaccgtctatcaggtaatcttcatcatgtcgattgccgtgtgcttgctgcagatcttcaccaacagcatcgacaacgctctgctgtgggccgtgctggccatgctgttcctcgtcaacgcgggctatggtggcggtttctcgacgctgcccgtgctgcttgatcagcacttcggcaccaaaaccgtctccaccacgcacggtctgacgctgagcgcctgggcgttcgccggtctgtccggcaaccagttggcctcgttcgtagttgcccatgcgcctgatcaggcccaccgctacgccgcactcatcccggtgctcaccggcctgttcgtcgtggccctgatcagcatcagcctggtcaagtacctcggcgacagaaacgtcacgaaggccgtcgaagaccgaggctgagctgccgcaaaacaacgattctgccggagtcgggcgcatcgatcgcatcaatcgatgtacgtcacgattttggcagaatcgttgttgttgctgttgagtacctgaggtcgtgcggcttacgcgccgaccagttcgagcatttgggggatgctctttttgccgaattcgacttgctgggtgccgtcggcgtgggtgatgacgatgcagggcacgctcatcgcgccgtactggtccttaagttcggggaagtgcgagacgtcgtaggcttcggcgcgcacggccgggctcagggaggcaatgcgctgggaagcaagcacggtttccgggcacatcgtgcaggtgagcgagacgaggatcatgatgttcagcgggtccgtgatggacttcgcgcgttcgaccaggtcatcgcccagcggctggccgggaccggccgcgttgtacaggccaagcacgaacgagttgaactcgtggccggaaggtacgccgtggaaggccagaccggtgaagaccagtgaaccattgccgtccttgccggccttgccgtcgccctcagccggcacgcagatgcgcacggtcggacgggcgagcggcaggacgccggcgacgtcgaacgtggcacggccggaatcgtccaacgaaccataagtgggcagttcggtgccgtccggcaaagtgacggccaatggctcgccaaccaccaaagaagtaggcacagaagcaccatccaccgccgtgatcagccctgcggcatcgacggcgaccgagttcagcttgccattcgacaacgcgaccatctcgccgatgaaaccctgcaattccgccgaaagcggagtgccgtccagctcgagagcgagcgtgaccgggcgggtcatgcgtccgaagaccacgccaagctgctgcttgatggcggcggagaacagttcgccggacttcttggcggcgttggatgcggcatcggcactgcgcttggcgggagccggggtgggcgtcgtgccagcggccgaggcggcggaggcggctttggcctcggactcctcataagcggaagcagtgggacgcggcggcaccaagccggttttctcgctcatctgcttggcataacgctccagttccacggcggcaatcgcaccgtcggcggtggcggtgaccacctggcgcaggttcttgacgcgcagatcgccggccgcgtacacgcccggcaccgaggttctgaggtagtcgtgcgtgaccacgtaaccgtggtcgtcgagctccaccacgccgcgcaccaaatcggtggcgggcacatagccggcgaacacgaagacgccgaaggtgccggcgtcggcgggcttccacgtttcggtctggccggtggcaaggttcaggatcgaggcttctcgcaggcctccttggccggcggtgacgcccttcagctcgacctgataacgcacgtcgatcttcgggttgttcttggcttcggcggccactgcggcatcgcaggtgaagtccggttcgcgcacgagcacggtgactttggaggcgtatttggtcaggaacacggattcctcggctgcggcgaatccgccgccgaccaccagtacttccttgccggtgaagaactcgccgtcgcaggtggcgcagtaggccacgccgcggccggcgtactcggcctcgccctcgaagcccagcttgcgcgggctggcgccggtggcgatgaggatgccgaacgtcttgaggtcgccgcgtgaggtgtgcacggttttgatgtcaccatccacgtcgagaccggtggcttcggcggagaggaattcggcaccgaagtcctgagcctgctggcgcatggtctgggtgagtgcgcggcccgtggtgcggcccacgcccggatagttgacgacttcgttagtgatggtgatctggccgccgaaatcgtccttttcgagaatcagcacgcggtagcgagcgcgggccaggtacaggccggccgtcaggccagccggcccgccaccaatgacgacgacgtcatagagattgttggtctgagtcatgaaaactcccttacatacactggctcccctctctgaggggagctgtcgtagtgagactgagggaagcatatcggatcaggctagctctcgcgagcactccccccagtcgctttcagcgacagctcccctcagagaggggagccaaggttaccgcctattcagtgtcgatcacagctggccgacaaggtcgaggctgggctcgatggtttcctcgccaggggtccagttggcggggcagacctggtcgccgtgctcgtggacgaactgggaggcctgcacgcggcgcagcagctcctcggcgttgcggcccacgttggaggagatgacctcgtaggccacgaccttgccctcggggctcacgatgaagtcgccgcgctcggccacgccatcggcctcgttgtaggtgtcgagatccttggccagcagggcggtcgggtcggcaagcatcgggtactcgatcttggcgatcttctcgttggcgtcgtgccaagccttgtgcacgaagtgggtgtcgcaggagacggagtagatctcgcagccgatttccttgaacttggcgtagttcttggccaggtcttcaagctcggtggggcacacgaaggtgaagtcggccgggtagaagaagaacagggaccagtggccgagcacatcgtccttggtcacttcgtggaactcgttgttctggaatgcgttcaccttgaaatcggtcagttcatgctgcagaagagtcatcatcggtcctttcgggaattgttaatcttcaagcgtttaccaccacctatcgtaatgtggtgagccacggctcgcgcgggtgtaacgtatgagccttatcacaccacccgcaacccttgtgctgactatcatcacggcccacccttaaacaggattgagatcgtgagcgttctcattatgctttgggcaaagccagattatgcacgcagtcgcgaatccgcacttccaatcgctactatgggtaccagcagtccgctgataatggaggtttcatggctcagtcagactttgaacaggaatcgaccgcgaacgcaacgtggagtcgcatgctgcaaggcaaccggcgctttgccgagggcaagcccgaccatccatggcaggatcaggagacccgtcaaacgttgcttgatggccagaacccggatgccgcggtgctttcctgctcggactcgcgcgtgcctccggaaatcatttttgatcagggcctgggcgacctgttcaccgtgcgcaccgccgggcaactcatcgatagcgcggttatcgcctcgctggagtacgcggtcaagaaactgcacgtcagcctgatctgtgtgctcggtcacgagcactgcggcgcaatcgaggccgccgagcaggagctggacgacctgatgcacaccatcacttccgaagccgacggctcactggaggccgcggatgcgatggacgacctcgacgagcacatcgccgccgccgaatcgattattctgcgccaggccggcatgtccgtctggcaggcgcgcgaagccgagctcgacgcgcatgaagacatcgagcgcgtacacgtggcccacaccatcgagacgctggtggaacaatcccccatcattcagcaggcattggctgccgaccagctgatgatcgtcggcgcccgttaccagctcgacaccggcaaggtcgaggtgctgagtttctgaccatcagtcagaccccgttcaccgggggtaatgcggtcgtggtacatctgtgtgcagagagatcgaagaacacggaagtctgaaccaatgccacctgcccttactattcactacggatccgccacctatacccccaatcctgcacgtgccacgaccatcgggcgtgcgccggattgcgatctggtgattcacaacccgtacgtatctcaccatcatgctcgcgtcacctttaccgacgatggttggctcttggaagacacgggtagtgcaaacggactgtccatcaacggcattcacaccacttccgtactgctgctgaacagcaccaaagtgacgctggcacaaggtgccaccatcgtctgcatcgtcggaaccagcgggccgtccacgccggcacagcccccgcgacgccctgcggcaaacgtggcccagcctgcgctaccgccggcaccatcagcgcaaccggcacaacccacgcaactcgcgccgcaacaggcacgcccagtagtgcaacccacaccaccagcaccgcaaccggcacaaccggtacaaccgcaaccaacgccagccccgctggccccgcaccgcgtatccccggccctcgcgcacctgcaacagcaaccccgcccaacagcagtggcaccgacagcagtatcgccagtgccggtatcacccgcatcaccatctccgtctccctgcgcatccccttccccatcgaatgccgccggcaccgttctggcaggcagcacgcaagcggtaaggctcgaatcccaactcaccaccaaccgcgtgcacgggtccttcagccccgagcacgacaccacaggcgtcatcggccgcgatacctcctgcctgattcgcatcaacgattatctggtctcccgcaaacactgctcgctggaaaccaccagcagcggcatcctgctcactgacctgaactccgccaacggcacttacgtcaacggccgccgcgtcgcgaagatctggctgcgggaagacgacgtcgtcaccgtcggcaacaccgacctgatcgtgcatgaaggcgtgctgtgcgaccgcacgccgtttgtcagcaacgacgcggttatcgccgaaaacatcggactgaccgtgggcaaaggcacccggctgcttgacggcatcaacgccgtattcgccaagggcacgctcaccgccgtaatcggaccttccggcgccggcaaatcaacattcacctccatcgtcgccgggctcaacagccccacggacgggcgcgtgctgtttgatggatacgacgtgcatcagaacatcgaactgttgcgcagccgtatcggattcgtgccgcaggacgacgtggtgcaccgcaagctctctgtggacgcggcgctcgaatacgccgccaagctgcgcctgcccggctcaaccaaggccgagcgcgccgaaatcatcgacaacgtgctcaatgagctggaactcacgtctcgccgtaagaatcgcattgacagactgtccggcggccaacgcaagcgcgtgtccaccgctatcgagctactcaccgaacccgaactgctgattctcgacgaaccgacctcgggcctcgacccggcgctggatcttacggtgatgaccatgttgcgccaactggcggatgccggccgcgtggttatcgtggtcacccattcactgtcgtatatcaacaagttgtgcgataacgtgctcatgctcgctcccggcggccatccggcattcttcggcaccgtgcaggagatgagccaggcgttcaacggcaaggaatgggccgacatcttcaacgatgtcgccgaatctccggaacgggtgtattcgattactgattcacgccagcgcaccatgcaggccgagtccaccatcacgcggcacaccgagcatgagaaaccggcaaagccattccgcatcaaacagaccatcactctggtgattcgtcagctgcatttgatcatcgccgaccccggattgctgatcttcctgctgttgctgccattgctcctaggactgctgtcgctggttgtgcccggttctcatggcttgggtgagcccgatttcaaagacgccgccaccgagccgaaccagctgcttgtgctcgtcatactgggtgcctgttttatgggatcggctttgtccgtgcgagacatcgtctccgagcgagcgatttacggccgcgagcgcgcggtgggtttgtcgcccacgtcatacaccgcctcgaaactcatcgtgatgggtttgcagaccttgttgcaggcggcgattctgaccactgcggtcagcctcggcaagcccggcccggaccatggtgtggtcactgattccggcatacccgaactggtgttggcgatttggctgactgcgtggacttccgcattgttgggcgaagtcggctcggcgttggtgaagtcgggagaacagacgatgccattgctggtggtgctggtcatggcccagttggtgttctccggcggcatgattccggtcaccggccgcgacagcctcgagctggtcagcatgatcttccccggacgttggggcttctccgccgccgcctcggatatcgggctcaacgatctgctgtatggccccaccaaggtgccgatgttcaaaaaggatgatctgtgggagcacaccacggatcagttctggttcaacattggcattctggggattatggtagtcgtcttcaccattgtgctgcgtatttgcgtcagcaatgccgtggccaagatgcgtcggcgctcatagaactggatcgaaactagcccgcaaccggcttacttcattcattaggtcaattatgcgttcatttggtcactgcactccaacactgaccattgaaatgccgccattccaacgcctcaccatgccgacaacccaccaaatgaacgcgcaacctaccaaatgaatgaacccagccctatatttggtgctacaacgactgcaaatactgccccaaatgcggcaccgcaaattccagctgcccatgacctgccgggcggatgagtttgtccttgataagaaccgcccggtacttgctcacccagcttcgacttctgcgcgtacgatccgcaatatcacccacctgcgtgggatttggcgaatccttggccatagccgcgagaaacagcctctctgcactagtaatgccgtccagcgctggagcgcatacggcatcgtcgaaggcgagcagcgcatcggaaacaccggtcgacacgtcgtccgcggtaatgacatctgaacctcgacgctgcgcagattgccacatgtagtagccaacaagctgcaccatgtacgggtatccttcagactggcgagcggcttcaagcgcatcttccccactgatggtcttgccggaatccgcaactgtttccaggaacgcattcttgacgtctggaagcggcacgttatccaattcgcggcgtagcgcacggcgcaggaatgtggttacctcgttatccagcaaatcgttga

SEQ ID NO: 1679 - DNA, 84133 bp, Unknown
  R221_24m  MAG No. k141_161269
cttggcgaggcgcgcccagtcgtcttcggtgtagccttgcgtgttgacggcccagaggtgatccatggtcaggccggctttgcttcgtccgttgatgacgtcggtgaatttcgcgccgacgtgcatggtgttgttgtagccgccgacgatctgccagaaggcgcggtctgagctgacctgcgcctccttgtaatcgggcatggtgatgccggcggcttcggcccatgcggctcgcacgttcctgtagtagtcctgtgcgatgaggttggccttgcgcgcgtagtcttccagttgtaggcgggcttggccggtgggatcatcgccgaagtagaggctgttgggcaccatcgtcttggcctcgatgatgaggtcggacagttcgtcctggtagtcgtcccacaggtcgttgaggtggctgttgaacgctttacgctgcgccgggctgaggttgctcggcggcaggctgttgctgtccattctcggcctccgttccggtggcggtctgatcggcggcgtgcaggcgggcgcgtagcgtgtccacggccgcttcggtgcgtttctgcttctcgtaggcccggtgggctttgatctcgtcccatgtcaggccggcgcgggtgagtcccacgtcgctgtcggcgaagtcggggttggtggatgcgaccttctggtaccagtcggcgcgggcggcgtcgctggtttccttgaccggtgcccagatggggcgcagttcgcgcaatgcgtcggggtctgcgccctgataggccagtgcgatgctcatggcttccttcaacgcgcggccgaagcgtttgttttgccggtcggcggtgcggctgagcttgcgttcggcttcggccatcgcctcggccgaggcggggttgtccatcgtgatgccgaggtcgttgacggggatgtcggtttcggagctgaccatgagggcgatggtgcgcagcatgtcggcgtgcggggtcatggatgcctgctggagctgctgcatggtgggtttgtcgccgttcttgttggcgggcatgccgttcatgacgctcacgatgctgctccatgtgtcgtcggtgaacttcttcgacgctccgatgaaccacacgcggggggccgcatagaattcggcggtggcctccatgcgcaccatggttcgcaggccgaagtcggtcaggttcatgagggtgcgggtgatgcggctgttgcccagcggatggtaggactgggcgtcgttgacgaggggcacgacgcttggccggtcgaggtgggtttcgatcgtccgcgccgtccacgggccttcgctgttgtcgatttcgtagaccttgccgggcagccatacggtgaacgcggtgatgcgcccggttctgtcgtccttgtcggtgatggtcaaagccgagccgagacggcggcgtcggcggtcccagatgcccgcgctccagtccgccgagcggggcagcatgaggatgcggccgggttcgtcggggtcttcgcacacggtgatgaagctgcatccgtggatgtaggcgctggtgatcgcctcggagacgtcggtgtcccatgcgttgtcgtccacgagctcgtccacctgcgcttgcagcgggtcgggcgcgtcgaagccctcgaacacgttgaggtcggcgagcgctcggactgctttgttgggccatccgatcattggtttggcgagggcgcgcatttgtttggggatgctgtaggcgacgccgttgtatcggtatcgggcttggtagtattcggctctcagcatgttgcgcgcgtagtggtcgcgccatgttgtgaggagtttttggatggtgggcatgtcgtcgtcttcgacgcctttgatgcgggtgatgttggcggattggacggcgaggtaggcgtcttgggtggctgggttggtgatggcgacgccgttgtggtcggtggcgggcattagaaccatgtctccgtttcttgggtggggtctcttctggtggtcatggccccgtggagggcgagggtgacggcgttgagtgggctgatgtcggtgtcgtcgtcgggtcggttccatccgaagaggccgtttttgccgatggggcgtgtggtggctttgttggcggcttgccagagtggttgttggccgtcttcgggcaggtgggtgagggtgccgtctctgagcatgtcctggaggcgtccgcaggcgcggcccatgtcggtggcggcggtgacggtgacggtgacgccggcctgggcgaggtcgggcaggagcgcggtggcggggctttgcccgtcgatgacgaggctggcggtttgttcccagaccttgtcgatgaggttgacggcccacatggtgccgtcgtggttggtgtccctgtattcggcgagttcgatgtgggcggtgttgtcgtcgtagcgcatgcatgcgccgatggtcaggcgtgtgcgtgtggggttcatgtcgatgccgaagctcatgacgccgcctgggcggcggcgctcgatggtggcttcctcccattggcggcggtcgatggcgcggctgagggcgtgttcgtcccagatgccgagggcttcgcgccggaagtcgtcgccggtgaggttttcccacaggttggcgatggattcgtcgcgggtgtgggccgggtagctggggttggctttcctccattgctggcggtcgagggggtcggcgtcgcggtcggcggcgaattcgacgtagagggtgctgtgggtgcggccggcgcgtgatttgtccctgaggcgggtgaacgcttcgccgttgtcccttggcccgggcggggtgcccatgtagatggtctggggattccaggcgcggttctgggtcggcagcatcgacgccatcgccgagtcggacaggtgctgggcctcgtcgatgacgagcagggcgatcttcttgacgccgcgcaatgcgccgcgttctcgcgcgcggaagaagatgcgcgacccgttgcggaagcgtatctcctccttgccggcggccagggatatgccgtggtcggggtccacgagaccgctcatttccgggcgcaggacgatcgcgcacaggctttcgaacgtgtccttgatgacgctgaagtgctgggccgtccacacgacgcgcatgccgggggttcgggcggcgcggtggatcgcgacccagccgatgtcgtaggtcttgccggtctggcgcgggatcgacagcacggcgttgcgtgcgctccagaagccgtcggcgcttttcgcgaggatgatccggttgatctgccgctgccagacgtcgaaccggtcgcccgccgccgcggcgagccggttgaggctcggctcgccgctcgtgtacaaatcgtcggggatgatctggcagctcgccccgtcaatcctcgtgctcatccaatcgttcgtcctccgtgtccagggcctgcatggccggatcgtgcccggtcgacgccttgtcgatcgcctcgatctcggcgctcatgtccgcgagccgtttcgtcaatgacgcgaggtcgcgtgagcttatcgacccttcgtcgagcttttcggcgatcaggttgcgcatcgccaccaggaggcggcgacgatcaccggaagcggcggcattgctgaccctatgggacttcgacgcgctcttcgacctggtggttttcgacgttctggcgaccatgacggctccttaccaagtgtggaaaaaagtccgggggaaaaacggccctttgcccgtggtggccgtgaggtggccgggcagggtctactccctacccccgaaccagtccgagcagcggatcggcccggccgagacctgtgcggcgcgctgcggcgctttgccttgcgtgatgaggtgggcgacgcgctcgcgtgcccatgccagactgtgcgtgcccttgatggcgttgcaccatcggtgcgccggcccgctgttgtcgtgcgtcagggtgccgcctcgcgccaagggtatcgtctcgtcgatcacgaagctgtacgggtcgggcgaacgcagcgtgtagtcgatgggccgatagcagatgtagcagtcggcttgcatgtgccgccatcgctgctgctccagcctgcgcctgtgcccgttgcgtttgcgcgggttgctcacctgagcctcggtttcgcggtgcattggctgacctcgacgccggccctgaacacgatctcgtcggcgatcaacggcacccacacgatgcccagatcgtcgcgccccacctccgggtagggctgccggtcggccaatgagtaagggaagatcaagccgtccacgagcacacgccccctgcgggcgtccacttcgatgcgcttgggacacaacgccatgacacgcctccaatcgaacgcttgtacggatcgacagactgcgctcgccggcgggaagaagaggaaagaaccggcggcgaggcgtctgtctgtggtggtttctcgggtgccgcatacgctggttgtgcacggtgccggcggcggctggcggatggtgcgggattcgaacccgcgaagcatgaggctatcatgcttgcccgcttagcaagcgggtgccttcggccgctcggccaaccatccagcgggaacaaaaaagccccgccggcatgggcagggctttctcgatactccgattacacgcgacagcgtaacacggaaccgggtcaggggtcaagcgtcgtcgtggtcgcgttcgtccttggcctgggcgcacgccaagagctccagcacattccacgcccaataggggccctcgatgtgtcttgtgccgggcattttgccgcgtgcgcgccagttcttcaggtcgttgccgctcacgttgacgccggtgttggccctgatccaacgggcggcgtcggattgggtgcgggtgatgtgcatgaggcccgcgctgcgcaggtattcgagcctggtgcgccgcaagtcgagccatgcgccgcaggcggggcatatcgcataccgtgcgtctcgggcggcgtagatgggcgtgcgcaccggctccccctgctcgtcgcgaccgttgagacagtcggggcatacgccgatgagccgcttctccgcactgtgcgacgtggccgcgtccacccgttccgcaagacgcagggtgtccgcgtacaggccggaggcgtcttcgagccgggcgaggtcgcgcatgcggcgcagcagcaggcggatgaggtcggcccattgcatgagggtgcgcgcccgctcgtatcggtcatatccgagcggcttgatgccgagccggccgcccatgagctgcaagtgcacctccaccgcgttgaacagggcttgggcggtctcgttgaccggcggggccgcatacgccgtgttgccgtgtcgaggagagcgctcgcgggtggtggcttgtttgtaggcgatctgctggagggctggcatgccggccttcaggagccatgcgaggcgtcgcgcccagtctcgggcgcatgccttgcagatggtggcctcggccggtttgccgcagatgacgcagttgtgttccatatcccccgcccttgtcggtgctagacttgccttttggacaatgcaatgcctctgccgcaaggtgggggctttttatttgcctcgccgccgttcccggcgtggcggattggccgggggcggcttgatttcaacgatttttttaactttcctgtctattgtcgctgatgccggcgggttttggcggcgcgtaccggggttcgaggaattcggggcgtttcggctgtggtggcgcggggtgggcttgcaggatgatggccttcacctcgtcgacggggatgcgcagggactgcgcggtctcttccggcggcacacccttgccgcgccattccacgatgatcctcctgacgccttcggtgactttcatcccctcgcctcctgccggtcgagccgttcgcatgcggagtgcctggcgcacatcatggcgacgcggcgcatgcacttgcggatcgcgccgtcgcaggagagggcgatgacggtgaaccggccgaagcattcggggtgcgacaccctcgcggtgggcgtggcggtgccgcgcatgatgatgaccggcccgatcttccaggcggtgacgttaacgtcgatgtcgatgtcgttcattctcgttcctttctcggccggctcgtccggccgtactgcttgccgccccatatgccctgcaacgggtagccgctgatccggttgttatcgtcggcaaaggcgcggcactcgtcgatgaccgggcattgccggcacacggcgagcgccgccgcctgttcgtatagtttgccgctgaaccagagttcggggtcgtggtcgcggcatgcggcttgatgtctccagttcatgggctatcggccgccgttgtaggtgaagacgatgccgaggcgtttcatgacaagtccctttgcagtgcgtgttggccggccgcggtgatggcgtagcggccgtatccgacgtcttccgcgtatccacgtgcttcaagggactggtaggtgcgccggtgattgccgtccgcaggataggcgtcgccgtgcctgacaatctggagcagtgcgctcttttgcgcgtaggtgagtcgccggacgctcatttcaacgcctccgtccgcgcggcagtgatcgccaaccacgcaagcagccgatactgctctttcgcgtcagggttcaacttcgaccacaacggctccacctcctcgaagcccatgcccgacgtacccgtatagacggcgagcgccgccgcgtcgatctccctatcggtgatcttgcggcatacgccggccctgtacgccttgcgcgacgcgaggcactggccgagactggtgatgccggtcgggcgctcgccgttgtctgggtaggggtagcgttcctcgatctcgttggtgatgatgctcatcgtgttccctccatcgattcgtatgcttcaagtacttccgtcaggcagcgttctttgatggaggtcgtttggatcagcgggttgtttccttgcagcgtggcgtcgagttgtgcctggcgtatgtcggcgagctgggtttcgagccattggtggaagctcatcgtggttcctttcctgtgtggtcgtcggcccttgtggtggtgtgcatgcttaccagtccttttcgagttcttggcagtcggggcagatggatgacgtggtgtcggtgagcggtgcgccgcagatcgcgcagatggtcggatcgttggccggttcgggtcggtgggctgcttccaggaggcggcggatgagttcgatggtctgcggggcgggggttgtggtgtgggtgctcattgcttgtccttgagtttgatgtgttcccagtcgcatgacgctccgccggagtcggagaagcatcggacggccgcgctgccgtcgggcagttcgtaccagcggacgtatccggggtcggggttgttcacggtgccctggacgtcgcctttgggtgtttctccgcatgccgtgagcgcgaggatggcgaggatcgccgtgagggttgcgggtattcgtttgcgggggttcatgattgggttccttggtgtccggctcgcatgatgtcgaggtaggcggtgtagtcgttgatgtccctgtggatgcagtcttggactcggtgggtgcctgcgtggttctggtaggggtcgcggccgatggcttggtcggtgaggcgcagggtggtgaggtcgagttttctgtggtggagcccttcggcgatggggtggttgaggtggcggctgaggtgcacgtcgagctggcgcaggtcgaagtccacgttggttcctgcggggtggagtgtgtattggctgagttggtcgttgaggaattcgtggatgttgagcgcggtgtgcttgtagtcgtagccggtcttgggtgcttcggcgcaggcgagcatgagcccgttggcgaggtgcatttcgtaggctttgagcatttcggggtgcatggtccagttgcgcacgttgtcggggtggacgatcaggtgcaggctgccgcctcgggtttcggctttcaggtcggtgacctgcatgccgacttccaggagttcgcactgctgggggtcgatgccggtggtttcggtgtcgatccataggagcatgtggggtttggctggcggttttggcgggttgaggggtttgccgctgacggtgatgtcgtgttgggtgttcattcgtcgcctttcttgatgtcgatgtgggcggggaggttttcgggtggcgggcagggatggcgtgtgccgtccgcgtggagttgctgccagccgccggtgcggtagtagacgggttggccgatggggtcgtcgctcatgctgacgaggtagccgagctggtaggcgcggttggggtgggcgtgcacccagccgtggcatccggtggtgccgctgccgcagagggtgaggaggttttcgggctcgtgcaggcgttcgtagccgctgccgtggctgcgcattctgcggtggtggatgctgtacccgctccactcggtgtcgatgctgcggccgcagatggcgcatttgcagccgtcccttgcgaggacttgccggcgggtttcggtggtgggttttcgtttcatggttttcctttccggttgagttccgtgacgactcgttcggcggcttcggtggggtcgatgccggttttgacggcggcccagaagctgccgacgatcgagccttcgaagctgccttctggcacttggctgaggatgtgctcttgcagccactgctcgtcgcagatgccccacgtgtaccggggtttggccggtttgggcagatggtcgagatatgcgccgttggagagccatcggctcatgttgggcgcgtactggggtcggtcgatggttttggcgtaggcgacgacggctccgatgagctgcgcttccgtcacggcggacgtgccgtcgtgcccggccacggctgcggcccacgctttctcggcttcccgccgcgaaccggtgtgcttcgggtaggcgttccacgccgtggcgaacgggtcggccaacgcccgggcctcgacctcggcgaccgacgcggtttgcttcgatcccggcccggaggggtcaggggaggaagaaggcatggtttggttaggtacggtagtgcttcctgtttgctttgttgaagttgaagcagtctgcttcgcatctgcttcgttttgcttcgcgtctgcttcggctttcgccctgcgggactcgcccgacgccttgcctccggcgtggccggcggcgaccttcttctcgtgcagttcggcggcttcctctggcgtaagcggtttcttctggttcttgaagctgccgaacacggcgaggccgcgacgggtcacgaccctgtacacgccttcgccggcctcttcgaagaggccgttttcaacgagttcgcgcacgagtctgacggtgccgcccacgcttctgacgcgcttgaggtcgaaggtgccgtcgaacgagtccggccgcgtgtatatctggtggtcgcaccacgtcaccatcgtcgcgtacagtccgcgcgcggccatgctgctgtcctgcaccgccggatcgaagccgaaggtgctgtcgaagttcacagacatggcgcgccgccttcacgacatgcgataatcgacttatgagcaacgacaagaagacccagcgctgcatgtgtgtgacgattgatttcgagcagcttacgttcggtgagctgcgcaagttcgtcgaactgacggcagatcgtgaggacgatgaatttgtgtgcgtcaacgacaatgacggagtgccggacggctttatggcgtatgtggacgcagaaaccatagacgtcgtgccagccgatgagacgtcggagcgctgatatcgaccacatcttttcctgagccaccccgttgcgggtggcttttttgtttgcctgctgcatataagcctctctcaatgtgtggttacttgatctcgccggtggtcggatcgacagcctctcctctgtcggtctcgtcagcatcgtcgtcgggatcgggatagtcgggcgcgctttcctcgaacgtggcgaggctgtcgtggaggttgtcgtacaggaccgcgcggcgtgcgtccttcggataggtgagcagccggttgatgacctcggcgcagtcgatgatgtgctgcgcgagcgcgtccgtgtcgtacacggcctcggtgtacgggtcgatctggtggaacttgtcgaggtaggcgtctttggtttcgagctgcatcttgtggttgaccgcgcggcggaagtccacggccgcctgcttgatcttcgcgcacgagctgttgaagtccagcaggctcagcgggctcatttcgtcgggtatgagcgcgtcatggactaggttcgagtcttttttctttgccatgagggtgtcctttctagaattccggttcgccggtgtcggcggcgaacatgtccggcgtgtggccgctgccgccgttggcccacgggtcggacgccggcggcggtgtcgtctgctgcgggggctgcgggggctggccgttcgggttgccgtaggtgccgccgccctgatagccgttgcggccgccctgtttcgtgacctgcgcggtcgcgtaccgcaggctggggccgatctcgtccacggtcatttcgaccacggtgcggttggtgccgtcctgcgcctgatacgagcgttgggagaggcggccctgggcgatcacgcgcatgcccttcgagcatgattggctgatgtgccgggcgaggtcgttccacgccgagcagcgcaggaacaacgccgtgccgtcctcgtactgctgcgtctggcggttgtaggtgcggggcgtgctggcgatcgtgaacgacgcgaccggattgccgttggacagggtgcgcagttcggggtcggcggtgaggttgccgatgatcgtgatgacggtttcgccggccactagtcctcgtcctccatgtcctcgatccagtcgccgacgaacgtggcgagggcgtgcgcgtcctcggctgcgcggcgcgcgatgccccatgccacgtcttcgcggcggttgtggcagtgcagggcgaggtcggagagcgccgtataggccttgtcggccacgtcgcgcatgtgctccagctcggtcagggtctcgtcgtcttcctcgtcttcctcgtcttcctcggcgatgacgcggcctatcggctgagcgttcttgaacgcctcttcgaggaacttgggcagcccgccagtatcgggggcgacatacacgctcgccttgaccggctcgcacaggcgcacgccggcgtccttgagcgcgcattcgagcgcgtccctcacgacggcggtgtcggcgcggccatcgtcgtagttgggcagacgagcggcgagtctcttcgccaagcgttcctcaagcgagatatcggtcttttcttcggtcatttcttggttcctttcatctggtagtcggccttgatcttccacatgcagcgcgcggacacctgccggcggtcgcggtcaacgaccacgtcgccgaagcgggggaagatcagcgtgcgatcccattgcgggtcgctgttgagtctgcgggttgcggtcgcgctggactcggtggtgcggcctcaggagtcgaagcctgccgtgtccatcgctccccgctcgcacgggcattccgcgtgtcctgtcagtggcgtgcgagggggcgacgttgacgcgatcgcagtggacggtggccgaatcgaacggcttcccggtctttgcccgcgcccgcctgacgcgaatctcgaccgggggcgaacctgcccgcccgtaccgcacgccgccggaaaatgtggagaggtggcgacgtgcggggtttgagagaggtggttttgtacgacttttccttgtcgccgcccgccggtggaaggtaattgcaatgccggcgggcaagtctctagatggtcagcacgagcacgcagagaatgacgagcctgagcaactggtacacaaccgctcccggcttgaccttcgtttcgcgcagcgtgccgatgagtatgaagtgttcgagcagcgcgtatccgaggatcacccactgctgccagacgagtgcatcgaagttcattcctctcctcctgcttcctcgacgatggtgacgagcaggatgggcacgacgatgaacgcccaccacgcggccagaccgttgccgagcgggtgcatgcacgcctcatgggtgaacagccacacaatgcagacgacgaacgatatgacggtcaacagggcgatggtgtacggatagcgcttgaacatgaccgccgccttatttggtctggacgagcgtgtccgcgccgtcggggacgacgacgagctgatccgcgttggacaatgcgtcgatgtagtgctgtttgagcacgttgtcggtcaggctctcgttgagcacggcgttggcgtcggcctcgccctgcgccttgatcttcttcgtctcggcctcggtcttggcgacctgctgctcgttcaacgccttccgcttgtcgatctcggcggcctgcgcctccgtgtacttcttggtgatggcctcgccgtagcgcacgtcctgcacgctgacctgttcgacggtcaggccgatcttcttccacttcgccgccagcgcatcctgcacggccttcgtgtactcgcctcggttggtgagcatcgtcagggtgtcgaaccggccggactgttcgcgggccactgaacgcaggtcgttgctgatgtagttctgcgtgaacgtctgctgtttgccgtactccgagtacaggtattcggccgcgctcggatcaaggctgtagttgacttggacgtcgatgtccgcagaagcgccgctcttgtcgttgacggcgacctgcttgccgaccgcgctgccgccgtcgtacttgtaatcggtgtccttgtagaagttgatgaggttgttacgggtgtcgtatttgatgacgctctgccacggcgtcttccaatggaagcccgcgtcttcggaatggccggccagactgccgcccatgttgcggatgaccgcgacctcgcccacgtccacggaatacaggcatgcgggaatgagcagcagcaatccgacgaggcccggaatgaggccgatgccggcccccttgacgtcgcgggacatcgcgacgcaggtgacggcggagctgaagagcagcaggatgatggagatgacgaaccagatcatgagggttcctttcagaagataaggccctttccccgtgccggtaggcttgaagctgcaacacaaacaatccgctgcatgcggggaaaggaagtattcaaatgggtggagctgcaagctgggcgagctcagcggaaacgaagttcaagcaggctcaggcaagcgctagaaatgcctatgagtcacggatgaccgagggtctagcggacatcgcccaagcgttgttccaaatcgacttacggcttgaccggctcgaaaagaaactggacggtcggggttgagccttgccagtttgcgctcgctgatgacgtcgtggcgtatgtaaaggctttccatgttgagctgtgcgccacgacgctcataggtgttactcatttcactacctccggcacatatccgttgtggtcgcgccaacggccgtcggccatgtcgtgcagccatgacgccagacgtccggcttccgtgacggtcagggcgatatgcccctctcccctgcattccatgaaccggatcatggtcgagtccacggtggcgctcacaccgatgcgcggcaaggcgtcgtcggccttctcgccgacccagttgcaccgagtgtcgatcgcattcgccaagaccgccgcctcgtcgcgggacagcagggcgatcgcgccgccagtccccgttcccgcggggtcgcgcagccacagacggatgcgcacgccaccctcgtcggatagtctcggctcgcacagcagcggccggccctcgctctccaggtttatgaaaaaggtcgagttcctggccgcccagtacaggtctttcaccttcatgacgccaccccctcggcttggggagcgtccaccggccacgggtcgagggtgcggcccatgaggtagtccacggacgtgtgcagaagtctggcgagccggttgatctcgccgtctgtgaatgggatcaggccggctttcttgtcggcgtattcccgtgccgtcaggccgatcgcgtctgcgagctggttccagctcagacggtgcccccatgcgaggtcgtcgagtcgttcctcggtgacggtgatcttgtggctcatggctattcctccatgcttctgatccagcggtccatcgcgtctcgcgtgaccatgcgtttggttgatgacaggccgtagcgggtgacggcggggaacgtgtcgaggtccttgttgcggatggcgagcagcacgcccttgtagtcgagcgagtacacctgcgcggcctgcgccggcgtccacgccagacgttcgcccaacggcacacggctcatgtccttcaaggcatccgcgctcatggtctcgatgctcattgctccaccaccttctgcgagcgcggcaccatcggcacgccatcggttagacgaaaaccagaaacaatcttgatgatttccagcgctgatggagtcctgccattgaccagttctcggtaacgttcatcggttagaccacacgctgcaacaaatgctgcatggctgagattgcggctttcttctaatgaggcaaaaaacttcggggaaatcatcagcccatccatgtctcactccttaatcatcgtgttcaactttctaaacagactgtaccatagatgaaacagttgtcaaaccgtgtttgatacggtatgtttaataaatgagacaagcagttaggaggtaaacatgagcgcattcacaaaatggattgaagagatcagcagcggcaatatgagcaaccgcgaaattgccaagaaagtcggcatgacctctgcgacgttccatcgcaaatggacagaagatgccttcatctccgacgacgccatcgccatcgctagggctttcgatcgctcgccaatcgaagctctcgtcgttctcggatcactgacagaggaagaagctcaaaaagcggaacgtggatactccctctccgaatacacaaccttggaactgagtcaggaattacttcggagaattcaagagagcgccaaagttcctgcttatttagacaaaccggccgatgaggccgccagagacattctctaaccaagcagcaccccgcactttctaatgtttgcgagcgcggggtgttgttattgtttgtgttgttgaggtcgtgcggtgtggctcggcttgttatttgaggaggttggttatggcgaaggctgcgtataggcgtgggcgggataagctgcatgggacggtcgtgttcaatgtcggcgtcaatgcggtggtggtgcccgatgatccttccggtagtcggcgttttggcgcgtgtagcgtggagagcgttcctcagcccaaggggcgtaagccgcattttgttttgcgtgacagcaagggtggggtcgtgttcgaggtcggggcgcaggcccgtgccgcgtatgcggccttgcagccgttggagggttgtaaggtgcggtcgttctcgtgggagtggaaggcgtcggatatcggcgcgggtgcctatctcagttgcaggctcgtcgagggcaaacggaagattgcggtggaggaaccgatcgaacgaatcattttggataccgagacaacgggtttgcagccgcagtatgacgagattctgcaactgtccatcatcgacgggtacggcaatgcgctactcaacaacctgtaccggccaaaataccacgattcatggccggaggcgcagcgtatccacggaatcagtcccgcgcaggtggccggcaaaccatccatagaggatgacctgcaaacagttcaggacattttagaccgggcgcagcaggtatgcgtgtacaacgccgacttcgatctcgcgttcctcggacagctgggctttcggctggacagaagcaaagtcgtggacaccatgcgcgagtacggacgccggtaccattccacgccctactacaggctggagaaagcggcggcggaatgcggatatcgatatcacgcgcacgacgctctggaggactgccgcgcaacattggcggtgcagtcgaaaatcgacggaaagccatcgctgtggcgcaccgcccagacatcccttcattcctcccataccgccatgaccgaggaagatcgcgcacgaatggaatccgtcgtcagtgcggcgtgtgcatacgccgccgcgcggtcggatgaaacgccggcgagcgccgacgcaaagaagtcgccggaagccggccagtcagttaagccgatgccgaatacgttcgagacgtctgccggcaagccggtttcgcggctctattattggtcgttcgtggtgctggtgtgcatattgggcgtattgtccgcagtgatggcgcttgtctgcatcgttgccccgtacatgctcatcatggcggttccggccatcctgttcaccatttggggagtcaaagagtgcgggcgcatgaagaagcgcatacgcacgaagcgtcgcaggcattagcatcgttctcgtcttaacaccgaaaagccccggccgcttgtcttgagcgccggggctttttgcgttttacgctgcttcgtcgatgacttggacatcgatgacatccgtgtcgtcgtgcaggtcggggatggcttggccgaggagtttggcgaggctggccgtgtccctgtgggtgtagtggttggtcatgctgatgctggtgtggcccatgatggcggttctggcgtcgtcgggcatgttggcccgggcggtcatgctggcggtccagtggcgtgcgctgtggatggtgaccggcgggaggccggcggctttcaaggccttgttccagttgtggcgttcggtgccgctgcgcacggggttgcctcgtgagttggtgaatatgagttcgcgcgggcctatgtcgagtcgtttgatgcgcgcccacaatcgttgccacaggctcgtggatatgggtacgaatcggtgggccgcacgggtcttgggggtggtgagccacaggatgccgtacaggtgctcggctttgagccaggcgggtatcacggcgtcctccggtttgccgtattgctggatctgctgctgcacgttgatgccgggcacgccgtcgcgttgctccagctcatagggcatgagcgcgtagcgttcgccctccctcatgccggcggcgaacgcgagttcgaacagcagcatccaggattcgtccacgtccacggtcagggccgggccgcggcgtttcgctccccggttgggcactgcctcgatcagctgtttcggctggtcgggcgagaggattctggtctcggtgggctccacccttggcggcctgaccctgcggcacgggtcgatggggatgagctcttcgagctccgcctgatcgagcatcatcttcaggctcacgaagtggtccttgagcgtggagggcgcgagccgcttggagagcacgcgcatgcattgacgcacatggtcaggtgtcaggtccgtgagccggacgcagccgatgacctccatgcacgcatgaatcctgccggcgcgggtacggtacgtggtgggtttgacgttgagtcggtattcctctagccaccgctccgcgtaatccttcagatacggcgacttggctccgggcagcaggccggtgcgctccatctccgcgatcctcgcgtcgaaccgttcgcgcgcgtccgccttcgtgcgacccttggccgagacgtagcggcgtttgcctgtggcggggtcgcggccgacttcacgccggaactcccacgagccatccttgcggtggatgatgcttcccgcacccttcgtgcgtcgtctgccgttcgtcgccatgatgttcctcccttgtcgggagcgccttcgagcatccgctacaagcgccctcaaaaagggcactctattggcacactatccgggccacaaacggccagatacggggcataatcggccattcttcaataatcgaaaaacggcgcgattccacagttccgaagactcgaaaacattggaatcacgccgttttctagagtgctcacaccctatttggagacgttgaacttgaactccacaatatctccgtcggccatgacgtagtcgcggccttcctgacggagcttgccttcctccttgatcttggccatggagccgtcggcggccacgaaatcgtcgtaggagacgatgtcagccttgatgaagcccttttcgaagtcggtgtgaatcacgccggcggcctgcggggcggtccagcccttgtggatctgccaagcgcgcacttccttgacgcctgcggtcaggaaggtctgcagtccgaggatgtcgaagcccacgcgggccagttggtcgagaccggactcgctcaagccagcgtcggccagcatttcgcgggcgtccgcctcgtcgagctcggtcaggtctgcctcgaactgagcgttgaggaacacggccggagccggggccacggatgcggcgagcttagcctgcaggtccttgttggccagctcgttgtcgtccacgttgaacacgtagatgaacggcttggcggtcatcagatgcaggtcgtagacggaatccttgtcgaagcggccttcgcgtgcggccttgtcgagcgtctcgccggcttcaaggatggtctttgcctgcttgactgcgtccatgtaggccggctcgatcttcttgcccctcagatccttctccagcttgggcagcgcgttttcgatggtctgcaggtcggcgaggatcagctcggtgttgatggtgtcgatgtcgtcggccggatccaccttgccgttgacgtggacgatgtcgtcgtcctcgaaggcgcgcacgacctcgcagatcgcgtccgcctcgcggatgttggccaggaacttgttgcccaggccttcgccttcggaggcgcccttgacgatgccggcgatgtccacgaaggtcaccgtggcgggcacgaccttttcggtgtggaccagcttggccagcacgggcaaacgcttgtccggcaatggtacgatgccggtgttcggctcgatggtggcgaacgggtagttttcggccagcacgttgttgcgggtcagtgcgttgaacatggtggacttgccgacgttgggcagtccgacgattccgatagtaagagacatgattccagtctagggagaagctggacacattgaacgtgcatgtggtgaaccggccatatgcaaaggcctccgagcatacggctcgaaggccttgactgtgatatgcgaatatacgcgaactctgattggcagtcagccgacgatggcgtctacggcgtcgatgaccgagccgcggaaaccgtccttttcgagctgggcgacgcccttgatggtggtgccgccgggcgagcacacggcgtccttcatggcaccgggatgggtttcggtggccatgtagagcgcgccgacaccttcgaccatcttggcggcgagccggtaggcggtggctcgctgcagaccgtactgcacgccggcgtcgcccaaggcctcgatgtacatgtcagtgaaggcgggcgcacagccagccaccaccatggcgatgttcatatgcgcggtgtccacgcgctcgatgaggctgatggggccgaatagctgctcgaaggtttcggtttcgtcgtcggtcagggtgttgacggattcggtgacgagcacgcccttgcccacggccatcggagtgttcggaatggtgcactggatatggatgtccggggagtcgacggattcgccgtcttcggtggcgaacaggtcctggtacttcttgagattccagccggcggcgatggagacgacgatcttgcccggcttggcaagttcgtcggccagcggcttgacgacggcggcgatctggtagggcttgatggcgatgatgaccacgtcggcggccgtcaccacttccagcgcattgcgcaacggacgcacgccaagttcggcggtggtcttctcaagcttgtcgtagtgggcggcgcaggcgaccatctggccgccggcgaccacgcccgcgtcgacgaagccttgggcgatggcctgggccatgttgccatatccgataaaaccgatggtgaggttctgagtcatacgttttcctttcgtgcatgtatacagagctccctcatcagagggagcttgcttccttgagtcagaacagttcttcgaggtcgccccggttaagggcttcgtcatagagatgcttgaagacgagcgggccgtgcagaccatcatgctcgaattcgttggtggtccagtagtggctgttgcccacgcggctcaaggtgtcgagctgcaggccggaatcgacatacatgtcgtcgaaatagacggcggcctgcaacggcacctcattgcgggccagctgttcttcgtcatagatcacgccgaagtgcgtgtcttccatgagcaggtccatggccggcttgaacgggcgcaatgcggcctcctgttcgaacatccacgggaacatggcctcgccggtgaagttgagcgggcgttcatcagcaccgaattcgggcttgccatcgcgcacgcgctgggcggcccaacgaatgggctcgtcaagctcgccgttggcgtagatgaattcctgcagcggccagtacagtgggcgcgacgacgtggcgttcatcactttggtcaaaaattcgtcagacaacggcgagtcggcagaagcggaaccatcgccatcaaggaaggcgtcgtcaagaatccaatggacacgctcgaagctcggcttcatgccaaagtcggatcccaagcactggaagcgttcgacggtgagcgggtcgccgttcggcatcagcgggaagccgtgggcggccatgccggcgatcacgccaagtcgatgctccacatcggtaccagccatcggattcagtacggaatcggtgagtttgccaacgaattcggcgacttccgcagtagtcggcaacttgtcggcgatggcggccacgcgctccttgtcctgtgggtagcgctcgtagaactgagtcgtcttgcgcaccatgcgcgggaaggtatgctcgtacacttcagcggcgtcggccggcacgtgcgggatgccgccggtggtgaagctggcgattacgccggccgggaacagggacagtgtggtcagggtcaggaagccgccgtagctttggcccatcgtcacccacttgcggccaccgaattcggtcaggcgcagatgttcgaagtcacgcacgatggaatcggcaaggaacttcttcaggtagtcggcttgggctcgtgcgccggccgcggcatcatcgtcgtgcgcggcggcgatgcgggccatggcgtgcgtgtccacgcgcgaggagcggccggtgccgcgctggtcgggcaggatcacccggaagtgcctgatggcctcctcgatccatccgtcggaggtcgggctgttgaggcgcgggccggcaccgccgggaccgccttgcaggaaaatcagcaggggcaggtcgtcatgcacgtgttcgggcgcggtgaccacgcgatagaacagtttgatggtttcgccgtcgaacgcttggcctggctcatggccggtccagtcgagcggaacatcgatggaatggtcctctatggccagtccgggcacgtagtatttgctcagcattgtcatggttcaagactctagtccataaatcctcctgaagagtgataccggttcgtcgccggacacgctagccttgcgcgttatggagattatggcgcgcgtgagggcatggtgcgcacgggagtcgacccgcacactgctatgggacacgttgctcgccgcagcgctgatcgccggctgcgtgccgttcatcggcgtcaccagccctgattcgacgggcggcatattgtttcccgcaactcaggcgtcgatgacgctgtggtcgctgccggtcttcgtgccgctgatgctgcgcaggtattgcccggagccggcggcctggctgttcgtggcgctgaccatcacgcatcttgtgttcggcccggcgatcatgtatttcgatttctacgccctgatcatggtgtattcggtgattctgtatggcaatccccgacattcctggcggttcatcgtcacggcgttcgtcatgggactggtcgcggcgacggtctggtcggtgtctttcaacgtgggtccgctgttcgccggaccttcctccggttcgcgcgtcatccgcgacggctggctgtccgatgccatcatgatgcccacatgcccggcggtcaccggcgtcgtgggggcaagcggcgccgtcaactgcggggccaagatgctcgcggacttcggcatggaggcggcgttcatcgaatcgagcgtgctgagcgtcatcatcatggccttgtggcagcgagcgcgcaacgccacgctggcggccatgcgagagcgcaacgcttccattgtggcgaaagaggccgaggagacgcgcatcgcggcgctggccgaacgcgcacgcatcgcccgtgatatgcatgatgtggtggcacatacgctctccacgattattgtgcagtcggatggcggccggtatgcgggtgcgcatgatctggccatcgccaagcacacgatgggtacgattcggcatgaggccgaacgcgcgcagcatgatatgcagcgtctgttcaatgtgttcggtgcgagtggcagtaccggatatgccgacatcgattcgctgtttgacggtcatctggtggtgtcccggcatatgaccggcaaagcgcaacctgaccggctgtccgccgacgcggaaaccgccgtgttccgtcttgtgcaggaagcactgaccaatacgcgcaaacatgcgggcgagggtgctaaagccaccatcgatgaaatctggtcaaacgatgtgctgtcgattaccgtatccgataacggccgtggcgcgacgtctgcagcagacggtcataagcccggatacggattggttggtatgcatgaacgcattgagtcgttgggtggcagcgtgcaggccggcccagggccgaatggtggctttattgtggcggctacgattccgctctcccctgccgccccacagtctggcaccgatacggaggatccggtgctaaccgttatctcgcgtatacgaggattgatggatcgggcgcgccccaaagtactcgaccaaggagatacgcgtgagtcgaactgggtgggtcgatttgcgcagtggaccgagcggcactatcttctgatagacgttatcgccactatcgtgctgattgcgctatttgattccgccacgtatggcgatttgcaaatgatcggcaatgccccgtattcgccgaaccgcgtgccgactataacgctgacgattattatgctctcgcctttggcgttccgtcgccgcttcccagagggcagcgcgctggcgatggcggtgctgtctgctgtgcaactgttgttcttgccatcgattttgaccatcaatatgtttgcgatggtatccgtgtattcggcggtattgtatggacgagagtccgcttggcgctgggtgagcgtggcgctggcagccgattcgtggcttgcgggcatcaaggtgatggctgggtggaatggatacagtcagctgttccatctgtttttgcccgatggtagttccatgctctcaaaatggaggctggttttgtccggcttgctgccgggcgcgggaatcatgttggccggttttgcctgcattgcgatggctcgatggagccgttcgcgtggcgcaaacgctctggtgctgttgcgacgcgaggaggcgctgcgagccgagcaggagcggcaaaaggtgctggcggccaacttagagcgcaaccgtattagtgcggcgatgcaaaccgaagtactgaccacgctggaatcggtgattgcgcaggctgacgagggactggtgatgctcaacgccgaacctgcgcctgatagtatgcagattgaagcggcttttgccgcgattggtgctcgggggcgcgccgcattggctcatatgcgtcagctgttgagagtgttgcgtgaaaccgggttcagcgacgaggcccatgagggtgtgcagccggatatgcagttgcgaccggcggcttcgttggatagtcagatgcaacacgcgggaacgttaccccggtgagagacttgcccaataagaactcagggaacaatcagggtgtttatggagcggcgctccgataggaaacggatacagtggagagcatgaacgagagcagaagcattcgcgtgattattgcggacgaccaggagctggtacgtgccggttttgccatggtcattggttcgcaaccggatatggaggtggtcgggcaggcgtccgacggcgcccaagccgtggcgttggcggaatccctgcatcccgacgtggtgctgatggatgtgcgcatgcccggcatggatggcattgaggccacgagccgtattacctcactctccgccgcgccggacaacgcggccgattcggccagcccggccgccgacgcgaccgtctcggccgaatcggctgacgaccggccgacgcgcgtaatcattctgacgacgttcgatttggacgagtatgtgatggcggccatcaatgccggcgcctcgggcttcctgctcaaggacaccgaaccggaaacgttgctcaattcgattcgtactgtattccaaggcaatgcgattatcgcgccttccgccaccaagcgactcatcgaaaagatgatgcaggacggttacgcgcagcatggttcgctgaccggcgatgtcgcgcgctccggtgccgtgtacggttccgccgtcggcgtctctggcggtgcggccggcaacggtgccggctcgatgaccggcatcccctcccctgccggggccgcttccgacggttccaatacgtcacgcccagcatacaccgatcccgaactggatctgcttaccgaccgtgaacgcgaggtgctggtggagatcgcccatggtctgagcaatcaggagatcgcggacaagctctttatctcccttcccaccgtcaaaacccacgtggcgcatatcctcgccaaaatcaacgcccgtgaccgcgtacaggctgtagtcttcgcgtacgataacgggctggtgtaacaaaaaagctccctctgatgagggagcttattgctctacgcttcggccaaggcttcaactggtggcgttttgacggcccggcgggcgggtgccacgctggccagcagagcggcgagcgcggcgacgccgagcaccacaccgttggtggcccattcgaacgggaacacggtgtcgccgtacaaactaaacaccatgtaggatccgagccagccgaacagggtacccaataccactcccaccacgccggagacgagcgaaagcagcaacgcctccaccgccagcgagcgccgcagttggccgcgcgtcatgccgatggcacgcaaggtggcggattcgcgtgtgcgttcgatcaccgacagactcagcgtgttcgctacgccgaccaaggcgatgagcacagccaccgcaatcaaaccgaccaacaatgccatcatgccgttgatcatggtctcccattgcgtacgttcggccaccggaccggtcacggtaacgccagcactggcggagaacacattctgcacgttggtgaatacgtcgttcagcgcaacacccgcgccctcggcgtcaatacgcataagcatgatatgcccgtcggccttgattccaccgttggtgaagtggctggcgtccacgaaggcgaccgcggcgtagttggaggcaatgcggcgatagtccaccttccgcggtttgagcgtcagcgtctgtgtgccgccggattgtccattgctgttttcggcgctgccgttcgcatcattaccggacggaccattggcggcatcggcttgtgcttcggccgctccagccgtgaacgtaacgctcttgtccagcggaatatccttgcctgtagcggcggaatacttgggcatcagtacggaatcgccatcaatggtcacaccggacaaatcggagcgcaccaccttgcgcagcgcgtcgacgccatccacgcccacgaccagcacactcaggctcttgccgtcggcatccttcatggtcatcatgcgggtcggcgcgtagatactgctctgaacgcccttgactttggctgcctcgccggcctgtttgccagtcatatcggcgccagcggcaatcatgtcgacgctgtagcgcgtggtcagcgcctcgttcatggtttgcttggcgctggcggcaccggtggcgatggtggagaccagcgtcacgccgataagcagtgcggcaccggtggcggccacgcggcgcgggttcttctgaatgttcgcatgtgccactttggcggacggaccggccagtgcaaccagcgcgcccacgccgcgcatgagcaccggtagccagaacgtggcggaaagcaccagtccaaggaagatcaatgcacatccgatgatggcggcgagcagcaccagcgaatactgcttgtcggccattgaatcacgtccggcgattttctcggacatctgccatacagagaatgcgcacagtgccacgccgcccgcaatcagcagcatggaaatcacggcgcggaccacaccggcccgtcgcgtgtcggtcagttcgatgggtcgcaacgcttccagcggggtgacggcggtagcggaacgcgcggagcctagcgaggcaatcaccgtcataatgatgccgaatgccataggcaccgtgaacaccggaccggatagtaccagtcgcatggtcatgccagtggctttcatcaggcccgactggcatagtgcggccatgagtccgatgcccaggcccactcccagtgcggaggcgatcagtcccagcacaccggcttcaaacagcacggagacatacagctggcttttgttcgcgccgatggtgcgcagcagggcgagtgtgcggcggcgctgtgccacgagcacttggaaggtgttggcgatgacgagtgccgcgaccagcatggcgagcatgccgaagctcagcaggaagatggtggtgatgctggtttcgcccgagctcatgcttttgacggattcctcgacgagcgcggcacgggattgcacgctgaaatgcttagggagcagtgtgctgacctgttttacggtggatgccgcggccgtgtcgctggcatcgtcgatgtcgagatagacgaggtagacaggcaggttgccgaaatcgttgctgccggccattgcggtgatgacgttgtcggaaagcacggaagcgccaccgtagtaggcgtaggcaccgttcgggtcgtcggtgaggccgaccacgcgcacggtcatgccggagtcggcggccgtgtcggtgccgtcggatggggcggacgcgccggacgcggcatcggaatcaccgtcgtgcgagctcgtgccatcggcgttctgggccgactcatcaccagcgtcaccggtattaccggccgaatcgccggtcttgcccgcatactgcgccgcctgcgagttgacggtcacacggtcccctaccttgacgccgagctggtcggctacggacttggtcagggcgatctcgttgctgtccgccggctggtctccttgcgtgatggtgaccggcagcagcgtgcgctttgtggcggtggtgatgacgtagctgctggcatgcttgttgccacgggttacggtcacggaacccgcgtagccggcacgtgcgtccttgacgcctttggtggcgcggatgcggtcaagctggaagtcgttaaccgtgcgcgtgtagatgtagtcctggtccttatcggtcaggtccttgccgctatccgggctgatcacgtagttcgcgccgccgagctgggcggtattctgggcggcaagcgcatcgttcatcgcgttgccgaacaggaaggtagcggcgatgaacgcagtgccgatcaggatggcgatgcctgccggaatcagcatcctggcgcttttcttcataagtttcagagtgatggaaaacatgggggtatcctgtctctcgctttccggctcagcgagtgtgctgtgcggcggcgcgggcatggcgtatggtgccggttctcccggctgggggcaatggagcgtcggtgatgggcaggttgggcacatcctctacgccggcaagacgggcgagcgtgtcggcgcgtgtgctggtgacggcagtgcgcgtggcgcgttcgcgttcggccataagcagctcgttcatcgtttcggcagtaggattcgattcatcggccacgatctgtccgtcggcgaatacgatggcacggtcggcgtaggaggcggccaccgcatcgtgcgtgaccatgacgatggtttggccaagctcgttgaccgaacgcttcaggaagccgagcacttcggcgctggaaacggagtcgaggttgccggtcggctcgtcagcgaacaccagcttcggcttggtaatcagcgcgcgggcgatggccacgcgctgctgctggccaccggacagttcattcggacgatggttgagccgttgcttgagtcccaaggtttctacgagcaggtcgaaccaggcgtggtcgggcttgtctccggcgagagtcagtggcatgaggatgttctgttcggcggtgaacatgggcaacaggttgaagctttggaagatgaagccgatcttgtggcgacgtagcaaggtgagctgcttgtcgtccatgcgggtcaggtctgccccgccgaaaagaatatgcccggatgtggcggagtcgaggccggcgagcgtgtgcataagcgtggatttgccggagccggacgggcccatgatggcggtgaatttgccgcgttcgaaactcacgttcacgtcacgcagggcgtgaaccatattgctgccggtgccgtagttcttgaccaagtcgacggcctgaatagcgatgccgcgcgatgcggacgggttctgcacgttcataatgcctctccatatttggccggaccttatgcccggatgacgattccaacttatgaagaaataacggcgcgccccatcgtgcgccagactgaattgggctaggggccacgcgccggccctcatccttgaggattatgtcgtctcaggtctcacactattcatgcctctgcgcaaacagtgtgaggcatacagacgcaagaaagcccgcactgcatgacgtcagtgcgagctttctactccttgggtcaagcgatcaggcggaaggcaccccatgcggctcgatgattcgcgatgcaccccattagcatcgcgccccttctcatcgggccgtcaaccctcctgtcgacctcacttggccaagccggaagcgcgaagggcttcgaagccgcccttcaggtcatcgagaatgtcctcgatgttctcggtgccgatggacaggcggatggtgccctggtgaatgccctggtcctcgagctcttccaaggtctcctgggagtgcgtggtggaagccgggtggatgacgagggactttgcgtcggccacattggcaagcagagagaacaggtgcagattgtcgatgaagacgcgagccgcatcctttccgcccttgatatcgaaggtgaagatggagcctgctccgttcgggaagtacttctcgtacaggtcgtgatccggacggcccgggatggacgggtgggagacggactcgacttccggcacggtctgcaggtactcgacgaccttcagcgcgttctggacgtggcgctcgacacgcagggacagggtttcggtgccctgcagcagcaggaaggcggcgaatggagacagggtggcgccggtgtcgcgcagcaggatggcgcggacgcgggtcacgaaggcggtgccgccgagagcctcgtagaagttcaggccgtggtaggaggggtccggctcggtcagggtcgggaacttgcccggcacctcggcccagttgaacttgccgccttcgacgatcacaccgccgagggtggtgccgtggccgccgatgaacttggtggcggactcgaccaccacgtcggcgccgtgctccagcgggcggaacaggtacggagtggcgaaggtgttgtccacgatcaccggcaggtgatgcttgtgggcgatttcggagatggcctcgaagtccggcaggtcggcgttcgggttgccgaaggtctcgaagtagacgagcttggtgttctcctggatggcgtcctcgaactcctgcgggttctcggcggaaacgaaggtggtggtgatgccgtcacgcggcagggtgtggcgcagcaggttgaaggttccaccgtagatgttcttggcggcgacgatgtggtcaccggactgggtgatgttgcgcaccgcgtattccacggcggctgcaccggaggctacggcaaggcctgcggtaccaccttcaagggcggcgatgcggtcctcgaagacaccctgggtggtgttggtcaaacggccgtagatgttgcccgggtcagcgagaccgaagcgagcctcggcgtggtcgaagttgtggaagacgtagctggtggtggcgtagatcgggactgcacgggagtcggtggccgggtcggcctgctcctggcccacatgcagctgcagggtttcaaaacggtacttcttgttgttctcggccatgggtctttctccttggttgtgctaggtcgcgaggatttttccttgccacccgcctgccgtgttcgggcggttggcgaggtgttggttatgaagttacgacgcttgggccgcgcggcgcaagccgaacgttatcgggcttgcctataagggcttataaagccttgggatcattgacgtgagagactgtcagaagtcacgaaaaagtcgttgaaattatcgcgacacgccgggccgcacgcatgcgctttcacggtcgactgcggtcacggtgatatcgctaccatgcctttcgcgcatggctcaagtgtccgtgatgattgcttgttccacccgtcaccaagacggtttgcccgctcggtgatgacgtctgttccttttttccgccgcccggttacatggtttacatgacgaacgactacagtcaaacatcgccaatgaattattccgccaacatggtgaaggggttcgaacagacatgaccgatgtaacactgtatgaccgtgatccgaactatattccgcgcgtggccgccgtgcacgacatgtgcggctacggcaagtgctcgctgaccgccgcgattccgattctctcggccgccggctgcgatgtgtgcccggtgccgaccgccctgttctcggcgcacacgcgctatgcagtgttcacgttccacgacaccacggatattctctccggttacttggatgcctggcagaaggaagacgtggaactggatggcgtgtattcaggcttcctcggctcccccgatcaggtggcgatcattcagcgtctctaccgtgaatatccgaatgcgctgcgtctggttgacccggtgatgggagacgccggcgaaatgtaccccacgtatacaccggagctgtgcgaggcaatgggcgctctggccgatggtgccgacgtgttgatgccgaacctcaccgaagcgagcattctcaccaagcgtgactatcctggccagaatattgatgaggccacggttaacgagctgcttggtgctctgctgaagttgggtgccaagaacgtggtgttgaagggcatcgaccatggcgatggcaaaatcgtcaactatgtggccagcgcttccaccggtgttgccggcaagatcgagctggctcatgaaaagctgccatacatgattcatggcacaggtgacgccttcgcatctgccctgtgcggcgcggtgatggccggccgcggcctggccgagtcggccgaaatcgccggcgagttcgtgcgccacgccatggtcagcacccgtaaccagccgcatttcgaggatcgtggcgtcagcttcgaactgaaccttggcgaactcaccgatttggtgaagtgaccgcaccttggctcccctctccgctcactgggtctgacgtattcagcgaacaactcggcgggttgtctgtcgtcacaggtaagtcggctggggagccttggtaaaccttctgaactaatggtggataaccgggttttcatccacacgttatccacaacacgccaaaccgcgtcatagtatccacatttgccggttgcgcttgtgctcttacataagtaacccgcacagtggaatcatgaacgctttaccacctacccagccgacgacgaagtccggcatcgacgccggccttgcctttcaccagcccatgctggcttcacctgatccgcaggcaacgctgccttcggaacggattgcggccacgatgggcgaccgcaatctgacgcccaaacagttcggtgcgctcggcgagcagtatgccgccgcgtggctggaggaacacggttggacgaccttgagccgcaattggcatacccgttacggcgaattggacatcgtactgctcaatcccgagtacacggtggtgttcgtcgaagtgaaatcacgccggtccatgcattacggatatccgcaagaggccatcacgccggcgaaacagcacaatctcaggaaagccgcctgcgattggctgcttgaccggcgtaatcgtgtgccgcatacggcagtccgtttcgatgtcgtcaccatcgtgcttcgggtgggcagaccgctcgtgcatcacatcgaaaacgccttctgaattcgccccccccccaaaaaaacagccacgttgcgaaacacattgtgaaaggagtagacatggctatcggcagcactctctcagtcggactgatcggccttaaggccttcatcgtccaagtgcaggctttcatcagccctggcttgccatacttcagcatcatcggattgccggatgcatcgttgtccgaagcccgcgagcgcgtgaaatcggcgtgtcaagccactggattcggttggccgcaaacccgcgtgaccgtgaacatgagccctgcggccatgcccaaacgtggttcgtcgcatgatctggccatcgcggccagcgtcctatgcgcggcgggtgccatagggcatgattgcttggaagataccattgtgctcggcgaagtgaatcttgacggctcggtgctgccgattcatgggctgctcccgatcatgctgcatgccgaggaacgtggcgtgcgcaaaatgattgttccccatcgcaatcttgacgaggcttcgatggtggatggactggatgtagtgggtgtgaggcatgtgggtgagctcatcgaactgatgggcggcgatgccacctatacgattactgatacaccggttgccgacgagaccaccatggatcaatcgcccacaagccatcccaacgattgtggcgatatgaacgaggttctgggtcaggaacatgccaaatgggcgctgcaagtggcggcggcaggcggacataatctcatcatgaccggcccgccaggcagcggcaaaaccatgctggcctcacgtatgcccggtatcatgtgcccgttgaacgaggcggaacaactggaggtggcgtcgatacggtcgctgtgcggcatactgcctcagtacggcatcaccgacatgccgccgttcgaggcaccgcaccacaccgccagcacggcggccttggtgggtggtggcagcggcatcgccgttcccggcgcgatcacgcgcgcgcatcgaggcattctgttcctggacgaggcaccggaattcagcgcacgcgccctgcagacgttgcgcgaaccattggaatccgggtatgtggcgctttcccgttcaaaaggcagcacctattacccggcctcattccaactcatcatggcggccaacccctgcccgtgcggatactattacggcaccggcgaacgttgcgcttgccgggaaaaagaccgtattcgttatttctcgcgattgtccggaccgatattggatcgtgtggatattcagatggcggtgccaccggtctcgcgcattgccgtgcaaagcgagccaatcggcgagtccagtgccggaatacaagctcgtgtgattcgcgcccgtcaagtggccaaggaccggttcagacagtacggatgggtgtgcaacgcgcaagcttcgggaaaatggctgcacgccaatacgtcgctgaaagcgatggaattggtcaatcgggccctgtccaatcatcaactcacattgcgcggggccgatcgcgccatgcgtctgtcttggacgctcgccgatctggccggccgcgtgtcccccaccgagcaggacgtccatcagggcatcgaaatgagaacgaggatgacatgagtaacgctactgatatccgacaatctggcggcaccgcaggcagtgtggatcacaccgatacgggcctcgctgtttcgcgcaccattcccatgcctcccacggatacgttgtaccgcgccgcgctcacgttctgtcttgatggggcggatgtgatgatgtacgccacgctcaaaggcgcggaaagcgccgaatccctctggcacgcgttggcgcaatcccatccaagccagccatctggaatctgcggcccggcgctgtcacgcattgaccgcatgttcgtggatggcctcacccgatggggccgcaaggcgtcggcgaacgcgatgcgctccttccgcaatgcactggccggctggcataaccgcatgatggacctgccctcgcaagacatcatccaactggccgactggttcactatggatggcacgcaatggattatcggccccggccatccatgttggccctcgcagttggccgacctgtccattcgctccgattgggcgccaccgctgtgtttgtggatcaaaggcgatccacgcgcattgaccagttgcgccaaaccggtcggcatcgtcggttcacgggacgtgaccgaatacggccggtatgtggcacacaccgtagccgaacaggcagtcgttgccgggcatctggtcgtgtccggaggcgcaatgggcacggatgcggcggcacattggggagcgttgaatgcgctgcacggcagaatgcccgccaatgtgggcagaaccgttgccgtattcgccggcgggctcaaccatatcggaccgatgcgtaaccgcacgctgttcgaacgtatcgaggcgcagggtggtgcactgatcagtgaactgtgcccagggacgattcccgaagcccgtcgttttctactccgcaaccgcattatcgcggccatgtcttccacattgattgtgacgcaagcccggttgcgttccggagcgctcaacaccgcgggatgggcatgcgaattgctgcgcgaagtgtatgcggttcccggtgacatcaatcagccttgcaacgccgggtgcaataagatgatcggcgaccaccgggcgatgattctgtgtgccgccacatccactgaggatatatgccatgaacggcataagcccgttatggcggcatgcccaggcataccgaaatccacaggtcaggactcgtccgaaaacgaggaggccatggaagtgccggcaacgactccgttatcgccagcatcctcggaatcatcggcgtcacaggagtcgtcacaagattcaggtcattcgaaacgtcttaggaccaagcacactcagcctacgctcgttcaatccaaggatgggccggcgagcgcaactgccgaggccggtgccaacaagagcaagggtgaagagccgccctcgtcgcatcagatgccggatcttcgtgtcaagccgaagctcgatcccgagaaggaagcccaacaacgtatcattatcgccaagctgccggaaatggaacgcacattagtggcattgattcgtgaatgccgtaaacgacatctcatcgtcaccccggacgcactattgcgtgtggcgcgagagacggtacccgacgagattcccaatatcggcaccatacttgagctactcggcgcattggagctgaagggagtgatcgagcgggatgccggcatactcaagctgagcagccgtgtcggctaatcggctttcatgacacggctcgaagactgttcggcgggtgtgcgagaatcgaacccatgagtccgaaacgtttggaagatatgtatgatgcggtgatcgtcggcgccggagcggccggcctgtcggcggcgttgggactgctgcgctcccccaaaatcaccgagctcaaggaacaaggcgtggacccgaagatcctcgtggtctccaaactgcagccgctgcgttcgcacaccggttcggccgagggcggcatcgccgcgagcctgggcaatgtggagtccgatgactggcactggcattactacgacaccatcaagggcggcgactggctcgtcgaccaggacgcggccaaactgctcgccgaatacgcgccgcagaccgtgatcaacctggagcgtcagggcgtggccttctcccgtaccgatgacgggcatatcgcccagcgccggttcggcggccacacgcgcgagttcggcggtgccccggtcaagcgcgccgcctatgcggccgaccgcatcggccaccagattctgcacaccttgtggcagcagtgcgtggccgccggcgtcgagttcgccgaggaatggtatgtgaccgacctggtgctcgccgacgacggcaagcaggcggccggcatcgtggcatttgacacgcattcgggcaagattcaggccatccacgcgcgcaacgtgcttcttgccaccggtggcgcgggccgactgttccataccacatcgaattcctgggacctgaccggcgacggcatggcattggccttggccgccggcctgcagctggaggacatcgaatttgtgcagttccaccccaccgggctcgcgcacaccggcatcctgctgtccgaggcggcccgcgccgagggcggcatcctgaggaacgccgacggtgagccgtttatggaacgctacgccccggagcatagggatctggccgcgcgagacgtggtctcccgctccatcatggcggagatcgacgccggccgcggcgtcgccgacccgaaggacccggatggtccgaaggactgcgtctggctggacatgaccggcatcgaccccgaacgtatgaaggaagtgctaccgcaggtggtcgaaaccatcgagcagtacgcgaacctcgatccggccaaggacctggtgcctatcaagcccactgcgcattacacgatgggcggcatccccatcaccaccaatggcgaggtgtaccgttgggccgacggtgccgtgcaggtagtcgatggactgttctccgctggcgaatgctcttgtgtctccgtacatggtgcgaatcgtctgggcggcaattctctgctcgacgcctgcctgttcggtacacgtgctggtcagacgatggccgcacgcatcgtcgagaacccggttgactcccccatggccgatgattcgaccgatgacatgctgaccgatgccgccgatcaggctgccgattcccgcaaggcagagcttgacgaactgctcgccggaccgatggacgattcagacgatggcgggcccaccgccaatccttatcagctcatggcccaactcggatcagtgatggagcaggctctggccgtacgttgcaccgctcagaccatcgatacggcgttgactcagatcaacaacgacatcacaccggttgccgataccttgcgggcccatgacaagaccgccgctttcaatcaggaggtcaccgccatctgggaagtccgtcatctaatcgaactggccgaggccatgctgcacgcttccgaatcccgtcaggaatcccgcggatccatgcaacgacttgatttccccgaacgcgacgatgagcatttccttgctcactcgatggtcgccgatgatggtccggcaagtttcaagccggtgcacatcaccgactatccacccaagaagcgcgagtactgatccgctggtggtaataccaagccgcctagggcttgtggcacaataggttggctgatattggacttgacatcccactgtttcatggaggcagaacatggctgaggcgagcaacacgacggttaccctgcaagtgcatcgtttcacgccgcgccccgagcgcgccgaacgtgcacgcggcggcagcccgttcgccaagaaaagctccccattcggcggcggctcggattcggcggcacgccgtcgtccgcgcggcaagcagtgggtgcaggaatacacgattcccgcgcgcccctcggacaccgtgctcgactgcctgctgaccatcaaacgcaccgtcgacccgacgctggccttccgctattcgtgcggtcacggcatgtgcggttcggacgccgtggccatcaacggcacccccaccctgctgtgcacggccaccatccgcgattgggccaagcagcccggcgccatccccgaagtcgatgacgaagggttccggcacaccggcaccgagtccgaagaatccgacgattccgcggaaaacgacgcaaacgcggcagccgaccaggactcggccgcaaacggctcgctgggagtcatcgaactggcatccctgcccggcttcccgccgcagcgcgacctcatcgccgacatcgacccgatgctcaaccaaataaggaagctcaccccatatcttcaggcggacggcgtgctcgccaccaccgccgaaggcaaggtggacgtgttcgaatacctgcagaaccccgaacaactcgccaaatacgagctgctgagcaactgcatcgcctgcggcgtgtgcgaaggtgcctgcccggtgtacgccggcggcgacgctttcatcggcccggcctcgctgatttgggcctcccgtttcgtcaacgattcgcgcgacaccaaggccatggagcgtatggacgccatcgacaccgccgacggcgtggccgcctgccagtccgtgcgcgcctgctcccgccactgcccgcgcggcatcgatgtgggcgaggagatgtggcagatcgtggccaaggtccgcgagcgctaagccgcgccacgaccagctacggcaatcgctgcaacacgtagtcgatacatccaccgggtgcccgcacgagagaagacataaaggaacgaattatggacagaacgcagtacaccaacctcgccaaggcatgggaattcaccgaggaacacgcgcgcgaacgtgaatccaatgcgttgaccgacgcccgtacggccgccgacaagtccggccagttgcagggttcggccgcgcaggcccgtctgctgggcatgctggtgcgcatcaccggcgccgcttcggtcatcgccgtaggcaccggctcgctggtggagaccttgcagctcgcccatgcgctggataacaagggcctgctgactgcggtcgattccaccgctcagggcatcgcgctgattcgcaaggcgttcgccgaactgcaggatgagaccgacaccacgttgcgtgcggtgaacgccccggccagcgtgtttctgccgcgcctcaacgccaatgattacgatctgatcgtggtggcgggcgacgccgagaactatgccgccacgttcgcccaggcctcccgtctgctgcgcgcgcacggcgtgatcgtgttcaccgatgtgctggcgttggaggacggtcagggcggcatgattaatccggccgaccgcagcgacaaggccatcgccatgcgtgagctgctcaccaccgtcgaagatgacgaaggtttcgagtccacgctcacccctgacggcacaggcctgctcatcgcctacaaaaagtaactctgcccttggctcccctcggagaggggagccactctatctcgcttacctcacaattgcgctgacggccacctccacggcttcgtcggcgtcatcggtcacggtgaccagtttcgggtcgattgccgaaatcatgccgtgctcggccaccggaccgttgagccagtcaaagagcccctgccagtattccttgccgtagagcaccaccggaatattcgccaccttgtgggtctggaccaaggtcagcagctcgaacatctcatccagtgtgccgaagccgcccgggcacacaatcacgccggaggaatacttgacgaacatggttttccgcacaaagaagtaccggaagctcatgccgaggttcacccactggttcaacccctgctcgtgcggcaattcgatgccgagtcccacggatttgccgccagccagtgccgctcccctattcgcggcttccatgatgccgggaccaccgccggtgatgacggcgatgttgcgcttggctatctggctacccatgcgccgggccgccttgtagatcgattcggtgcgctgggtgcgtgcggagccgaaaatagagaccgcaggtccgagctcggcgagcgccccgaaaccgtccacgaattccgattggatgcgcagcacacgccatgggtccatgtgcagccagtcggtgtcctggtcgggtttcagcagattggcggtggtattgtccgagggaatcatctggccgcgtagaatcaccgggccgcgatgataggtgtcgcccagcggcgagacgtcctccaagtcgaccgggttcaccggcgttgcggcagcctcggttgccgtctcggcctccaacgttgccgcatcattcgcggctgtggcttccaatggttccatatcgtccacgactgtggacttggatgcggcctcggctagattctttgcttcagcggcctttttgccgtcgttcttcttggatttcttctgcttctttgccatccaatatcctcctgtacggtgctatcgactcttcgcattctagcgcctgaagctctgcatacgttttccgcgaaatcatccttgacttcgtgaagaacgtacggtgagtgacactcagcgtacggttttcacgaaataaggcctcatctcgtgaagaacgtacggtgagtgacactcagcgtacggttttcacgaaataaggccaacaatggagtagggatcgtctaagccatcagtggcggaagtcaatctccacactggcggtgccgtcggcgagggtgccggggtgttccgtgggcgtggtggactttgtggtgcgaccggtctgaccagcgccatcgccatcaatcgattcgtcatcctccgcatcggccgctacttcggctgcggccttctcgaatctcttggactgacggctcagcagcacaccggaaatcgcggcggcgatcagggaggccaccagcacgccgaagcgcgcctcagcggaaagttccgcattcttgtacgccagcgaggcgatgaggaaggacacagtgaagccaatgccgcaggcgacggcagcgggaatcatgtcacgtacgcgcagccccttggccatcttgagcccgcccacatgcgtggccagccatgcggtggtgatgatgcccaaaggtttgccgaccaccaaagccacaatcagtgcgataaccaacggcgaagccagcaacagcgggctcaccgactcgaagtgcacgccggtggcgaacagggcgaagatgggcagggccagcagtgcggagaatggctgaagcttgttggcatagcgttcggcacgcggtgaaagttcgccgtgcatttcacgggagggagtcagcaggccaaccagcacgccggccagtgtgggatgcacgcctgcctcgaacatcatgatccaagcgaggacgccgacgatgccgaccgcaatccacggcacttttttcagtcgtacgaggtatgcccagatgacggcgcacacgacgatgccgatgaaccaataccaggcgttgatcgaggagaagaatacggcgatcagaataatggccagcaagtcatcgacggtggcaagcgtcatcaggaacgcgcggatcgaaccgggcagggccttggcaaacagggcgagcacggccagtgagaacgcgatatccgtggcggtgggcactgcccagccgtgcgacatctccgagaacggaatgctgctgccggtggtggtcagaatcagcgtgccgggttcaccaggcccgatctgagagaacaatgccgtgacggccaggaacaggatgggcggggcgatcatgccgcccaccgcgcacagcatcggcacggcggccgccttcggattggcgagcgagccggtggtgagttcctgcttcagttcgaggcccacggtcaggaagaagatggtaagcagaccatcctgggcccaatggccaatcggcaggtcgagattggtgtaggggatgaacagatgcgtttccgcgacggtctcgaacgcatgcgcggtggcgggcaggttcgcgagcaccaggccggtgagcgcgaagccgagcatgatgagtccggaaatacggtctgaggcggcgattcgcctgatggtggaccaaagtcccttcttcgcgccggcggtcgtggccatcgcgtctccttgctgtactctcttggatgaaccgtatgtaatagtacggaatatctcaggacgttccgctccgggctgagtcgcgaagggcaaccttaccccacccctgtgtggccgactcaaacgggccaatacaattggaaaagcctcggaagcatttcgctttcgaggcttactgtgcgccagacaggattcgaacctgcgacctgctgatccgtagtcagctgctctaatccgctgggctactggcgcataccactgttgtccccgtggttcgggagtgcgccagacaggattcgaacctgcgacctgctgatccgtagtcagctgctctaatccgctgggctactggcgcatgttgtcttttcagacaactcgatatataatacacgccgttcagatgaatgcaactcggcgtgttgcggcgagtcgcaccatcctaatcgccaccgcaacggcgtatttactggcctcacgccgcatgtgtacggactcggtcaagcaaaaccgactacgcaactttgaggcgtccctgcggcacatccacggcttcgcgcaagagtttgggcgtactggaaccctctacggacgccttgtccacaatcacctgcttcacatcatccaaactcggcaactggaacatcgtgtcctgcaacgtacgttcgataatcgaacgcaacccgcgtgcgccggtcccctgcttgatggcgatatcagcaatcgcccgaatggcctgttcggtgaactgcaggtcgacgccgtcgacggcgaacagcttacggtactgcttgatcagcgcgttggctggctgggtgagaatcgccgtcagatcgtctacggtaagttccttcagcacactggtgaccggcaaacgtccgatgaactcaggcaacagcccgaactcggccagatcatcggcattgacctgttcgagcaattcctcgtctttcatgtcggcgtcgtgccaattcgcgccgaagccggtctctcgacggcccaatcgcttgcgaacaatatccgtcagtcccacgaacgcaccgccgcagatgaataggatgccgcgtgtgtccatctgcgcagtgtcctgctccttatgcttgcgcgtgccctccaacggcacggaggcgatggtgccttccaaaatcttcagcaacgcctgctgaacgccctcaccggacacgtcacgggtgatggaggtgttctcacctgatttgcgcgcgatcttatcgatttcgtcaatgtagatgatgccgtgctgggctcggcttacgtcgccatccgcggcttgaagaagacgttggagcacggtttccacatcgtcgcctacatagccggcctcggtcagggtggtggcgtcggtgatgacgaatggcacgttcattacgcgggccaacgcctgtgcaagataggttttgcccacaccggtggggccgagcaacagaatgtttgatttggcgacctcaacgtcagccaaagggtcactgttgcggcgggtagcacgcgtctgggcgggagcggattgcttggcttgtttgccggtctggccaccgtgcccgttattcccgtcaagctgctcagcggactcctgaagctccatattgacgcgtttgtaatgattgtatacggccacggacaatgcgcgcttggcgttctcctgaccgatgacgtagcggttgagataatcgaagatctgagcgggcttgggcaggctcagcgaattgacctcggcatctttgacacgctcctcggagatgatgtccacgcacagggcgatgcattcatcgcagatggaggcgttgggaccggccaccagttttctgacctgacgttcggttttgccgcagaacgtgcaacggggtacgtcctcgttgtagctcaccacacgtcccatgattctcctttgccgaccgcgccgcaccgtcgaaccgccacgctgcgcattatcattgtcatccttgaaatacaatacccccggtcgttgccgaccgagggtattgcaatgttcggaagttttactggcggtgttccagcacctcgtccacgatgccgtattccttggcttcaggagcggtcaggaaagtgtccacttcgatgtcgcggcgaatcttctcgacatcctggccggtgtgcttggcgagggtctcctccagccattcgcgcatacgcagcatttccttggcctgaatctcgatctccgtggccttgccgaagccttggtcgatggccggctggtggatgagcacacgggcgttcggcagcatcaggcgcttgccctcggtgccggaggccagcagaatggcggcggcggaggcggcctggccgagacacacggtctgcacgtcgggcttgatgtactgcatggtgtcgtagatggcggtcatggccgtcatcgaaccgccgggtgagttgatgtacatcatcacgtcacggttcggatcctgggattcgaggaccagcagctgggccatcacgtcgtcggcggaggcgtcgtccacctgcacgccgaggaagatgatgcggtcctcgaacaggcgggagtaggcgtcctgggtcttcatgccatacggggtcttctccacgaactgcggcatgatgtaacggttggtcggcgcgggctgggctgcgcgggcggcggccggcatgaaaccggctacgccatgacggccggccaagcggtcggcacgggcggcgaactttgcttcttcacttgccatgagtctcactccccctgctggttgttgccgatggtgtccggcgtggtcacgagcttgtccacgaagccatagtcgagggcttcctgggcggtgaaccagtggtcgtattcgttgtcgcggtagatctcctcgagggtgtggccggtctgctcagcggtcagctcgctcatggttttcttcatgtccatgatgagctcggcgttgatgcgcacgtcagtggcggtgccgccgatgccgccggaaggctggtgcatgagcacacgggcgtgcgaggtcaggtaacgcttgcccttggtgccggagctcagcaggaactggcccatggaagcgcacatgcccaggcccacggtcgccacgtcaggctcgatgagctgcatggtgtcgtagatggccatgcctgcggtgatggagccgcccggcgagttgatgtacagccagatgtccttcttcgggtcctcggcggccagcatcagcagctgagcgcagatgcggttggccatatcgtccttgacctcttcacccatccagatgatgcggtctttgagcagacggttgaaaatcgggtcgacggggccggccgggacgtcatcgcccgccatgaccggcaaggtcgcaaaggtattgctcaccttgattctccttctaattactcgaacattgttcagactaccgccttgaagcgactgaaggcggcttttcgcgtgctttttggcgggtagcgtagggatttcgggttattccaaggtgtcgaggacgtcatcaatgaggaggcgggtctgggaggcggcatcgtcgcccagacgcgggaagcgacgggcggcattggcggggctggcaccggcggctcgcgccacgttggacttgctggcaccatgggccacggctttttccgcgagccgatcgaccagtgaatcggcgacttggcgcatctgttcggccacccataattgggccatatccgcaggcaagtcgtagtcttcggccacatcgctggcggcctcctgaatggcggcccacaacaccatgaatggctttcgatagtagtcaatctgctcagtgagcggctcagcggcaagcgattcaagtgccgcacggacttcggtgttttctgacatagctttctttacctcggctcccctcagtctcactgtgttcgacagctcccctcagagaggggagccagaatatatgcatctacttacttacgactcagcaaccactttgatatcaacgacgacgtggccacggccatgccgactggcacgaagaaggtaatcggcgcttcggtcagctccatcaccaagcacatggccataagcggtgcctgctgtgaggccgaaagcaacgaagccgcaccgatcaaggcacacgcggttaccgaatcagtcggaaacatcagtatccatacgaggccgagcatcgcacccagcgtggaacctaatgcgatgccgggctgcagcacaccgcccgatgcaccggagcgaatggtcatcagcgtcaccagcgccttggcgacaaaggtgagtgccaacacacccagcaacatccagatattggactgggacagcgggaaaccggcgttcatcacggatccagaagagccgctcccaccctgaagcatggcccaaaacgaggccattccagagcccgctcccccgccagaggccgaatcggatacattaccgccgcccgtcagcaagttccatggagaggcggccgctgaagatgccgactgcatggcaccagcagtgccggcggtttcaggaatgaacgtgctgaatccaagttgcgctgcggcacggccgttgcccatcacctgcggcacaacaatcgccaccaaaccggtgatgagaccagccagcggcatctgccacggaatggccttgccggtcggcttgtgcgcttccgcccattgcgaaccttttcggaacaatgcgccgcccactccacatgccgcaccgcagatcagagcgaacagcattaacgttggcgtggattccggttgcatggcggtgatgtcgtagaacaggcaatgccctttgatcgcaaccgccacgaatgcggcaatggcagacacgcccagtccaaacgcaaccttttcgatcgtcacatccaccaacaggatttcgacggcgaagaacatgccggccagcggcgcgtcatagacgcctcctagaccggcaccggcagccactgccaccaccatgcgccggtcgataccatcaacgccctcgatatggaacaggtcgcaaaaacgttgcgcgatcatggcgccgagttcgcgtggggcgacttctcggccgatcgaggcaccggagccgacgatgaaaatctgcaacaccacatgcacaatggtttgccagaaaggcattcgctttcccgccacggccttcttgactgagggcaccacagtcgttttgtgtcgtagcagataccagataatgcccgcgatgccgagtcccacggtcaccgatatcacacggcgtgcagcgggcacgccgaatggaccagacaattctgggccttcgatgtagccgagcagcacatgttcaacgccgtagagcaacagggtcagcagacctgctcccacaccgatgagcacgccgagcacaatggtcgccgcagcgagccaaccaaggcgtttgatagtaaccgttggctgcatgtcaacctccgcacgctatgcaacgagtatgccttgggaactcccctcagtctcgctacgcccgacagctccccccaaaggggagccaaagaaatagtccttttaccagaataggaagagcccggaaccgtgaaacacgattccgggctcaaacaatcacgctaacgcgatgaggctatgctcactcagcgtccttggcgtcatccttggcggacagttcgtcggccacggcggcagcagcggaagcggcctcgacggactcggactcttcgtcctcagcggcctcgcccaggaagccggagaggtccacaacctcgccatcagcggtgaacttgacggcgcgcatgccggcgagcagacccttggaacggccgacttcctgcacagcggagccaagctggccattcttgatgatggcctggatgaagttgttcgggtccatgccgtactgctgggcgatggaagcgaggaagttgaacacgtcggactgggacacctgaacgtccagcttctcggccagagcgtcgagcaccatctgatcgcgcagatccttctccacggtctcctcggcctgagccttctgctccttggtggccttctccgggtccggggtcatgcccttgagctgctcttcgaccatgttggccttgacacccttcggcaccgggatctcgagaccttcctgcagcttggcgatgaaggcatcgcgagcctcggtggcctgacgaccttcggcgtcctgagcggcagccttgcggatgtcagccttgagctcgtccagagtgtcgaactcggaagcttcggaagcgaactcatcgttcagctccggcagttcctcagccttgacggagttgaccttgaccttcacggtggccttctggccctcgtgctcgccggcttccagcgtgccttcgaaggtggtctcctcgccggcggacaggccgtcaagagcctcgtccagaccgtcgagcatggtgttggagccgagctcgtagctcacgccttcctgggagtcgacggtctcgccgtcaatctcagcagtcaggtcgatgttggcgaagtcgcccttggcggccgggcggtccacgccgaccaaggtgccgaagcgctgacgcagggtctcgaggcgcttgtcgacgtcctcatccttgacttccggcttggagatggcgatctcaagaccgtcgatttccggcagttcgatgtcaggacgacgctcgacggtggcggtgaacttcagcttggtctcgtcgttggcggactgcggaacatcctgcacgtcgaactccggctgagccatcggacgaatcttcttctcatccagggccttggagtacagctccgggaccgcgtcgttcacggcctcaccggcgacggcggcgaaaccgatgcgctggtcgatgatcttgccgggaacgtggcccttacggaagccgggaacgttcacctgcttggcgatttccttacgggccgcatccagatacgggttgagctcttccggttcaacagtgacggtgagcttcaccttggtgggctcgaggttacgaacgctgatcttcacgctaatgactcctcaaaagtcgttatttcttacagttctgccgtaaggcaacctctacatgataacgccacttacggacggtgcaatgagtttcacctgccagtttcttgcgccctgctcgatcaggaacgtctcgacgtccacttccaccgggtcttccacccagcacaggttgcgtaggatctgtggcttgatgatcatctcggccggcgtgcgggtgtcttcggcgatgcggttgatcacacgccgtacccgctgcagacggtcataacgctccggatggcgctgttgccacagtcgcatggatcggggcgcgttcaccacaccgttttcgtcctgttcgggggcgggcatggtaggccattgggtgggcttcagggccatggcgcggtcgatggcctgcttccagaccttcggcttgaccgtacgctgaatcggcgcgtaccgctcgaacattttgtcctgctcggtgccggtatgaatgcgcacacgctcgttcagggatcggagtgcgcggaattgggcggcattgtgcggcttgttggtcgcggcctcgatgattgacgaatcggtcaataacaggctgggagcgatgtcgtatcgccgggcgagccggtcgcgctcctcccatagggatttggcgatggccaagcccctcggatcacgactcagctgggtgatgcgcgagatacgcagccaaggaatcggatgaggtttgcgcggggcaaggcccgcaaccaaagcgtgagaaaactcttcagcggcccactcgtccttgcctgcggctttcaggtcacgacgcatcaaggtttcgagttcgataagcacctccacgtcgagcgccgcatagttgcgccagtcgcgcggcagcggacggtaggaccaatcggcggcggaatgctctttggccagcgtgatgccgaggtagtgttcggtgacggcggccagaccgaagcggtgcaggccgagcaatcgcgccgctatttccgtgtcgaacaaggccttgggtttgagtccgatttcggcgaatccgggcaagtccatcagagaatcatgcagaatccatgtagcatcgcccacggcgtcattgaattcattccagtcagctccggcccgtgtcagggcgacgggatcaagcaaggcgatgcccgcaccttcacgtttgaactgaatcagccaatcctcatgtccatagcggaatccggacgcccgttcggcgtcggcggccagcgagcctgtcgcctcggccagcgcatcgcaggctcgatgatagccatccagcgacgaagtgacatcgggcactcccccgcgaggctctttcagcagtcggggttcggtgtcacggacgtcactcaactggcgtcatcctcctcaaaacggatggtggatctgatgaatgcggcccacgagcggatttgtgcgccggcgtccatagtaccgtccggtccggtcccgtcaagcggggtccatgagacgcgaatctcacacccggcgctggtggagccggccatcgaaccaaaagccgtgttttgggtcacggtgactgtgccggataccgaatccggctcgatgccgtcgaaatagtcgcacatgtcatcccagtacatgccgggggtcagagaatcgttttcggcggtttccagcggcagccgcgcgaacgccacgcaacgccagttggaatcccggtcaatgcgcagctcatgagcataaagcatcatgatccagcctgtggcgattcgtgattcggcatcgttgccaagaccggcggaaaaggcatcgccgagggcacgctctcccgcttcgaattccacgccgataccataatcggccaaggtggaaggcacgggaatctcccgatagcgcacgtcatggatgcgcttcatggtgctgacggattcgacagctgcccatacttcatccggcacaccctgagggcgtacggggcgtccatcgttggacgctcccataggaaatgcgtagatgtcggccatatctctagggtatgggcgaacgggccgaatcgtggtatttacgcgcggttcggccctgcaatttaaaacacggtgaagccgtggtccttgaactggttggccacccgcgaacgggtggcggcgttgggtcccttctggttctccagcgggtatgggatgcgcagttcgtgccacttcgggcggccaagctggtggaatcccagcacgtcgatgtgttcgacggcatcaccgaaggactcgcagatcttcgccacgttttcgacgttctcttcggagtcggtcaggcccggcacgagcacaaatcgtacccagatcttcttgccggccttggccagtcgctggccaaaatcgatggtgggctgcaaggtgccgccggtgaccttgtgataggtctcctcgtcgccggatttgacgtcgagcagacacaggtcgatgtcctcgagcatctcgtcggtgtagctcgtgttgaggaagccggacgtatcgaggcaggtgtgcacgcccatctccttggcggcatggaacacacgcgagacgaaggcgggctgcatcatggattcgccgccggagaaggtgataccgccatgcgtggccttgaacaggtccttgtaacgatcgaccttcttgatcatggcgtcaaggtagacgggcttgccgtcgcgcatcttccaagtgtccgggttctggcagtactggcagcgcagcgggcagccggacatgaatacggtcatgcgggtgcccggtccatccacggaggtgttgatgtcccaagagtggacgaagccgatatcgccggatttcagggcggaaaggcggtcacgtcggtcgagtccgattggggattcaaagccggaaaggccgcccatcaaagtctgcgaggcataggtcttcgattccttgagcatatgcctggtcgtggtgcggaacgtgggtgttgcgggcatagttgtcctcctgttccaaatgatgcgaaagtctgtggaaaataaggaaggggtggagccgtgccccaccccttcagttagtcattgccgcggttcgcggggttggtcatcagtcgacgacggcaccttggtggaaggtacgggagatgacgtcgagctgctgctccttggtgagcttgacgaagttcaccgcgtagccggagacacgcacggtcaggtgcgggtacttttcggggtgctcgacggcgtcctccatggtctcgcggcgcagaacgttgatgttcgcgtggtagaggccgtggccgttgcccgcgtccaggatgccgaccaggttgccgatgcgctcggcttcatcgcggcccaggccatcgggggtgatggtgttggtcagcgagatgccgtcgagggcgtcgttgtagtcgatcttgccgacggagaacatggacggcagcatgccgtgcgagtccatgccgttctccgggttggcacccggggcgtacggggtgcccttcttgtggcgggacgggaaggaaccggtgttcttgccgtactccacgttggaggtgatggtcaggatggactgggtcgggacggcgccacggtagacgggcaggcgcttgacctggcccatcacggtggagacgacccacttggcgatgtcgtcggcgcggtcgtcgtcgttgccgtagaccgggaactcgccctcggtgcggtagccgacgaccagatcgtcgtcggcgccttcgacgtactcgtactcgtggccttcgaggttcttggcttccttgttggtgatcgggtacaccttggcgtacttgatggcggacagggagtcggcggcgatggacagaccggacatgccgcaaccgagggtgcggtacacctccttgtcgtgtagggccatctcgatggactcgtaggcgtacttatcgtgcatgtagtggatgatgttcagcgcttcgacgtaggtttcggacagccactcgagcgccttctcgtagttgttcttgaccttctcgtagtccaaggtgccgtcggcctccggggcgatcgggtcgatgacgcccttgtcgatgacctgcatgccggtcatctcatcgcggccgccgttgatggcgtacagcagggccttggcggagttcactcgggcggcgaagaactgcatctgcttgcccacgcgcatcggggagacgcagcatgcgatggcggcgtcgtcgccccagtgggaacggatttccttgtcggactcgtactggatggccgaggtgtcgatggagatcttggcgcagaagcgcttgtagccttctggcagcttcggatcccagaagatggtgatgttcggctcagggccaggtccgaggtgctcaagggtcagggtgttgagcagacggaaggaggtcttggtgaccatcggacggccatcgtcgccgaagccggcgtcggaccaggtcgcccagtacgggtcgccggagaagatgttgtcgtagtccttggtgcgcaggaagcggacgatacgcagcttcatgacgatgttgtcgatgagctcctgggcgtcggtctcggtgatcttgccggcctcgaggtcgcgctcgatgaagcagtcgaggaaggcggagttacggccgaaggacatggcggcgccgtcctgggacttgatggaggccaggtagcccatgtaggtccactgcacggcttcctgggcggtctgagcagggcgggacaggtccaggccgtactcgttgccgaggttgatgagctgcttcagagccttgatctgctcgtcgtgctcctcgcggaagcggatccagtgctcgatctccggctcggtgaagtcgttgcggtacgggatggagtccttgtcgcgcttcttgaaggcgatcagcttgttgacaccgtacagggcaacacgacggtagtcgccgatgatgcggccacggccgtaggcatccggcagaccggtgaggatcttgttgtggcgggcgaccttgatgttcttggtgtagacgccgaacacgccgtcattgtgggtcttgcggtacttggtgaagatcttcttgatctccggatccggctccttgccggcttccttgatggcctgctcgaccatacgccagccgccgttcggcatcatggcgcgcttgcagggcacgtcggtctgcaagccgacgatcacgttgtcgacttccggggagtcgatgtagccggccgggaaggcatcgatgccagccggggtgtgggtgtccacgtcgtagacgcgctgcttgcgctccacggccaggtagttgtcgtcgaggtacttccacaggtgcttggtcttctcggtggcaggagccaggaatgtctcgtcgccctcgtacggggtgtagttcttctggatgaagtcgcggacgtcaatatccttctgccagttgccctcggtgaagccggcccacgccttggcgtcaagctcctcttgggagacagctgcattttctactgcggtcatgtcactccttaaatggggttgtaggtttcgcatcttcacggaacccttggttcaacagtgtagttggcacttgcttgggaaaagccgaaattgggagtgagctatctcacattgttttttgtgaacgctaccattccaatggtttctaggtattgatggggctattgcacgtctccagatatgggaaaccgctcatactgtgatgttcgtatgagcggcttggtgagcggttcggtcttgagattgacagcagaaccgtatccgtctgttttggccgtcagtcttcatcgttcgcttgcgcggatttcacaccgtagttcttccagcgccagttctcctcctcccatctggcgttgcggtccaccacgatgtcccaggcgtgttcggcatcttccttggtcttgtacggacccatgcgctgttcaatcggtgagaccatgcccagctcggcctgcttcttgacggtgttgaaataccactgcttcttgttatcgtctgtcattggtacctcctcaacggtattacttgctcccgctggcgggagcaatatatgtttattccctgaacgcgttggtgacgggcagtcggcggtcgcggccgaacgcgagggccgtgaccttcggtcccaacgggtattggcggcgcttccattcggcgtggtccaccaatcgcatcacagtgtccacggtggcctggtcgaagccgtcggccaacaggtcggcgcggccgtgcgcgtgctcgatgtatgcagcgagcaccttgtcgagcagcgcgtattcgggcagggagtcggagtccttctgcccggggcgcaactcggccgagggagccttctcgatggatgagaccggaatcatcacgccgtccttcaacgggatgccggcgttgccgtcctcgttgcccacgatcttgagcccgccgataccgacgcctgcggccgcggccttgttacgccaacggctgatctcccagacacgggtcttgagcaggtccttgatgggtgcgtagccgccgaccgcatcgccgtagatggttgagtagccgcaggcgagctctgacttgttgccggtggccacggcgagcaggccgcgagaattggaactggccatcacgatcacaccgcggatgcgggcctgcaggttctcggcggagacgccatcaaggtcaagttgctgttggtaggcgttgaacaatagctcaataggctggacctcgtaatgggcaccgatgttggaggccaggtcagcggcgtcgtctttggaaccatcggaggagtacatggagggcatggagatgccccagacgttctcgccgccgcatgcgtcggccgccatggcggctaccagtgcggagtcgatgcctcctgagaggcccagcgtcacgccggtgaagtggttcttggccatgtagtccttgaggccgagcacgcaggcagtgtatacctcttcgtccgggtcgagttccggaacgatctcggccttgacctgatgttcggcggtggaatcgaagtcccagaacgtcaggttttccatgaacatcgggccgcgttcgataagcgtgccgtcggcatcgaccacgaagctgccaccgtcgaagaccaggtcgtcctgaccgccgacctgattcaggtagatgaccggggcgttgacttcggcggcacgacgctgggcgagctcgaaacgggtgttggtcttgccttcctcatacggcgagccgttgatggtgagcagcaggtcgatgttcttggtggccaggtcggccaccgggccaccatcctgccagatgtcctcgcagatggccacgccgatggtggcaccatccacgtcgagggtcacggaacggtcgccggcggagaagatacggaattcgtcgaacacgccgtagttgggcaggaagtgcttgtcgtagccggcccagaccacgccctgatgcaataccaccagtcggttgcgcggcttggaggtcttacgatcagtgcccacggtgccaaccaccacgaacagattgccgaggccgtcgtcgttgagctgggcggcgagttcgttggccttgtcccatgcggcttggcggaaggtgcggcgcagggccagatcttcgatggggtatccggtgagggtcatttccgggaaaacaaccacttgggcattccctgcggcggctttacgggagtagtcgagcactttggcggcgttggcatcgagcgcgccgacgcaggtgtcgatctgggcgagtgcgaagcgaagctgtgtcatagcttcttagtgtagccgcgtatggcgtcggattgcctgttcttccggcttggcgtcattcattaggtcgtttttgcgttcattaggtcactgcaatgcgatatcagtcgttgcaatggcgcgattccaacaaccagtatcgccgttcaccgacctaatggacgatgaatcgacctaatgaacgaatgccactcccctcagtcagcttcgctgatagctcgtcctgcacttatggacgggcgaggcccgcgcatatctggttcggctgtcgcctcactttcggctgcagacagcccattgggctgtctgcctaacgcctcagcctccagaggggagccaaaaaaggatttacctcagctcgttgagcacgcgcagggcggcgttgacgtagaagttgacgaaggtgggaatggattcgtcgagacccacgaaatgcgggctatgccagtcggcgcaaccttcctggccgtttgacccgacgaacgcgaacaccggcaacgtcaccttggcgaattcgcagaagtcctcccccgccatcgactgacgtatcggttcgagctgcgcgtagtcgttgacatccgccgccacggccttggcaagacctggatcggagaccagcgggtcttggaaatcatcccagaccacatcggcgctgataccgtatgcctcggcggtgtgttccaccacttccttgaatcggcggccgaccagattgccatccgacttgtggaaatagcgcacagtcccttggaatccggcttcggcgggcaccacgttccacacatggccgccgtgcacttcggtaacggacagcaccagcgggtggaagggcgtgacgttgcggctcacgatggtctgcaggctcagaataatactggcgagcgcttcgatgggcccggtgcccttgtacgggtagccggcgtgggtgccttgggcgtggagggtcacgcggaatttcacgcagccggccatcatcggctcgacgccgatggccagctggccggacgcatagttggggttgttgtgcgtgccgataatggcttcgacgtcatccacgagtccggcgtcgatcatggcgcgagcgccttggccggtctcctcactcggctggaacagaatcttgattgagccggcgaacttgtcacggtgctcggcgagccagaaggcggcaccgagcagaccggtcatgtgcaggtcgtggccgcagccgtgcatcacgccttcattgacggagctgaactccagtccggagtcttccacgatgggcaggccgtcgatgtcggcgcgcagcccgatacgcggcccgggaccggcctcgccctgaatgagccccacaacaccagtctccagcgggttgtgcaggatctcgatgccgtgcgccttgagctggtcggtcagatagatgctggtgtcgaattcacggaaactacgctccggatgggcgtgcaggtagtggcggatggtgatgagttcgtggtcgatgtcgatatgttcactcatggttcccgattctagtagcgcgaagaatatattgcggccctcgcttcatattggcgagggccgcgatctatggggtcagtatgccttgttattgctggcgtttgagcagtcgtttggcgatggcgttggcgatgccctgcaccacctggaccagtacgatcatgatgatcacggccgtccaggtgacggtctggtcgaacttctggtagccgtaggcgatggcgaagttaccgagaccgccaccgccgatgtagccggccatggcagacatgtcaagcacgccgatgaacaggaaggcgtaggccaggatcagcggtgccagggcttcggggatgagtacggtgcggatgatggtgagcttgccggcacccatcgaacgcgcggcctcgattactcccgggtcgaccggcacgagattctgttcgaccagacgagaagtggcgaaggtgcacatgaccaccatcgggaagatggcggccacggtgccgatggacgtgccgaccacgacgatggtgagcggctgcatggctgccaggaaaatgatgaacggaatcgggcgcacgatgttgacgatgatgtcaaggatgcggtagacgaccgcgttctcgaacaggttgccggggcgggtgccatagagcaccacgccgaggatcaggccgaggaatccgccgatgacaagggtgacgagcaccatggtcagggtctggccgatggattcgaacaatagtgggcgcagcacgttccagtcgctacgcgagttggcgaggatgatcatgcgttgtctccttcatgtgcggcggcggatacagcgggcgcggtggcagtatcggccgccagtgggtcatgggcgcggtcttcggcgtaggaggcatgtccggcaactgcgtcggcgtaagccacgggctttgcggcggtgccgaagtcaatgacgtcgctattggcggcgagctcgcgcaggaattcgtccacgtgccagccgggcccgttgaattcgtaggtgatggcaccgatggcggtccccttgaccgtgtcgatgccgccgtagagcaggctggattcgacgccgtatttggcgatgagttcggagatgttctgtccggatgccttgagttcgtggccatggctgccggaaacgtccttttggcggatgagcacggtgacgatgcggcccgaccattcgtggtgcaatcgctcgacccggtcttcctcgggcaggccggacagggcggtggcgatgaatcgcttggtcaccggctgctggggcgcggcgaacacgtcgtatacgtcgccggattcgaccacgcgtccggcgctcattacggccacgcggccggcaatctgctggaccacgttcatctgatgggtgataagcacaatggtgatgccgaattcctcgttcacacgcttgagcaaggccagcacttcggtggtggtttccgggtcgagcgcgctagtggcttcgtcggcgagcagaatctccggattagtggccagtgcgcgggcgatgccgacgcgctgcttctggccgccggacagctgcgaggggtatttgtttgcgtgctcactaaggcccacgaattcgagaagttcgttgacgcgacgatcctgatagtccttgcgccagtgatcgagttgcagcgggtaggcgatgttctgcgccacggttttggtggagaacaggttgaactgctggaaaatcatgccgattttctggcggatgggccgcagcttggtctcactcaaagaggtgatatcggtgccgagcacggtcacggtgccggaggtgggtcgttcgagcgcgttgataagccggaccagtgtggatttgcctgcaccggaatagccgatgatgccgaagatgtcgccgcgatcgatggtcaggctgacgtcatccacggctcgtgcgatgttcgcgccgcgtccgcgtgttttgaattccttcacgacatggtcgaaggtgatgatggggtcgctcatagtgctccctgatgctggttgttgatgtccggtcacggaagcggagcgaatcccgattgttggctcgggtactcgctccgcttggtggtaatggctatggacaggttagtcgtgcactcgtatcagccacggctcactgctgggctttggcgtccttctcaatgtcggacaggaagccttgcagctcgctggcgctgaacttgtcggcgaacaccgcggtaccgccggagttctcctgcagggcgtcgagcacatccttctgctggtagatggaaacgagcttcttgtaggtctcgttgttcacgtccgccttgcgggccacccacacgttgatgtaggggcgagcttcttcggattcggcgtcatcctggtagatggcgtccttcgggttgagaccggcgtcggccacgtagtcgttgttgatcacaccagcggcgatggtcgggtccttcagggtggtggccacctgttcggccttgagcggggtgaccttgaccttgctcttggcttcgtcgatgtcggccggagtggagaaggcggtccagtcgcccttgagcgtcacgagaccggcggccttgagcacgccgatagcgcgggcctggttggtttcgtcgttcggaatggtgacggtgtcgccctgcttcaggtccttgatgtccttgaccttggtggagtacacgccgagcgggtagatggcggtgccgccgatgggctgcaggtccttcttgttgctcacgttgtagttggccaagtagagcaggtgctggaattcgttgaggtccagctcgccggagtcaagggccgggttttcggaggtgtagtcctggaagtcgacgatgtcgacgtagatgccggccttctcggcgtcctgcttgaacttgacccattcggggttggtagcgccgaccacgccgatcttgaccgggttgcccttgctgcccttggcggacgactcgttggcaccggcaaacgcgcggtagccgaagaacgcggccacggcgataatcgccacgaccacgatggtgatgatgacgttgcggacggtgtggttcacacgcaccggctcgttattgttaggagcggccggagttgccgactgggttgctgctgtcattggatttcctctctccaaaattgatgtcgggtaacaccataacgcgcttgaaccgcgaaagtgacggaaaatggccgattgccgtataggtgtcttttatggcgcgcatgcaatggccgggattcgtgcgtttgataacccgctataggcgtgccgaacacgccggaaagcacgtcgagaggggctttgacaatggaagctatgactaccgatactgccaatgccgatatccgagccgtattcttcgatatcgatggcacgctcaccagtttcacgacccatacggtgccggattccacaatcgaggcgattcaccggctgcaggccgcaggcgtcaaggtgctgatttgcacgggccgcgcgccttcacagatgcacgtggtgctggataccatgccggtgacgttcgatggcgtggtggcgttcaatgggcagtattgctttgatgacaccggcttctttgcctcgcaggccttggatactgctgatattgaggtgattctcgactggctggaccgtcaccccgatgtggtgtgcaatttcggcgagaaggattacgtgtacttcaaccagtccaatgatctgcttcgcgccacgtggagcaaactgggcaaaaccgcaccgacccggtattttgaggacccgcgcacccgcgcgctggatcatgagactttccagatcagtccctttgtcggacccgagttggaggccgaactggtgggactgtgcagcaatgtgcgcggggtgcgttggcatccggatttcacggatctgattccggccgatggcggcaagccgcgcggcatccagcggttcatggcgcattacggcatcacgcgcgggcagaccatggccttcggcgatggcggcaatgacacggatatgctcgcctacgccggcatcggggtcgcgatgggcaatgcgaccgccgagccaaaggccgccgccgattacatcaccgacgacgtggaccacgacggtgtgcgcaatgccctactgcatttcggggtgctacgcgattattgatgccgtagcgcctcgaccgggtcgagctttgccgcgcgtctagctggatagtagccgaaaatcacgccgacagcgatgcagatgcccactgccagtccgatggactgcacggaaactgctggcgcgatactcatgccaccggcgatgccggacaccaatccagcggcacccaacgacagcaagtagccgatcaacgtgccgataagacctccaagcactgtgattgcaatggattcggcgaggaactgcgcggtcacgtcacgccgagtggcacccaatgcccggcgcaggccaatttcgcggatgcgttcggtaacgttggtgagcatcatgttcataatgccgatgccgcccaccagcaacgagaccccggccaccgaacccgccagcacctggaatgcgctcatgaagctggaaagctggtcgatggaggattgggcgcttacgaccgacagattctggtcgatctgttcggttgggatacgcatgatgcgagcgacaacggtcttcgtctgttccgtgagctggtcgatatcaaccccgtccttggccagtccgtagatctgcatgtatcccatgttcgaggacgcaaaccgcagcgccacagtggtggcaggcatatagatattcacgctgtcgccgcccatgccgcccatcaatccagacgactcgaccacacccacaacggttgcttcattgccgtcaagcgtgacggttctgccgatggcgtcaatgtccgcgctgccgaacagcttctgcacgccctgcccgtcgagaatcaccaccattgcaccactcgttgcttcactcgatgtgaaggcccgtccacgaccaatcgtcactccggatacatcgaagaaatgctcgtcgacaccggtgatgctcgccgacaccttgtcggtggtaccgggcgcggcgattgacgaggcggcaccatagttcgtcggcgagaagtactcgtagtcggtcagttcctcgcgcatcgcagtgatctgttcgtcgtcaagggtgccgacgtccgtgtaaatcgaaatcgtgcgcgccgcgttcatacccagttcgccgaccagagagtctcgaatgccaccgatcagtgaggtcatggtaatcaccgcggcaatgccgatgacgatgccgagaatggtcagtgcgcttttgcctttgttcgccctcagtgcggagccggtttccgccagcagatcccgtgttctcatcggtacatcccttcacgcagtacgccgtcacgcatgtgcaggcatcggtcggcgcgttcggccacttcggggctgtgggtgatgagcacgatggttttgccttgctgcttgagctgttcgaacgtgtgcatcaccgcatcgccggttttggagtccaggttgccggtcggctcgtcgccgagaatcagcggcgggtcctgtaccaacgctctggcgatggccacgcgctgcatctgaccaccggagagttcattggttttgcggtcgaacagttccggactcaacgccactgattggagtgctttgatggcacgcccttcccgttcacgcaccgggcagtcggaataggccaggggcagcatcacgttgcgcagcacgctggtgcgcggcagcagattgaaggattggaacacgaagccgatgagccacccgcgcagttcggagcgttcgtcatcactcagattctgcacgtccatgccgcacaggcggtaggtgccggatgatgggcggtcgagcaggcccagcgtgttcatcagcgtggatttgccggaaccggatggtcccatgatggcgaggaactcgccttggcgcacgttcatggtgatgcctttgagcacatgggtgtaggtgtcgcctgtctcgaagatgcggttgatgttttcaacctcgatgacgttggctgtggcggtgggcacggcaatggtctcattacgccgtttgccgcgatttgcccggctcgcgtcggaacgaaacgggaacatatcagcgtgccctttcgtccgaagccgcggtttgcgaggtggaagaagcagcatcgccagtattgtcggcagccgaagcgccatcaagcatgatgacatcgcccttgctcacattgccttccacaacggctttggtgttgttcttggctttgaccgtgactcgcacccgcttgaactcatgggtttcggcgttggtctcgagcatgaccgcgctgctctccttaccctcatccacgatggcggcgagcggcaccatcaaagcgttgtcaatgctctgcatggtgattttcacactggccgtcatgcccggcttcagtttcggatcaggggcgggaatgatgagacgcacggcgtatcccacgccgccgttgccactctgcccgcctgccgaggaatcagccaactgcgacgtggtgctggcgatggtatccaccttggcatcgagcgtcagtcccggcaccgcggagaacgtgactttggcgctctggtccttggccactttagtgatatccagctcattgatgttgacattgaccttcatctgactcaggtcggcgatctgacacaatggtttaccgtctgcgccggcggaagtggatgagccatcggaggaagctccgatggcggcaccgggcaccgcgctcatggtcagcaccgtgcccgagaccggagcagtgaccgtacgcttgttggcttgggcgaccgcctcgtcataggtggcttgtgcttgctgaacggcgacctgcgcactctccacgccgctttgtgcagcgggcagctgtccggccgcatcatcggcagcggcttgaccttcctcaccatcctgattacgtgcctgacctatggtcgcattgatttggttcacctgctgctgggcggcattaaggtttgagttcgctgctcgcagagccagatcggcctgattcacgtcgctatcgagcttgtcgttgttgatggtaaacagtacgtcgccggcgttgacggttgcgccttcctgcaccttgacttcgccgatggtgccgtcgatctgcggggcgacgacggtggagttgatgggttctatggaaccggtggagctgacttggtcgacgaaatggccacgttccaccgttgccgtggataccggagacacgcccccatctgacggggtgataatcgcgtgcaccaccataaagccgataatcagtaccgccacgacggcgacggcgatgatgcgatgcaccacgcgctttttcttgcgcgtctcacgttcgcgcattaatcggttgaattcggcgacttccgcgttctccgcctcgccttgggcaagggcgtcgacacttgattccacggtgtcggtagcgtccaacggttgtatgattgcggtctgctgctgatccttctgcatgtgctctcccccatggctggctccgagcctcgtgcccggatactggttccaagcctatggaggaatggcgtggtttccatcatgcgcaggattgaattgatggggagttgtcatccttaaggattagttggggtggggaatttatgggctgttttcagtcttggctctcgccttcgcttccgcttttctctcccccagtcatgcttcgcatgacagcctcctcgtcagagggggcttatgaataagcaaagggctcgggacgaatcccgagccctttggcgttagcgaactaacaacaccgtggaggtgttatcactcgttgtcgccagcggtagcggcggtagcggtgacggcacccttcttgtcggtgttcacgccggagtacacccagtcggtgtagtccgggtggtcgtagcccttgtcgacggcgaactggaaggcctcatcacggaacttctcgagctcgtcgatcttgtcggcgtacttgtcggcgtcgatcatgcgcagggcctcagcggtcagctcgtagcggtcgatgcggttgacacgaaccatgtcgtacggggtggtggtggagccctcctcctcgtagccgtggacgttgaagttgtcgtggttcggacggtcgtagatcaggccgcgcacgtcgtgagcgtaggagtggtacgcgaacagcaccggcttgtcggcggtgaagatgtcggcgaactcctcgtcggtcagagcctcgtcgttctccttggcggactgcagggagagcaggtcggcaacgttcacaaccttgaacttgacgcccagttccttcagcttgtcggaagcagccatgatctcctgagtcggaacatcgccggcggcggcaagcacgacctcggcctcatcgttgttcttggcggtggaagcccaatcccaagcggcggcacccttctcgagctcggcacgagcctcgtccagggtcagccaggtggcagcaggctgcttgccggcgatgatggcgttgatcttgttggtggacttgtagcacttctcggcgatggccagcagcatgttcgcatcggtggcgaagtagatgccgatgacgtggtcgttgtggaagcacttgttcagcaggacggaggtgacacccgggtcctggtgggagaagccgttgtggtcctgacgccaaacgtgggaggagaccagcaggttcatggaggcgatcggcttgcgccacggaatctcgcggacggtagcctcaagccacttggcgtgctggttcagcatggagtcgatcacgtggacgaaggactcgtaggagctccagatgccgtgacgaccggtcagcaggtaggcctcgaggaagccttccatctggtgctcggacagctgctcaacgacctggccggagacgtgcatgtgctcgtcgacctcgtcggagatgtagccggcatcccactgcttgttggtgacttcgtaggaagcctgcagacggttggaagcggtctcatccggtccgaagatgcggaagtcgcgcgggttgttcttgatgatgtcgcgagtgtaggcacccagggtacgggtggcctcgagctggccccagccgtggccgtactcagccacttccttgacctcgtagtcctcgaggttcggcagcttcaggtcgtcgcgaatcacaccaccgttggcgttcgggttggcaccgatacgcagctcacccttcggcatgaaggcaaggacgtcgtccttgacagcgccgttggcgtcgaacagctcttccggcttgtaggactcgagccagttcttgaggacctcgaagtgggcctcggtgtcgcgggcggaagccagcggcacctggtgagcgcgccaggagccctcggtcttcttgccgtcgatgtacttcgggcaggtccaacccttcggggtgcggaagatcagcatcgggtagaacggacggtgcacgttgtcggtctgagcggcggccttgatgtcgcagatctcgtcccagatggtctcccacagctcggcgaagcggcggtggatggacatgtggtcctcatcatcgaagccagcgacgaactcgtagggctcgtaacccatgccgtggaagaactcgtggagctcttcgtcggagatgcgggacaggatggtcgggttggcgatcttgtagccgttgaggtgcaggatcggcagcacgataccgtcggtgcgcgggttcacgagcttgttggactgccaaccggtagccagcgggccggtctcggcctcgccgtcgccgacgatggccgggacgaacaggctcgggttgtccatgatggcaccgtaagcgtgggacagagcgtaacccagctcaccaccctcgtggatggagcccggggtctccggagcgaagtgggacggaataccgcccgggtaagagaactgacggaagaacttctgcagaccagcttcgtccttggtgatcttcgggaaggtctcagtgtaggtgccgtccaggtaggactgggaggtaccggccgggccaccgtggcccgggcccatgatgatcacggtgttctggccgtggtcagcaatgaaacggttgatgtggccgatgaggaagttcaggccaggggtagtgccccagtggcccaccagacggtgcttcacatcttcgcgggtgaagggctccttcatcagcgggttggaacgcagataaatctggccgatggaaaggtagttggcaacgcgccagtacttgtcaacgccttcgagggcttcctcggaaaccggagcgttgagcttcttccaaggggtgccaataacaggactcgtcatgtgtactcctgtactcctgcacgtgatcgtgcgattgattatttctgttcggtcacggttcctgacccttgcggtgccaaggttttccgttcccaatcaatcgtcatggtacgaggacaacgcgacttttgaacgatttcttgcgggtgtgttcgaaattgttgcggaaatttcagtatttgtgcggttcacctgaccgtttgtcaacattagttttttcaacatactttttcagaacggcggaagcatgcggaaatctagcatctgactagaacagcgcacgttcgatttcccatgttcgaaatcggcgtgttgtccgactacaggcatgtagtttgttcgatttgcgcacatagtccctgcgtgtcggccttgtcgccttgaccagtgataatcaggggtgttcagcccacgtaaaattccaatgaacgttaggggaatatcaatggcaaacggtcctgtgcttgtcgtcgacttcggcgcccagtacgcccagctcatcgcccgccgcgtgcgcgaggcaggcgtgtactccgagctggtccctcattccatgccggtcgacgagatcctggccaaggatccgaaggcgattattctgtccggcggcccggcctccgtgttcgagcccggcgcgccgaccatagataccaaggtattcgaatccggtgttccggtgcttggtatctgctacggcttccaggtcatggcctatgagctcggcggcaaggtggataaggccgctctcggcgaatacggcaagacctcagccaccatcgacgacgccgacggcatcctcgccgactcccccgccgagcagaccacgtggatgagccacggtgtggcggtcgaacaggccccggccggcttcgaagtgctggcccacaccgaaggcgcgcccgtggccgccatggcggacgaatcccgcaagctctacggtgtgcagtggcacccggaagtcaagcactccccgcttggccagaagcttatcgaaaacttcctgcaccgttgcgccgcgctgcccaacgactgggacgcctcctcgattatcgaggatcaagtcaagaagatccgcgagaaggtcggcgacgccgaggtgatctgcggcctgtccggcggcgtggactccgccgtggccgccgctctggtgcacaaggccatcggtgaccagctcacctgcgtgttcgtggaccacggcctgctgcgcaagggcgaggtcgagcaggtcaagcacgacttcgttgccgccaccggcatcaagctcatcaccgtggacgcggccgacgacttccttgaggccctgaagggagtctccgagccggagcgcaagcgcaagatcatcggtgagaagttcatccgcacgttcgagaaggcccagcgccaagtgcttgaagaggccggcgcgcgcggcaaggaagtcaagttcctcgtgcagggcaccctctaccccgacgtcgtcgaatccggcggcggcgacggcgcggccaacatcaagtcccaccacaacgtcggcggcctgcccaaggacatcaagttccagctcatcgaaccgctgcgcactctgttcaaggatgaggtgcgcgccatcggcaccgagctcggtctgcccgacgaaatcgtctggcgtcagcctttcccgggcccgggtctgggcatccgcatcatcggcgagatcaccaaggagcgtctcgacctgttgcgcgaggccgacgccatcgcccgcgaggagctctccaaggccggtctcgaccgtgacatctggcagtgcccggtcgtgctgctcgccgacgttcactcggtgggcgtccagggcgacgagcgcacctacggctcccccatcgtgctgcgtccggtgagctcggaggacgccatgaccgccgactggtctcgcgtgccctacgatgtgctcgccacgatctccacgcgcatcaccaacgagtgccgccagatcaaccgcgtcgtcctcgactgcacgtccaagccgccggccacaattgaatgggagtaattgctctctgtgacgaatgggattctccatcggggaatcccttttttgttgccgacgatgcccggtataattttttcgcttacgacgtcgtccggaaagggatgccgacctctttgcgccagggattcgacaacgaaaaatacatcgaactgcaagccgccaacatctcaacagcgtgaaccgacgcttgcactcggatgaaacgctgattgcattgtcaatcaccagcgccaccagtcctgtggccgctcgcgtcatcgacgggctcaaacagttgcagggctgcgacgcctttttctccgttatcatctcatccacggacgaggcgttgtatcgcaaactcggcatcaacgtgtgctgcgaaccgaagtacgaacgggtgagtctgtatcaccggtaaacgccaccggtaagcgcggtatgccgcgaatcgtcaagccggtaatcatgcagcatgcggcctgacgattcgctgctgtcgcattgtctctcccctcgaccatgctgggcttgttttccgtttgttggagagaacgggggacgccatcagcactacggtgagagaaggattatccgtgaagcggttcgtgggtctagacggtattaaaggactggcgctgatagccattgtgctgtaccactgcatgcagcaactgctgccaggcggattctacggagtcgacgtgttcttcaccgtctctggattcctgattgccgtcagtttgattcgttctctggcgaaaaccggatcgctgaatctcgtgcgatatatccccaagcgtgcagtacgtctctatccggcgctgtttctgctgattccggtcaccgtctccgtcggctggctgctcgatcacgacattctagtttccatccgcgaccaagtcatcaccgtgctgctgggctgctacaactggtacgccattgccggaggccaaagctatttcgaccaaatgaacccgcaggtgtttcgccatctgtggttcattggcgtgctcatgcagttctacgtcatcgtgccgttcatcgtctggctgatgtggaagctccgccagacgaaactgtcctcactcatcccactgggactcgcggcgttcagcagtatcgccatgtgggtgatgtacgtgcccaagggcgaccccacccgcgtctacttcggcaccgatacccacagcatgggcctgatgctgggtgtggctctcgcctggtgggtcaccgctcctcagttgggccacgctcgtcagggagctgtgccgatgccccgcaccattagatcgagcgcttcggccgccacgtaccgggctccgttacctcagattcctgtaaagcatcgcatctggaatgcgacggcaccggtattggcattcctcagcctgattgccttggtcaccatgacggttatcggcaaacaggatgcattcgccttccgcggcggcatcatattgtccagcctgttgtccgtgctgctgattgccggtaccatctccgacgattcctggatgcaaagcctcatggtgttcaagccattggccgccctcggcaagtattcgtacggcatttacctgtggcactggccgttgtggattctttccagcgcccttgccccgaagatcttcaaggcagcagggccttggcctctcatcatgaccgcgttgctcaccgccattgcggtgatgatttcctggctgatggtggagaaaccggcggcaatgcactcggtgatatccgtcgtggtgccccttcgcacgaacaagaagaatcatgcggcccgggttattgccgttgacgttatcctggcgctgtcgttggtcggctgcgcgcagggcattactcatgcacctgcgaaaaccgccatgcagatccagctggagcaacaggccgcacaactggaacgcatacagaaaaccgaacacgtgctgctgcgccatgccgtgccggcaccgcccaagcccaagcatgagatgcccaccggcgatcagattaccgccataggcgattcggtgatgctggcctcatcacagggcctttcggaagtcttccccggcattcagaccgacgcgagcgtttcccgctccatcatggtcgcccccgaactcatcggcaatgatctgtccgccggcagtctgcggcaatgggtgctgatcggccttggcaccaattcggcaatcacccctgatcagctggaccagattcgtaatatgatcggccccgaccgcgtgctggtactggtcaatgcccacggagaccgtacgtggattccacctaccaaccaggtgcttgccgactatgcggccgcacatccggacaatgtggtgctggtggattggaatgccacagccaacgcgaacgcgcaggtgctcggctccgacggcatccacccgagcatggatagcgatatctatgcaaaggcggtcaaacaggccatcgaacaatggatcgcaagcggcaggtgaacggcaggcaacgctgagttgtccaaccggtcgtgaagaacggctatgctgaagactgcatcaacgagaccacacgttgggagacatggtgagcgcaatccttgaagggaagcccgataagaatcttattctcgttacgggaaggattcatccgaaattggctgaggatgtcgccgagcagctcggcatcgacgtccttgaaaccaccgcatacgatttcgccaacggcgagatgtacgtgcgctacaccgaatcggtgcgtggcgccgatgtgttcgtgctgcaaagccactacaaacccatcaacaaggcgattatggagcagctcatcatgatcgacgcattgaagcgcgcctcggcccgttccattactgcggtctgcccgttgctcggctactcccgtcaggacaagaagcaccgcggccgcgagcccatctcctgccgtctggtgttcgacctgctgaagaccgccggtgccgaccgcatcatgtcggtcgatctgcatgccgcgcagtcccaaggcttcttcgacggcccggtcgatcatctggtggccatgccggtgctggtcgactacatccgtgatcgtttccaaggccatctcgacaacgtcgccgtcgtctcccccgacgccggccgcattcgcgtggccgagcagtgggcgcagcgtctcggcggcggtccgctcgctttcgtgcacaagactcgcgacatcacccgcccgaaccaggcggtcgccaaccgtgtggtcggcgacgtcgccggcaaggactgcgtgcttgtcgatgacctgatcgacaccgccggtaccatcgcgggcgcatgccacgtgctgcaggacgcgggagccaagtcggtgaccgtggtcgccacgcatggcgtgctctccggcccggccatcgagcggctcaagaactgcggtgcgcgcgaggtcgtgctgaccgacaccgtgccgattcccgaggaaaagcgctgggatggcttgaccgtcctgtcgatcgccccgctgctggccagcgccatccgcgccgtattcgaggacggctcggtcgccgaactgttcgacacctaccccgagcaccacggtcaaggcttcctgttcgcctgatcacgtgcgtgtttgttcaaggaaagcacacgatgcgagacgcgacatggcgtagtctttcggtaaataccgacagtatggtataaatgaacacttgtgggccgaaagcccacgactcccccatggtgtaatggcagcacacgggtctttggaaccctttgtcttggttcgagtccaggtgggggaacggctgacggccgctcgacatccgggcggccgtctattgttttgagatgtttccaccctcaatagacattccgatcgaagggaatacgtcagttatggcattatccgcagccatcgtcctcgccgccggcgagggtacccgcatgcgttccaacaagccgaaggtgctgcatacttttgcaggcaagaccttcctgaacagggtcatggattcggtgaccgccctgaaccccgacacgctggccgtggtcgtgcacttccaggccgagcgcgtcgccgaagccgcccgctcctatgacgagcaggtcaccatcgtgaaccaggacgacattcccggtaccggtcgcgccgtgcagtgcgcaatggcacagctcaccgaggctggcaaggtcgatggcccggtgctgatcgccgcctccgacatgccgctgctcgacagcgagacgctgcaccgcctggtcgaattccacaccgcctccggcaacggcgccaccgtgctcaccaccatcctcgatgacccgaccggctacggccgcatcatccgcgatcgcgaaggcaacgtgctgcgcatcgtcgagcagaaggacgccaaccgcagcgaactcgccgtgcaggaagtgaacacctcggtctacgtgttcgaggcttccgtgcttaccgaggcaatcgccggactgaagtcgaacaacgcgcagggtgagttctatctgaccgacgcgctggaaaccgccaaggccgctggcaaggtcggcgcgttcgccgctccggatccgctcaccgtcgaaggcgtgaacgaccgcgtgcagctggccgcgctgtccaagacctacaaccgccgcgtctgcgagcgctggatgcgcgacggcgtgaccattcttgacccagaaaccacttggatcgaggacgatgtccagatcggccgcgacgccaccatcctgcccggttccttcctgcaaggccacacggtggtcggcgaggacgccatcgtcggcccgtacaccaccctcattgacgcaaccgtggacgaaggtgccgtggtcgaacgttcccgcgtgcaggaatcgcacatcggcgcacgcacgaacatcggcccgtggacctacctgcgcccgggcaacgagttcggcgaggatgccaaggccggcgcgttcgtcgaaatgaagaaggcgcacatcggcaacggcaccaaggtgccgcacctgagctacgtgggcgacgcccagctcggcgaccacaccaacatcggcggcggcaccatcaccgccaactatgacggtgtgcacaagaatcgcaccaccatcggctctggctgccatgtgggcgccggcaacctgttcgtggccccggtcgaggtcggcgacaacgtgaccaccggtgccggctccgtggtgcgccacgccgtgccgagcgacacaatggtctactccgagaacacgcagcacaacgtcgagggctggaagcccgcctgggagcgctgaaccatgcccgcacttcaggattccatcaacgccgtccgcgtggccgccgaggccgcagaccgtatcaaggccaccgacatcgtggccttcgacgtagccgacctgctcggcatcaccgacatcatgatgatcgccggcgcctccaacgagcgtcaggtactggccgtggccgaggaaatcgaaaaggacctgttccttaagtgctccggccgtcagccgcgctctcgcgagggcctgaccgagggccagtgggtgctgcttgactacggtgatttcgtgattcatgtcatgcacgaggaatcgcgcgaattctacgggctcgaacgactctggcgcgactgcccggccatcgatcttgaactcgcacacccggaaacggcggagcatgcggacgctgctgccgtcaccaccgcgtaacgtgcgaatcacataacgctgatattcgctgatactcgctgatactcgtgtgtcgggctgcctgttgccgaacgtcattgacggcaccaggcagccctcccttttccctgtttcctcactggaatcgaaaggatcgtcactatggccaatcatgttcgttccattttccttatccgtcatggacgcacttcctataacgccgctcacaagctccaaggccaggtcgacattccgctggacgccgtgggtgaatggcaggtcaagcagaccgccgcggccttgaaaagcctgtacgtcgatcgtcggccggaaatcaaccaccggttcattgtctgctccgatttgaagcgtgcgcacgccaccgcgcaggctttcgccgacgtattgggtggaatcgagcccgtcgatgatcatcgcgtccgtgaacgcagcttcggcgactgggatggccatgccgtggctgaactggccgaacgctaccctgaggacttccgttcctggatggagtctcggggcggtgaactgaagtatggtgccgaacccaaggaagccgtaggcaaacgcggtgtggaggctcttgaggactggtccacgcgtgccggagacgacacggacctgttcgtgttctcgcacggcgcatggatcgcgcagacattgcagaccctgttgggcatttccgcgatcgatccgaccttctccacggtggtctcattgcgcaatgcgcactgggtgcgcttggtgccgatggacaatcccgatggcactgtgcgctggcgtctgctggactacaatcacggtccggccatcgccgacaccgacgaatgggaacgcgaacgctgatcatgttcccgactcccctgctaatccaataggtccggtgcattcggaaccgttcaagcaataactgaatgactcaatgcctgaataatggcggaaacaagccaaaaagtgtcgccaaatcacacttttgtcatttggcgacacgccggcttttgccagaatcgacatctcgtcgtaatgtatacgaggtccgaacaacgggccaacaattgaaaacggggctatagcgcagctggtagcgcatctccatggcatggagagggtcgggggttcgaatccccctagctccacgacgaagccatcaaatcggatgatatggtggtttctccgctggttcgtggcgggtcttgtgactcccatgaatcggatagcttcactcggggctatagcgcagctggtagcgcatctccatggcatggagagggtcgggggttcgaatccccctagctccacaatcaaggccggtgcttcacacaccggcctttttcgttttctatcctatcgggcgacttttgtgcaacattcccgggaatgcgtcgcaaaacagggactggaatgcatgcagtgcgatactttccccggaaagtatcgccaaggggacgctcttccgattggcgcgacaccggcgtgagagataacagtaatcgccactacaatgaggtgtggtccctatcgtgttgatcatcaaaggagacaaaaacatcgtgaccgtcacccgtgtatatatcgccagccctgaaggcgccaatggccgcaacgtcgtcgcttacggcgtgctcaacgcattgacttccaagtacaagaccatggtgttccgccctgctgtgtccaaccatgacgaattcaccccgatcctgctcgccgcctccaatgcgggactcggcgtggccctgtccaccggcctcgacgtgcataaggtgcgcgccgacaaggacaccgcccgcggagacatcgtcggcgagttcaactacgccatggaggtctcccgcgcgaacgccgccctgatcgtcggcaccgacaaatcccacgtcaacgacccgaccacctacgagttcaacgcggacgtcgccgccgatctgaaggccggggtgttcctggccgtgtgcaccatggaccgatggccgcacgagctcgacgagaccgtcaagctgtccatcgagggcatgcgcgccgcgggcaatacggtgctcggcatcttcgtgaccggctgcgagccgcgccacgccttctccgtcaaggagaccctcgccaaatacggcctgccggtctggactttgccgcaggtgcccttcaccgacgaatccaccaaggatctggcccttgagaccttccgcaagcacgctcccatcgacgaggtgctcgccgcgctcgacgtggacgtcaccgcgccggtcacgccgtacgccttccaattcgacctgctcggcaaggccaagagcaacaagaagaccatcgtgctgcccgaaggcgaggaggaccgcatcatcaaggcggccgactacctgcttgagcgcgagatcgtgaacctcatcatcgtgggcgacaaggacgccatcctggcccgcggcagggaactggggctgaacagtctggggcgcgcccgcttccaggccatggacgacgagaacgtgttgaagcccatggtcgccaagctgtgcgagttgcgtgccaagaagggcatgaccgaggagcaggcccgcaagcaactgaccgacgccagctacttcggcaccatgctggtggtgctcggctatgccgacggactggtttcgggttccgtgcattccaccgccaacaccgtgcgccccgccctgcaggtcatcaagaccaagccgggccagaaactggtctcgggcgcgttcctcatgtgcttcaaggaccatgtggccgtgttcgccgactgcgccatcaacctcaacccggacgccgagcagctttccgagatcgcgctgcagtccgccgagaccgcccgcgccttcggcatcgacccgaaggtcggtatgctctcctactccaccctcggctccggcaagggcccggacgtggacgtggtcgaggaagccaccaagctgctcaaggagaaggctccggatctgccggtggtcggttccatccagttcgacgccgcctggtcccccaccgtggccgccaccaaggccaagggcaacgatgtggccggacacgtcaacgtgttcgtcttcccggacctgtgcgccggcaacatcggctacaaagccgtgcagcgctcctccggcgccttggccatcggcccggtgctgcagggtctcaacaggccggtaaacgacctatcccgtggtgcgatggtgcaggacatcatcaacaccatcgccctcaccgccatcgaagcgcagtgagcccggcttagctcccgccagcgggagccactgtaatgcttattttgtagcaagcaacgagtaatctaatcaacggtaacccgtgtctcacgggaacattcaatcacaatggaggatgcccacaatggcgaaaaccgtccttgtcatcaattccggctccagctcgatcaagtaccagctggttgatctcgaatccggcgaaggcctcgcttccggcctcgtcgagaagatcggtgagccggtcgacggccactacaagcacgagtacaacggcgaaaagcacgagcttgaagagccgattcacgaccacgagcagggtctgaagcgcgtgctcggcttcttcgaggagtacggcccgaacctgtctgaggctggcattgtcgccgtcggccaccgtgtggtgcagggcggctccatcttcccgaagccggccctcgtgaccaacaagaccatcaaccaggtcaaggatctggctgtgctcgccccgctgcacaacggcccggaggccaagggtgccgaagtcatgcgctccctgctgccggacgttccgcagatcttcgtcttcgattcctccttcttcttccagctgccgaaggccgccagcacctacgcgctgaacaaggaaatcgccgatcagtaccacatccgccgctacggcgcccacggcacctcccacgagtacatctcctccgtggtgccggacgtcatcggcaagccggctgaaggcctgaagcagatcgttctgcacatcggcaacggcgcttccgcttccgctgaagtctccggcaagccggttgagacctccatgggtctgaccccgcttgagggcctgatgatgggtggccgtaccggtgacatcgacccggctgtggtcttccacctgatccgcaacgcccacatgaacgtggacgagctcgatgccctgttcaacaagcgttccggcatgatgggcatgaccggctacggcgatctgcgtgaggttcaccgtctggtgtccgaaggcaacgaggacgccaagctggctctggatgtctacgtgcaccgcatcgtcagctacatcggcaactacacctaccagatgggtggctgcgacgtgatcaccttcaccgctggtgtgggcgagaacgacgacgtggtccgcaagatggtgtgcgacaagctcgctccgttcggtgtcaagctggacgaggagaagaacgccacccgctccaaggaaccgcgcatcatctccactccggactcctccgtgatcatcgccgtgatcccgacgaacgaagaactggccatcgcccgcaagtccgccgcaatcgccgaggctggcaccgatacctacggcaacaccttcgccaagtaagtaaccgccgttaggcatctcactaatctctagttgcaacactatgggggctgattccgattggaatcagcccccattcgtatatggtcaagagaccactacccctgcgtcatactcccctcagtcgcctccggcggacagatcccctcagagaggggatccaggccctataacttggctcccttctctgaggggagctgtccgcgtagcggactgaggggagttccaccagaacacaggaccccttactgcctcagcatgccactccacataccgacgaaatcaggcaaggtcttgcgcgtggtggccacgttgatgacctcgatatcgggaatacgcagccccagcatcgcggcgaacgtggccatacggtgatcagcataggtttccatcacggcaccgtgcaacgtctccgccggcaccggttcgatacgcaatccatcaggcaattcctcagccgctcccccaacacgacgaatctcgttgaccaatgcctccagacgattcgtttcgtggccgcgcaggtgaccaataccaaccatgtctgtcgacttatcagcaaacaccagaatcgccgccaacgagggcgcaatctccccggccgccgtcaaatcgaacgtacccagcccacgcacggtgccgtcaccggtcacctcgcaatagcgcacgccgccgatggtcgggaacgatacttcggcacccatctgctccagatatccgggcaacaggccgcccggctgggtggtggtttcaggccaatgaggcacccggaccgtgccgccggcgatcaatgccgcgccgaggaatggcgccgcgttcgacagatcgggctcaacggtcaccttgctcggcagttgcattgcgcgcggttcaaccgtccatgtgcgggcggattcgtcggcctcaaccgcaccgccggcaccggtcacatcggccacggtcatgcgaatgtgcggcaggctcggggtcttctcccccgtgtgcgcgaggtgcagaccgccaggcagtttggaactaatcagcaacaggccggagatgaactgggaagaaccggacgaatcgatgctgacctgcgcctgggcagccggcaaggttgcaggcggcgtaatagtgaacggcagacggccaacctcgccgtggtaatcaaccgttgcacccagctgttccaaaccatcaagcaccggcttcatcggacgtgcataagcctgttcgtcgccatcaaaattcactgggccatctgcaaacagggcaaggccgggcacgaaacgcatcaccgtgccggccagtccgcagaacacattgacgttgccatggaatcggccggatacaggaggagtaaccgttacggtggtgtcggttgcggaatccacgtcgcagcggacaccgagggcttcgagtgcgcccatcataaggtccgtgtcgcgcgaacgcagcaggccaatcagagtaacgggcttgctgccgagggcggcgagaatcaggtagcggttggatagggacttgctgcccggcaccgttaccgtagcgttcaacggctgtggggcgagcggggcaggccagagattcgtgagtcgttcagtcataaggccaaatctatcaaacaaatttttcaccggtcggcagcgatgcgggattcgatctgctgatcaggtgcggaagacggctgctcaaaaccgccttcgatggcctgcgcgtgcaacaactgagcggccgcgcgatcggcctcgatggcggcgatctggcgcgagaacacgatgaaccagccgaggaacgccagaccagccaacgcctccacattggtgagggtgttgtgacccatcatcatattgacccagaatgcagcgcatacgagcgcggtcaggtcggaggccaccatcactgctttggacaggcgtggcgcaagccacggcaggagcacgaacagcagcagcatgacgaacggcaggcctttggcgcatatattgtgcaagagattgtgtggcgtgtaccgaaacacgccgatgccgatgaatgccaggccggccaccatcagcaggaaggacagaatggagatgcgcagcatgaaatgtgggatttcgtagccgcgattcggatctctgttggtgcggtcgtgccagaggcgctgtagccgttcggtggtcaccagttcggagatggcgaagtagctgacgatgatgatgcatgtgccggcaagaatcagcgtggagttgaacatacgggccgcaaacgtggttctgtcgccgagctgcgaaaagttgttgtgataccagtatgggtcgtcggtggtcatgccggcggtgaccacgccggagatgacgaagaacggcaacagactggcaatagttttggcgttcatcatctccgcctgtacaaaggtcatgtaccccaccacgccggcgaaggcggcgcagacgctggagatatagccggagaagatggcattgcccatcatgtcgttggccgcaccgatgagtgcaaaagacgacaggaaaatggtcgaggcatacactaccgaaagggcgacgatttcgaaaatgcgacgaatcggcgcaaaccaaccatgtttgaggttcaatgaacgtgatttgcgcgcatagccaataatgaaggaaatgacgccgcatgccgccacgatgcccgaacataccatgaatcggcgttgcgtcagctgccagatggccggcgcgtattccatgtacaggttcatcgataccgcgccaacgatggcgcaaatcaagaaggagatgagtccggaggtttctgcacgctgatgacgtcccatgccgggcctcccctatctattcgatgccgcgttatctttcaacaacaaacaaaactccccccgaggacaacgctttactagcaagccagcgggatttggctgtcgccattctactgaaaatctgaaacactacaaaaaaaacgattatgtacgggcttcttagcctttgcgactatcgttaccgccttgccgagtaccgttgttcatgcagaaagaaagcagtattggacacaatcgaatgagcgtggataacgcccgattttttgcgcactttcggattccgggtctgacgtaagagggcatggcccgcgtcctgtgtacgattttcattcgccaaaacaaaaaaccgcgattggaagccaggagacggaaccaagacccttgaacatcatacagatcgaccagaacctgctcgagaccaggctcgaccgcttggtcgccgaaaaggtcgccgagctattgaacgcgatgctcgacgccgaggcc

SEQ ID NO: 1680 - DNA, 33770 bp, Unknown
  R221_24m  MAG No. k141_161312
gacgcccgcgccgagctgtttggcggcctgcttctgctgcatgccgcccagcaccagctcgactgcccttcgcctggtctccagtgggatgatgggtttggccatatggccagcatgccgggaatccatcgccagccaacgctccaggcactgcctggtcggataacccagatgctccaccacctgggccgtcgtcatcggcgtggtgaaatacaactccaccgcacgctctcgttcctcaagaccggacatacgaaaatctttccgttcggtctccaagaaaatgtccgcagccccttatcaaaagcagctggagtcgacaatcaccttcaatgtcaaaatgctattgacggcttatggttattcgcagtccagcttggccgaagcgatgggaattggccgttcggccatgtccctaaagatgtcggggaaaacaggctggtctgtatacgacctggttaatgcatcaagattcttgaaagtaagcacggaacaacttcttgatgattctctgatgaggagaatgggcgtttcggacgatgcggaggcggatatggaaaagtccgccgtttccggcggactttccgatgatggtaccccccgtcggagcgcgcctccgcggaggcactcgagaacatccacccgttcgccgacgacaacgggcgtaccggacgccagatcctcaacatgatgctcatgcaggcggggtacgagcccatcgccatcaggcatgatgccggcagcacctacgccggacggctcgagcagtggcaggcgtacggcaatccggttcccctggcgtgcatggtcgcggactgcgtggtccgggaacagtgccggatcgggaagatcgtgtccgatatccgccgcgggcatcccatcgccggacacgccagaggtatacgtgaatagtgtgtttacacactgttcgagaataataccctgacatgtcaactaacgcaacgtttactgggatgacggacaagaaggttggttcctatcagctcataatgacgttgccgactgcttgatggtggttgtggcgcttgtttgttcgattccgccggtgctgggtcgttttcgtctggctgaacggcggccaatctgggagttcgttctggtagacctcgtcgggccataatctcccagattctgcgggagtttacgctgacttcgggaattcgccgctgaactcccgtgccggacgcgagagtttacgagaatccggtactctcatgcataatctctcaacaaaaacgttggaattccgcgattctcaaaaatcgaccttgaagccgttcccgggagaacttcgccggattcatgtttcgcgctaaactcccgcgcgcatccggaagttttcatagaatcggtcgcgcaaacggacatccggatttctcaatttctcccgggatcagcctcttccaccgagttttccagaccacaatctgaaaactcgtgatttgagcctgctgaatcgagattttgagttcttcccaaactgactgccgcaaactgaccgcactcatcgtcctgtcagcgcagccggtttgcggaatggaagacgtgtgcggagagcagcgcgcagcggtgcatagtccccatggttggtggccgtccgcggctactccagcggtgtgcgatcccactggtcggcgcgtggaatggtgcgcaggctgcgcgaactgacgattagcagcatactgacgagcatcaccgcccagaacaccagcatagtcccgctgaatccgaaagcgggcagcagacttccggccgtcgctgagcagaacgcggacagtgcctgggccggtacggtaagcgtcacggtgatacgcccctgcatcgtgtcgggcgtcttaccgaaaatgaacccgagctgcaacgcgttgatgatcgggaacggcaggcacatcacggcgttggcgataagcagcacccagtagttgtcggtcagcagcatcggcagcgaagcgatgcagatgaacacgaatccgcagcatgtcaccggcccgaccggtgcggtatcgctgatccgtccggcgatgaacgcacccgccagcatcgcgaggaatacgcccgtattcacgaatccgatgagcgtcgcgttcacgccggtgcgcatcagatgcagctgaatcgcatactggaagccattgaccccgaaattcgccagcgcggacgacaccatcgtcaacaccagcatcctgcggtgcagcgaccacgaccatccttcggcgaaatcacggaaaaatgacgcgccgcccgctttcccaccgtcatcgccgctatcgccgttgccgctatcgctgccgttccgcggatttccgccgactcggatacgtgtcgcagccacgcctgccagcaggtacatgaccgcagccgacaggaacggcaaccacggggcgatgccgtacagcaggccgccgactgggctgccggccatgttgatggtcgcgtcacggccttcgttgagactgcgcgctttcggatatgagcgaatatcgacgatggatttgagcatcgcatccgaggcggggccgagaaacccgttgaccgcagactcgaacaccgcgatggcaagcagcacggggaagaccagcttgccggccatgagcagcgcagcgactgacccccaacagatgacgcccgctgtcgcgttcacgatgatcagtgtcttgcgatcgtgacggtcggcgaatgtcccgccgaacacggcggccgcctgctgtgcgatcgcggccagcgagcccaaccaacccgctgctgtggtcgatccggtgagcttgtatccgatcagagagaccgccagataccgcagggccacgccgatggccgtcgcgctgtccgccgtgaaccatggcacgtaacctgggatatcccacaacctgctttcgcgcacaggagcagaaacgagctttaacgaattactcatctaataatttatccttaccctgccagtactggaatcctacagaagattaggcggcactggttctttacaaacttgctcagtatgccaagcataatcatatatatcgaagtaacccttttctccataatgagcaggacagcaatgacatcgataatcttcaacctgttccgctaccaacgatcccaatgttgaacataatcgatagctaagcttaccggactcatggtgcagcaatagcttgcctttgattgccaagtgtgaagaaatatagtcatatttattgttcggataatagaattcaggcaaacttaccgaattaccaaaatagcctggattaacaatgaacgctatatctttcttatcacatgagtagttaatcatccttgcgacttcggtggtgcttggaacgtctgccgcttgaattactaagttgattttctctcggtcaattaattcatcaagttcactatgacaagttatcattttatcaatgctatctatagaaagacatcttgacgccctggatttcagcacatcaacctttttcttcccaatgtctgttcgcacgtaatcctgacggtaaatgttgtctacagtgacaacatcatgatcgaccaaagtaatatgttccaaagcaagcattgaaatgtgccgataaatatgacttccaatagacccgcatccgagcagcaggcatctaatttgtcgcggctcagcgtgttcgacacgcaatacgtccaaactgacaagtttgtcaatagccgctggggccggtaacgttttgttggactcgtggcataatcaaaccatagaaacaaagaaatccaataaagcgacaccgtatccaagtgcccacctctatttgacggaatgcaccatattccggcaccgacgaacatcaggatcgagccccatcaccaatcggcaccaagccgcccatatcccatgattagctaaagatatctctgaatcacagcgttcagaaaggaggcgccatggaaaagccactgcttctgctggccttggtgccgctggccgtcggattggtcctgatatccgtcgtgatcggatccaaaaaccgggaagagaacgcaaaaggactcttttgcgttctcttctcagcgctcatggtcgttgccggcgcgttggccatcgcgagacaactcgtatgacgcttcacgctgcggcatgttgtcccggctattgcccacgcccattcccagctctccgcgccattcccgcaatcacgtctcttccccggtctcaagcccatgagacacttggagccatgactaccatcatcatgcgcacctctgagggcgatatcaccatcaacctgttcgacgacaaggccccgaacaccgtggccaacttcctgggcctcgccaccggcgagaaggaatgggccgacccgtacaccggccagccttcccatggcaagttctacaacggcctgaccttccaccgtatcatcaagcagttcatgattcagggcggttgcccgctgggcaccggtaccggcggccctggctacgagttcgacgatgagatcgacccgagcctgaagttcgacaagccatacctgctggctatggccaacgccggtctgcgtcgcggcatggacggcaaggtccatggcaccaacggctcccagttcttcatcaccaccgtgccgaccccgtggctggacggtcaccacaccatcttcggcgaggtcgccgatgacgactccaagaaggtcgtcgataagctcgaagcactggacaccgatccgatggatcgcccgctcgagccggccgtaattctgtccgtgaacgtggccgagtaagaccgacacatatacagcaaaggtcctgattggtattccagtcaggaccttttcgtattcttggctccctctctgaggggagctggcgccgcagacgtctgaggggagttccgcaagcccgcgctgctcccctcagtcagcttcgctgacagcccctcccggaggggagccaagcaacggcctacttcatcttgcgcagtcgaggttcggcggattccttggcaccggtgatgcggtacacgtcgaacacgccatcaatcttgcgcacggctgccagcaacgagttgagatgctgcggatcggccatttcgaagctgaactggctggtggccacgcgatcggaaccggtggcgatcgtaccggaaatgatgttcacgccatggtcggaaagcacacgtgtcacgtccgaaagcaggtttcgtcgatccagcgcctcgacctgaatcttgaccatgaacaggcccttggtgctggtccattcgacttcgaccacacgctcaggctgcttgtttttcagatcgatcatgttctggcagtcggtgcggtgcacggatacgccctgattacgggtgatgaagccgatgatattgtcaccaggcaccggcatgcagcaacgggccagcttgatccacacatcgcccacgcccttgacggataccccggtggagctgctggaagtcttgcgctccacgggcttgagcggcagagcctcctgctcgacctcctcatcgacctcgtcggccccggcatccttgaccagatgcgagatgacgttctgcgtggagatctgcccatcaccgatggcggcgaacacagcgtcggcgttcgggaaattgaggtcgtcggccacaccgatcaatgcctcggtggtcagcagcgcattgaccggcaagttacgtttgcgcatagcgcgggtcagttcgtcgcggccttcctcaatagcctcggtacgacgttccttcgagaaccactggcggatcttgtttcgtgccttcgggctcttgacgaagctcagccagtcgcgcgaaggaccggcggtatcggacttggaagtcaggatctccacggtgtcgccgttgtcgagcgtggtgtcgagcggcaccaaacgcccgttgacgcgcgcgcccatcgtacggtggcccacttcggtatgcacggcataggcgaaatcgaccggtgtggcatgggccggcaaagagacgatcttgcccttcggcgtgaagacatagacttcggacgagccgaggtcttccttcagggaaccgaggaattcgttggaatctggggtttcgctggtccaatcagcaagctgctgaatccatttgagattgtcggcttcggaaagctcctggttcttctcgtcacgcctgcggtcggacttgtccggcgagctcagggcgcggccggcctggccgttttccttgtatttccagtgcgcggcgatgccgaactcggcgcggcggtgcatgtcccaggtgcgaatctggatttccaccggcttgccaccggggcccaccaccgtggtgtgcagcgactggtacatgttgagcttcggcatggcgatgtagtccttgaaccggccgggaaccgggttccaccgcgcatgcacggcaccaagcgccgcatagcaatcctgaatggtgtcgacgatgatgcgcacaccgaccaaatcgtagatgttcgcgaaatcatggccgcgcacgatcatcttctgataaatcgagaagtagtccttcgggcgtccggtgacgtatgccttgatgttctgctcgtcgagatcctcgttgatctccgccagaatctgcttcaggtacacatcgcgctggccggctcggcgagccaccagcaccacaatctcgttgtagatcttcgggtagagcaccttgaagctcagttcctcgagctccgtcttgatggcgttcataccgagtcggttggccaaaggcgcgtacacgtcgagggtttcacgcgccttcttctgggcggacgtagtcttcacatagcgccaggtgcgggcgttgtgtacgcggtcggcgagcttgaccaccagggtgcgcacgtcgcggctcatggccaccacgagtttgcgaatggtttcggcttgggcggaatcacccacttcaagctggctgagcttggtgacgccatcgaccagaccggccacggtgtcgccgaattcggcgcggcattgatccaacgtatagtcggtgtcctccaccgtgtcatgcaacaggccggccgccaccacgatcgggcccatgcccaaatccgcgagaatctgggaaacggccagcgggtggatgatgtacggctcaccagacttgcgccgttgcgtgcaatgctggatgacggcgcgccggtacgcgcggtcgaggatggacaaatcctcaccgggatgatgggacttgcataccttcttgattggatccagcggattgagcggatcggcactgatctcacaacccaacttacgggcggcgtactgctcgccatcaatctctgccatgccagtcacctccctcgtcatgaagttcattgtagccgcgaaccggagccttgtgcatgcacctgttcgccatcattggttccgcaaccgtcgttgccgtcatcaccttggtcattcaaccggcccaatccggtcaggacgccactcccgtcgaaccgaacccacgttcggcgcgatcggatccgggcagggtttcggccgggatgaaccgggcctcaacataccgctgaatcaccaattgagcgatgcgatcgcccggatggaagacggcggtgcgttccggatcgaggttgatcagcggcaccttgatttcgccacggtagccggcatcaacggtgccaggcgcgttaagcacggtgacgccctgcttggcggccagcccggaacgcggatgcaccaacgccacgtagcccgcaggtagggcgatggccacgccggtgggcaccagtacccgttcaaaaggcttcagcgtcacatcgacggtggtgatgaggtcggcaccggcatcgcccgcgtgggcatagtgcagctgggccggatgttcggggtcgaggctcttgaccaggacctcggtggattcgggctcgttgtaggtctcgtcgaacgccatcaggcggcgcactcctcacacaccggctggccatcctcgtccgtgtaggcgagctggctgcgatgcttgaccaagaagcactgcgagcagatgaactcgtcaccctgcatggggatgacggtcaccgaggaatcctcgttgctcaaatcggcgcccggcagttcgtagtcttcggcgatggcgttctcatcgtcgtcgatgtcgctcgaggcgttctgcgaggacttccccagcgcctgcagcgattcctcgtcctcatccttattgcggggggaatcataatcctgagccatcatggtcctttcgtcgtctttggttcgtaagtcgatatatatagcacggtcagcgccgtactcgcccataggatacacgatttgaaatactcgtaaagttcgacacgtggggcatacttaaaagaagtaatgtctttgcgacggaaagtggtgcgaatatgccagatgatcggcttgaaaaagcccgtttcgtacgcgtgagcaagacgggggacctcgtattctccattggcggcagggaaatggccgtgagcgtggacgacacgctcgaacgggcgattcttgaggccaagcaggtcagaagcgagacgcgacaggccccccagccgcatcagcagtccactttgccgatttcccagatacagtcgctgattcgcgccggcgccgatccggcccgtgtcgcggagaaatatcatctgagcgaaacgctggtacgtcgtttctccatggccgtggagaccgagaaacagtacgccatcgaacaattccttgccgtggcggcacccaaagacagcagggtgcgcaccatcagcgaactggtggaacgcacgctggcctctgctggaatcggcatggaatcagtgacctggaaatccacccggcgcggacttgagccttggcgcatcgtggcgatattcacttccgcgggccgtgagatccatgccgaatggacgtggaatatgcacgacaattccgtgatgagcctgaacaatgccgctcgaaaactgctcggcgaacagaatccggaatcagccacggattccaaactcaagccgacgattcctgaactgcccggcgactccgtacgttccgcgcgtatcgagcgcgccgtgtctgcttgggcggcgcctacgccttcgattccggccgcacggcctgccgcgatccggccctccgtcacttccacaggttccatgcccccggtggacctatccacgtccatctcaccggccacgaaccaggctcatgacgctacggcccccagcccggtctcttcgcagaccgccggacctgtttcgtcatctgccgcaggattgcagcaatcgcctgccacggcaccagagcagggttctgacaatatttcggacgagaccgtacggcgtggccccaatgcacagctggtagccaccgagcaggagcgggcggccgaatccgccgccaccaaacacgaggcaccagccaaaccggccaagcgtaaatcaggacgttcggccgtaccaagctgggacgagattctgttcggagactgaatttccgaatcaggccatatcgatcaggcagggaatatccatttccaatgccgtttgggagccatgcacgctcggcaggtgggtggctttgtctccttgcgtacgcgaatcgacgagggtcacggctcccgctgcctgcacgaccacatcgccgagcatcggccggactcgctcgcagaccggtccaaacaatccgtccgcgatggcctcatccctggtccgcaccaaggctcggtcttgcaggtaatcgcgccaccggcaagctatatcctcaggtcgttcatccggctcggcatacagcatcagcgagcgaggctctcccccgaccagtgacacgcctcgggtgagctgcggttcaacggcgatgtcaatccgctggtccacgtcggtttgcaccatgccgtggtcggccacgatgacgatcagcgtgcctttgggtgcgctgcgtttcaggagcgcgagctgggcgtcgatatgttcgaatgcggccacccagtgttcggaatcccacccgtaattgtggccgactttgtcggcgtcacggatgtacaggtaggtcaggccgggggtacgggaggcacgtgaggcggccagcacacgatcgcgtggggtgacgttgccttgatagtcggtgcctcgcaatgcggcttcggtcaatggcgatttggagaacttgggcaaccccgagcttgtgacgcgcacctcttgagccgcaagtttctcgaacaccgtctcctcgcgctgctggtcgagcggatcgaccatgggtggcacaggaatgtgcggattggctggtttgggtgccagcgcatctttgaactggatgagttggatgagcttatggctggcgggttcgagctgcgtatagcccgccattgcggtcagtcccgggcaggttccggtaccgaatgcggccatggccgccacagtggtgcttggagcgcaggtggcgatgggacgctgattggcgcgttcgttcatcagcgaacgcagatagggcgcgtggccgaggcgcatggcgaggttccagaagcccaggccgtccacgagcaccacgatggccgattcggcgtcgggcagtcccaacgcgcgctggcaggccttgggatcggcgtggaccttggtgggagtcggatgcccaatcgcggcggacaaggcgggcagcacggcggacaggtgcagtgctcccccacgccgatcggccggggcgtcatccccatagcccacagtgggcaccagccgcagcaactcgtccatatccggcgtctcaacactcatagttgcccattcaagtagcacccctccccttggctcagtgcgcagagaacggttctcaataacaactgtgcgctccaacgcacataatcaaacaaacgcacatcgactgaaacactggaatcacgccgttttatcggcaaacatgtgcgattggcgcatcgaaaccagcgcacagttgttatcgagaaccgttctctgcgcactgtttcgcgccctcccgctaatatgggggcgttcgaaagggagtttcatggcatcacaccgcaaaccgtccgcgcaaacctacgatccgcgcacggtcaaggagcatatcgtcgagacgccgctgaacgaggagatgagcaaatccttcctcgagtatgcgtattcggtgatttacgcacgcgcactgcccgatgcgcgcgatggcttgaagccggtgcagcgccgtatcgtctaccagatgggcgagatgaacctgactcccgaccgcccgtatatgaagtccgcccgcgtggtgggcgaggtgatgggcaagctccatccgcacggcgattccgcgatctacgaggccatggtgcgtttggcacagccgttcgcgatgcgtctgccgctggtagatggccacggcaacttcggctcgctggatgacggccctgcggcctcccgttacaccgaggccaggcttggcccggcggccctcggcatgaacgcggatatcgacgaggacaccgtcgacttcacgccgaactatgacaacaagctcaaggaaccgaccgtgctgccggccgccatcccgaatctgctggtcaacggcggctcgggcatcgccgtgggcatggccacgaacctggccacccacaatctgggcgaggtggtgaacgccgccaagttcctcatggcgcattcggacgccaccctggaacaactgatgcgttacgtgcccggccccgactggcccaccggcggcactatcatcggccgcgatggcatccgtgaggcctatgccaacggccgtggcacgctcaccacgcgcgccgccacgcatgtcgaacatgtcacggcccgcaagcaggccatcgtgatcaccgagctgccgtacatggtgggcccggagaaggtgatcgagcgtatttccgacggcgtgaagaaccgcaagctggaggggatttccggcgcgttcgatctgaccgatcgtcataacggcacgcgtatcgtcatcgagatcaagaccggtttcgacccgcatgcggtgctggtgcagctgttcaagcacacgccgttgcaggacaattttgccatgaacaacgtggcgctggtggagggccgcccgcacacgatgggcctgaaggagatgcttcaggtgtgggttgaccaccgccgtgtggtgatccgccgtcgcagcgaatatcgcaagaagaaggcgttggagcgcctgcacctggtcgagggcctgctgctggccatgctggacatcgacgaggtgatccaggtaatccgcacctcagatgatgcggatgctgcgaaaagccgtttgatggttgtgttcgacctggacgaggtccaggcccagtacatcctcgacctgcgtctgcgccgtctgaccaagatgaaccgcatcgaacttgaggccgaacgcgatgacctgaagaagcgcatcgaggagctgacccgcattctggcctccgccgaagcgctcgaccaggtggtcaccgacgagatggacgaggcggtcgccaagtggggctcgccgcgtcgcaccgtgctgctggacgccgacccggatggcacgctgacgccggtcgtggcgcagggcgccggggcttcgggtgtgtccaagtccgcactcgaagcagtgaaggccgccaccacgatttcctccgccgaagccgatgtggccgcagccgcagccgccgccaagaagaccggcgagcggtccgcgctgaccggagccttgaagatcgaagacgagccgtgcgtggtgatgatgagcgccaccggtttgattgcccgtaccacgccaagcgcgatggacgtgttcaatgtacggtccacatccgatgaacgtctgcgagatgatcagatcaccacaatcttcgagacctccacgcgcgccacgtacgggctggtcacgtcggccggccgcctggtgctcgcgcatgtggttgatttgcctgccttgcccgctgccgccacattgtcgctgaagggaggagttcaggccgacgaactgatcggcatgaccgaatccaccgatccgattcgtggcgagcgcgtgattacggcgatcgccatggagcagccgacatccggcaaggccagtgccaaggatgagagcgaggatggcggggccgccgaggccaagccgttgccgtcgctggctatcggtacccgtaacggtgtcatcaagcgttggaaccgtgaggcacccaccaccatggattcctggcccgtcattgatctgaaagatggcgacgaagtggtattcgccgccgtggccgaggatgacgaccgtctggtgttcatctcctccgattcctcgctactgacctttgaggcgaagaacgtgcgcccgcagggtcgcaccgcgggcggtatggccggcatcaagctggccgagggcgcccgtgtggcggcattcaacgtggttcccgccggcaaggtggcatggacctatgaggagggcgagaacggtttgacttccggctccggcgcggtggtgctcaccgtggccggcgactccgatgcactacccggcaccgaaaacggcgctgccaaggtcaccccgctggaaatgtaccccaccaagggccgcgctaccggtggcgtacgctcccagcgcttcctcaagggccagaacacgctgattcttgcctgggttggtctctacccgttgcatgcctccacatccgcaggctccccggtcgagcttcccaagcccgatatgcgccgagacggctccggagtggacctcgcctcccccatcgccttcattgcgtaacctcaattaagctccctctgatgggccgagccgtaaagcaaacacccccagtggggtgtttgtaggcgaggagcgaacgatagtgagccaaacacatagagaagagaccctaaacccgacctacactaagcatcaaggaggtggcgatgagactactggttgccgtatccaatgaaccgttggcccgcgccattcgtggtgcgctgcttgcctgtcgtcatgaggtgtccttggcaagcaccggcagtatcgcgctcgccgcggtcaccaaggagctatttgacgcagtgattctcgatgaatccctgctcggcatctccaccgagcaactcatcgaatcccttcacaatgcccgtgcctccgtcaagattctgctgctgacttcgacgccactcagcaaaaccatcggcgaaggcagccgctggcgagcgctgcctgacgagtacgccccgatcgaagagacgccctacagctccttcagcgcggatttacacgcaaacaactcagatgccgaagccgaacagtgcacggacaatgctgccgctagcgcacgagctaatgtacgacgcccggatgccgtactgagcaaaccattctccgatggcgaactgctctcatacgtcggctcgcttgccaccgactcccccaccatgatcattcgtggcaatctcacgttggataccacgaatcgcaaagcctactacgcatccacacacaccgcaatttcactgtcccgtctggaatacagtttgcttgaagcactggtcaaggctgatggccagtttgtcaacaccagcgaattggtcaagctcgtcggtggcccattcttcgagcaacaagggctcctcaggaacgccctctacacactggataagaagctcacccacgccggcctcatcatgacccaacgcggctccaactaccgcattcgatagctgggctcaatcagtacagccgcatgcctcggggaacgggggtgaagccggactggtggaggatgcgggcgaaggggtgacgcgcgttgaggggttcgccattgatgtcgctgaacgtcacggaaccggtgccattgcgtttgagagcgtaggccagttctgtggcggccttgcgcatttgttcgtcggaatcattggcggcgggttcatggccgaccgattgatcgaacgccgtcaagtgcttggctttggcagccgcgtatagtagcgcaccttgcgcattgagcacgaccgtggctccgatacggcgtgccggtttacccgcaccggcaggcgcgtccggccacgcgatggcggagccactgagatttgcggggtcgagcacactcaatgccaccacggactggccgcgatgctctgacggatgacgcaacgcatccacggtgtcgcgctcggcaaattgggccgcgccgaaaccacggacgaacatgcctcgtaccagtcgaccatgctcctccatgcgctgcaatatcggatacaacgctgagtagccacccgggatattttccttgtcgatcaccggctgcgcgatgacgccatacctgtccagcaacgtctcgaccagtgcgagcgcctgctcggtctgatcagtgtcttcggcttcagcttgcccgattacggcagaccacaaacctcctaacgtcatatccgtagtggctcggtgaatcggagcgacacgcccacgacgacgtgatgtagtggatttacgcgggcttgctgcgcctgcggttaatgcacgtaccggcgcgaagctggaattggtgaccttaccttgccagaccaagctccacaaggcatccttgaactgctgttcgctccactcttgcggaatgatttcaccggtgtttggattgatgtccggctccgcggcctcattccacacacgtttggcggcatccaccagttgacgggcatggaacgctccccctgagtccagtgcggtcagaatcgcttccggcatggtggcgtctgaagcgttcgatgtcgtaccatgttccacaccgctgagcaatattgaatccgccggatagaaagcaacctcaccggggtccatcgcactggttcccccggtttttgagccgacccagaccacatcgccgctggtcagcaactcatccagcaatgcaggttggtagtctcgtactcgtgcggggaataccgccgactcccagagtgcagtgggtagtgctatgccctccagctgctcgataacgcgcatgagcccgtcggcaccttcatatcgttcgccgccgaccggcccgataccttgtcggtcgataagaaacatctggaacgcctctggttctactggcttgactgctttacgcgccttggccaatgagcgagaccgaatgcggcggaatacgtccttatggagccactgttggccttgcttgtcatcatctacaaaatggccttgcagcaactcgcctttggcagccagtacatccaaagtatgcacggcatccgtagcatcgaggtgcagatcggccatgagctgatcggcggtgaaaggaccatgggttttggcgtaacgggtcacgcgaccagtcacatcatcgtcggcaagttcattccagaaagtgcgctcccccagttcctgttcgacttcgcgaatcacgtccgggttgagcatttgtgccatgtcggtggtgccgagcaagcgttcgagcacgtgcggatcgagagacaacagttgcgcgctgcgctcggcctgaggttggtcatactggtacatcaccacgccgacgaagccaaagagaatgttctcggcaaaaggcgatggcggctcggtctccacgtccttcacggtaatggtgccggcttgcaatccggtcatcacctcgttcagggcgggcatgtcgtatacgtcttgcaaacattcgcgcgcggtttccagcagcagcgggaagttcttgaccatacgtgcggcttgcaggagctgtgcggcgcgcagtcgctgctgccataggggcacgcgacggcccgggtcggatcgcggcatgaacagtgatcgggcggcgcattcgcggaatcgtgcggcgaatagcacggactcgcccacttgacgttctacatctgctttgaggtcttctgggtcgaaaaggaacaggtcttgagcaggaatatgtccgtcaccgtccggtagctgaatgacgataccgtcatcggcggcatatacctgcccatcgaaaccgtagcgttggcgcagtctgcggctgatggccatggaccacggttcgtgaacgcggcggccgaaggggcttaacagtacgatgcgccagccgccgtcttcatcgcgggtccgttccacgatgagggtttggtcgctgggaactgtgccggtgatggcttgttgctcggagagtaggcgggccaggttggtgatagcgttggggtctaggccgtctcggtggagacgggtgaggattgttgggatgaaggttgggacagctggaccttctgcggcagcactccccccagtccgcttcacgtctaatccggcggcgatttctcgggtgaagcgggctatggtacggctgaaaccgtagtcacggccagcgccttcaccgtgccagaacggcagacgggcggtgcggcccggagccggagtcacgaccacacgatcacgggtgatttcctgaatctgccatgtggaggtgccgagcgtaatgacatcgcccacgcgcgattcgtagaccatctcctcatccaactcgccgacgcgacgctggcctttgccggcgtccgcctcaggcaggaccacggtgtacagccctcgatcgggaatcgtaccgccagaggtaacggccactttctgcgaaccgggacgggcggaaatcaggccattatcccgattccataccagtcgcggccggaaggccgagaattcctctctgttgtattcgccggacatcatgccgattacggcatcgaacatgtcacgtggcagttcggcaaacggcgcagcacggagcaccgtggcataccagtcatcagcgttcaaatcgtgcatcgaggcagcggccacggtctgctgggcgagaatatcgagcggattgcgcggcacggccaatggttctatatcgccggcaatcatggcttccagacttgcggccccagtgacgatttgctgacgggtgagcgggtagaacaatgcgtgagagacgccaccgacctgatgatcggcacgacctacacgctgcaatccggaggagaccgacaacggtgtatcgacttgaatcatcaagttgaccgagcccatatcaatgcctagctccaaactggaggtggccaccacgcagcgcaattcaccacgcttgagccgttcctcaatcattttgcgacggtctttggagaccgacccatgatgagccatggcgatgacatcatcgccctcatgcgagccgacaagcatggtggtggaaccgaccacagcatcgtaatgtgtggagaacccttcgcggccttccggagagcccggatcccgcacagtgtcgggattggtgccatgccgggtctgcgcatagaaatcattgaggcgcgcggtgagcttttcggccacaccacgcgaattgacgaacaccaatgtggtgcggtgcgcgagaatctcatccaaaatactgcgttccaccacgggccagatggaaccggaggtacggtcgcccgccgctccaaccaacgcggaggaatcgaacgcatcactcgcatcagaatcgtccccagaagtggaagaaacatctctatcatccaccggcacaatgcccctgcgttcggcaagtcgctgcatggccggcgtgacaccgctgatatgcggagcggaccgttcagcctccacgccaccgacacgctgcttggcattcacggactgcaaatcacgcatgttttccaacggctcaatcatgcgcagatccattgcaggccgcccaccgggattcacgatggtaaccggttgtccgccgcccaggaatcgcgccgcctcttcaggcggattcaccgtagcggatagaccaatgcgctgcatatgaaggtcactgaggccagcatcgatggcggtatcactgccctcatcagcatccgcatcgattgcatctcgcttgcgcgattccgcgacaaggttctccagccgttccagacttaccgccagatgtgcgccgcgcttggtgcccgccactgcatgaatctcatcgacgatcaccgtatcgacagtgccgagaatccgccctgccttcgaagtgagcaacagatacaacgattctggcgtggtaacgaggatatccggtggatgggaggctatgcgccgccgctcctgtgcggtggtgtcgcctgaacgagtggcgaccgcgatcttcggcacgggcagcccttgcgcctcgcattgtgcggcaatgccctccaaaggctgttctaggttcttggccacatcggccgcgagcgcctttaacggcgagatatacagcacacgcacaccggcacgccgcgtgcgtggcacggtcatcagccggtcaatggccgagagaaacgcagccaatgttttgccggagccggtaggtgcgatgaccaagacattacgaccggaatggattgccggccatgcctgagcctgtgcctcggtcggctgaccgacggcatgctcgaaccacaccttggtgggttcggaaaacaggctcagggtttcgtacatatgtacgattataggtcagttgaagtaggcgatgacttcttcggcggtgccgtaggcgctttgggcaccaagcttggtggccgcataggcggagacataggagccgatttgcgcggattgcagcagcgtatggccagcggccaagccagccagcacagttcccatgaacgagtcgccgcaaccggtggtgtccaccgcattgacttgcgcggcggatacgcgatgccaacgtccgttctcgatcaccaccgaccccgacgcaccaagcgtcactatcgcccggtcgaatccgtaatcggtgaatcgttcggcgacctcataccagtcgagtgattccacatcgccgtccggcagacccagtaactgagccacttcatgctggttgaccagcagaatatccgtggcttccaccagttcgtgaggcagctcgtccataaatggcgagtcgttgagcagcacggtcacgccagcgtcatgcgcggtctgtgcggcggcgataacggtggagatcgggctctccaaacacagtcccaataccgcgcattcggcgatggtcgtgcgatgtgattgcacatagccggcacttgccttggcattggaacccggcgaatagacgatggtattctcgccctcagcgctcacggtgattaccgtggtgccgctggggccttcaacgtgcaggatatcggcggtgtcgacgccggcctcatccagcttgcctaataggaagtccgcgttggagtcctcgcccaccgcgcccagcaactggacattgacaccgaggcgagcagcggcagacgcctgattcgcgcctttgccgcccggcaacactttcatggcaccaccattgacggtttcgcctggcttgggcagtcgtttggtggtcacggtgtaatcggcgttcatcgagccgaccacgattaccgagcccggcgcatccttcagcgcttccaatcgttcccgtacgggctcgggcatctgtttatgttcttcttcacttatcaccatgggctccaagcatagtaggcggcgggcccaaatgcgcgcatgatcagccgcgcagcttacgaagacgctcgtgcatggccaccatcagcaccaagagcaccagcaaataccacgggtagagactgattgtcacatattgcgcgatgatgccgaacagtggcggcatgagcagtgagcccacataggcacaggccatctgcacgccgacgacggcctgcgatttgtcttcgccgaagtaggccggcgtcgagtggatgacgcacggataaatcggcgcgcacccgaagccgatgaccaccagcccaacgaccacgccaaggtggtgaggcaatggcacgaacatggtgaggatgccggcgagcaccagcacttggccgaggcgaatcatgaccgggtccttgaatcgcatggtcagaaagccggaaagcgcacgccccacggtgatgcctacatagaataggctggcccagctggcggcggtgatcttgtcgatgccgctgtgcatcaccatgtagctggaggcccacagacccgccgtggattcgatggcgcagtagcagaagaacatcacgaggatttccttggcaccgcgaatggcgagcacgccggccacgccgagcggtttgcgttcagcaacagacgccccttcagcattaccacatccctcggcattgccgtcagatgatgcggcgccatcggtcgattcgccgcccccagtcgtgccacgtttcttccacagcggcaggctcagcaccaggatgacggtcagcatcacctgcaggatcgcgatgtaccgatagccccacggccagccttggccttgagacagcgcatagcccatgatgtaggggccgaccgatgcgccgacgccccacatgcagtgcagccagctcatatgccggctttcgtagtgaatggctacgtagttattgagcgccgcatccacgccacccgcgccaaggccgtacggtatggcgatggccaacagcacccagtaattcggggcaacggagaaacctgccaaggccgccgcagtcaacgccaccgaaacggcggtgaccttgcctgccccgaatttcaatgtcattcggtccgaaagcaacgccgagacaatcgtgaacatggaaatcaccgcggagatgccgccagcccacgccaccggcacgttcagatcctggctcatggtgggccatgcggacccgagtagcgaatccggcaaccccagactgataaacgccacatagatgacggcaagcaacagactggccatgttacatctcccattcacagtacggcaccggttgtgataacgatgtcatcagtctatcgaatgactcatgggcaacacgcataaaacatatgacaacgtgctcacctcaaacgccaattacggaaattctcggtaagcacgatgtcattatcagcgacgtcttcgatcaggtatcgatcttggagcggtcgaaatcgtcggcgttgtcgacgatgaactgcttgcgcggcggcacgtcgtcgcccatcagcaggctgaagatctcggatgcctgggcggcgtcctccatgcggatgcggcgcagcatgcgcgtgcgcgggtccatggtggtgtccgccagctggtcggcgtccatctcgcccagacccttgtatcgctggatgtcgtcgttgtaaccgatgtgcttcttgtcgaggtcggccagtttgccggccagctcgtcatcggaatacgtgtagatgtattcgcccttgtgcgagccggtcaacgcgatgcggtgcagcggcggtactgcggcatacacgtagccgtgttcgataagcggccgcatgtaccggtagaacagcgtcagcaacaggatacggatgtgcgcgccgtccacatcggcatcggtcatcatgatgatcttgtggtagcgcgactgtccgatgtcaaagctctggccggagccggcgcccaccacctggatgatggccgcgcattccttgttggagagcatctgcgtaatcgacgccttctgcacgttcagaatcttgcctcgaatcggcagcagcgcttggaaaccggcgttgcgggcggccttggcggtaccgagtgcggaatcaccctcgacgatgaacagttcggccacgtcgtcattgcccggctggcagtcggagagtttggccggcatcgaggcggattcgagcgcgttcttgcggcgcgtgacctccttggccttgcgcgactggatgcgtgcgtgcatttcgccgacgatcttctccagcacgcggccggattgttccttgtatccgcgtttggagccggtgatcatctcgccgaattgcttgtcggtgagccgggtgacgatcggcttgacctgcgcggtgccaagcacgtccttggtctggccttggaactgaggttcggccacgcgtgcggtgaccacggccacgagtccggcttggatgtcgtcgcgctccaccttcatggcggagtccttcatgttcaccttgagcttgcgggcgttgtcttccaccgccttgcgaatctgcttggtgatggcgttcatgaaaccgtccacgtgagtaccgccgccgggcgtctccacgatgttcacgaagctcatgattgtggtgtcgtagccgttgacccatcgcagggcgatgtccacgccgcaggtgcgttcgatttcctgggcgtgcagttcaccgccttcgcccacggtctgggtctcctccttataggtgccctcgccttggatgcgccagatgtcggagatcggctcgcctttggataggaagtcgacgaagtccttgacgccgccggtgtgcaggaattccacgacgcgcgggtgcgcgggctgctcgccgaacgcgccatcgacgacctggtcgccggccgtcagcgagaagtcctcctcggacaggctctcggtactgtcggcttgagcctcggtggagtcgtcgaagagttcggcatcgttgaacgagacgtccaaagccggggcctggtcttgcgcaggttcgactgcgtcggcatcaatggcttcggcggtgtcagtcgccgtttccggtacgttttcgtcaacaatggtgattttgagtccgggcaccaggaagctggtctggcgcacgcggtcgatgagctgttcgtatgagaattcggcggttttgttgaaaatctccggatcataccagtagcgaatacgggtaccagtggttttgggagataccttgccgatgatttccagctcggtgggtcggttcttgcgagtgcgcttgaacggggaatcgggagacggattggccgggtcggcatccgtgtatacgccagggtgaccttggtggaaggtcatgtggtgcgtcttgccgtcacgatccacttcgacgtccagtcgggagctcagggcattgaccacggaggagcccacgccgtgcaggccaccgacggcgttataagacgagttgccgaacttggcaccggcatgcagtttggtcagtacgacctccacgccggacaggccggttttcggttccttatccaccggaatgcctcggccattgtccgcgacttccacggaaccgtcggtgtgcagggtgaccacgatatcgttgcagaagccggccaaggcctcatccacggagttatcgatgatctcccacaggcagtgcataagaccctgcgagtcggtggtgccgatgtacatgcccggacgcttgcgcaccgcatccaagccctcaagaacagctaggtccttggcgccgtattcttctttgggcatacagtcctatttttctcttcaaatgcttggctcccctcacagaggggagccagatgatcattgatccaggaagtcgcgcagggtctgcgaacgggacgggtggcgcagcttggacatggtcttggactcgatctgacggatgcgttcacgggtcacgccatacacacggccgatgtcgtccagcgtcttcggctggccgtcttcaaggccatagcgcatcttgatgacgccggcctcacgcggagacagggtttccagcacctgcttgaactgttcctgcagcagggagaaggccacagcgtcggacggagcgatggcgtcggtatcctcaatgaggtcgccgaactcggaatcgccatcctcgccaagcggggtgtgcagggaaatcggttcgcggccgtacttctgcacttcctgcaccttctcaaccggcatgtccagctcgcgggccagctcgtccggcgtaggttcacgccccagatcctgcagcatctggcgctgtacacgggacagcttgttaatcacttcaaccatgtgcacaggcacgcgaatggtgcgggcctgatcagccatggcacgggtgatggcctgacgaatccaccacgtggcgtaggtggagaacttgaagcccttcttccaatcgaacttctcgacggcacgaatcagaccaaggttgccttcctggatcaaatcaaggaagagcatgccacgacccgtgtaacgcttggcgagcgagaccacaagtcgcaggttggcttccagcagatggtccttagccttcttgccgtcggcggcggcccacttgagttcacgcttgcgcttgaactccatgccttcactttcggtgtcgagcaggtgctgggcgtacaggccggcctcgatgcgctcggacaggtcaacttcctgttcggcgttcagcaggctcacacggccgatctgcttcaggtagtccttgaccgggtcggcggttgcgccggccgcgatcacacgacgcttcggattgcccgaagggatgatgttctcttcctcatcatccgtgtcggagaccacgtaggcacccttttccttgggctgctcgggtgccttggacttggcttcttcctcgtcctcgtcgtcttccacatcgtcgtcgtcggcatcgtcctcatcgaggtcttcgtcgtcggcatcgccttcgtcaacgtcgtcaagatcctcgccgaggtcgtcaacatccaaatcgtcgtcgttgacctcggcatcgtcatcaagctcgtcatcgacctgagtgtcctcgtctttgacgagctcatcgtccttggccttcttcgcggttttcttcgcggcggacttgcgcgtggtctttttcgagggctctgcggacttggacttcttggcagaagtcttgcgcgcggtggtcgtagagctggccttcttcttggtctcggtctcctcgctggactcggctgtctgcttggttgccgtcgtttccttcgtggccaaaactgctccttctgatctctcgccgtgaagtgcatataccacacgggcccacttctggcaagggcaaatcgtcaactatgtgagtaaaccaccctccacggacgattattcccacatcgttgcccgacgtgttgccgatcaccacacgctttccttccgcgcatcgcgcataaaacctcggaaatccgccgtttctgttcattcagcccgagcaccatgccggtgccacgcctcgatcggcggctgagaatatcatcgccgccagcgaacaatcctcatcgagcagcaggcatcgcaaggcgaacaccattgctcgcggatcgcccagccaccataaggtgtaggcgatcacggccaatggctgtatgcagtacggcaccggtgaggcttccgcgatatcgagcaacataccgatgccggcatggcaacgctccttatccggcatcatgccttcatcctcgaatgcgcaggtcagcagctcgcccattcgtgttctcgtacgcgccagatgcggtcgcgccgcgaattccatgagccatgacttggggcaacggctttcatcaataaccaacgagagaatcagcgcatcacgaatcgataaggtctcacgcatgcccaccgcaaacgcggccatcgtctctcggcctaggtcggtgttcccggcatcaagacaagacagccattcgtccaatggttcggccacccagtcggcattagcctgttgcgcgcctcgaagtcggcgatcattgcgaaattcctgtgatctcgtctccaactcgtcaaagccaaagggctccgtctgctcggcggcgtgccgtttggcgtgtcggctcttacgcggcttgtgcggcgtgttgttgttcatcatgtcctccttgactaatggtgtgcaatctattggtgttgtggtgcgcgccgagccggatagctcatgcgccgagggggtgtgtgcccactatggctgaaaacgccatatgacgcaggaaaaaacgaccattgtggttctagcttcaaaacccttgattcccaacgttcttgtgttcttcaaaccctgtggataagttattaggcatgtgcacaactgctaacaaccgcgaaatcatcgagccacgcatcattcagttggtgcgggaactgactgccgcccccgccaccgacgaggttgccgacgccctgaaaccggtgatggaacaggttgtgggccaagccgcctcctccagccaaggaggcaaacgactgcgtgcgctactcgcattggacgccttcgatattcttgccggcgacgtgactcctgatcggcgtgacgccatgatcgacctggcctgcgccattgaagtgtttcagacggccgcactggtgcatgacgacatcatcgacgaatccgatctgcgccggggcaagccttccgcacatcgtgccttggaacaggccgtacacagcggtgccataggccgtggcttgggcctgatgctcggcgacattctggccactgcctgcattgaaatcacacgccggtccgccagccgtcttcccaacaccgatgccttgaacgaggcgtttcttaccatgcagcgcgaggtggagatcggccagatactggacttggccgtcgagatgaccccgttgtctgatcccgaagctctggcgaacgcctcattgaacgtattccgctggaagacagccagttacaccaccatcgccccactgctgcttgcactgctggccgcaggagagagcccggatcaggccaggcattgcgcgttggccgtaggccggccgctcggactggcgttccaactggccgatgacctgttggatgtcgtcggatcaagccgcaataccgggaaacccgttggcggagacattcgagaaggcaaacgcacagtgctgttggctgatgctctgtctgcggcagatacggaggataaggccgatctgattgccatcttcgaagcggattgtcgcaacgacgaccaggtagcccgcaccattgaactgttcacgtcgaccggtgctcttgatcgatcccgcgagcgcatcgctgccctatggggtgagtcccgtaaggcgattgccggtcttgagctgaattccgaagcgcagcgccgtctgaccgaggcttgtgcgcgattcgtccccgaatccttgcgatagtccacaatgcgagccgccgggtcatgagaccatgaacaccggtgaaaacccgtgaaaactatgcgccgatgctccggccgcgtaaccggggccatgtacactgaacatgtttagtcgtgattaaaggaaccgtacgatacaacatgagtgagaacgagcccgcgcagatgattgagggacgctaccgcatcgtgcgcaatatcgccgagggtggtatggccaccgtgtatgaggccatcgatgagcgtctggggcgcaccgtggcgattaaggtcatgcacacacaactcgccaaaggcccgcatcgggagcagttcgtcgaacggttccgccgcgaggccaattcggccgcgtccatcgccaacccgcacatcgttcaggtgtatgacaccggcgagttcaatggacttgattttctggtcatggaatatgtgcatggcgtcaatctgcggcatgagatgaacgcccaaggcacattctccgtacgtgagacgctgcgcgtggtcgcggagacgctggatggtctggcttccgcacatcgcgccggcgtggttcaccgtgacatcaagcccgagaacattttgatcaatgatcgcggccatgtgcagatcactgatttcggtctggccaaggccgccagccaggccacattgagctccaccggcatgctattgggcaccgccgcttatctggctcccgaaatgatcgagaacaatcaggccaccgcgcaaggcgacctgtattccgtgggcatcatggcatgggagatgctgaccggcaaggtgccgttcgattcggataatccggtgacgcttgtcttcaagcatgttcatgaggacgtgccgtccgtggccacggtctgtcagggcattgatccgtccgtggcggcgttcatcgcccatctgaccgcgcgtcaggtggatgctcgccccgccgatggcgcggcagcagctgaggaattgagccagttggccgccaaattgccgctggaggcgtggcaataccgtttgcatgccgaacccatcggaggtgatcataccgatgccaccgctgcagcgctggtaggcaatatcgccaagcaggccccgctgaccggcgtacctgccggtgcagcaacgttcgagccgtccgtaccggcgtttttggccgatgatgtcgcaagcaataccgccgataccggtggcgccgcagacgtcaatcctccggctcctccggtcgcccccaccacggcacttgattcgtcgacgccagccgatgcttcggctccccataagacgcaaatcatggcacagtccggcagcgagacacaagtgctgcctcaggccggcgatgccttcacccgagcgcttgccctttccgatgagccggacgtcgcttccaacggcaccgggccaaagaagcagcgcagcaaaaaaccgctcatcatcgtactggtgatcgtgctggtactggctgcaatcggcggaaccgccggctggtggtggtttgccggaccgggcagctattggagtgtgcccaagccggatgacgtgacctgcgatgcgaatgcaagcaccgaatgctcgttggccggcgcggattgggccacgtatgagagcacgttgaaggctctcggcatcccctacaagacgcacaaggaatacagcgacgacgtggcggaaggcaagatcatctcttcttccgtgaacaagaccaaggccgttgtgaacagccgcataagcaagcgagccaatcaggagcttacggtggtggtgtccaagggcgtgcggatgaccaccatcccgaaggatattctcgacgcgaattcggccaatggcaaggacccgttgaacgcgctcaagaaggccggcttcgataatgtcaagcatgacgagtcgaaggatgagtattcgatggacacgccgcagggtgtggcattgacgatctcccctgatcccggtaccacggccaagcacaacgatgaggtgacggttactttgagcaagggaccgatgccggtgaccatgcctgacatcgtcggtaagacccaggatgagatgcaagccgcgctcggcgagttgaagctcacggccaatgtcaccgaacagtacgatgacaaggtcgaggccggtcaagtcatttccgcgtctcaggaagccggagctcagctgaagtggggcgatagcgtggacgtggtgatttccaagggtccggagatggcgacgataccgtccggccttgtcggcaaacaggaaagcgccgtaaccaagacacttgaaggtctcgggttcgaggtgaaaaccgacaaggtgctcggtggcctgttcggcacggtacgtaccgtgaaaagtggcgatacggacctctccaacggcggcaagattcgcttgcgcgacgccaacggcaaccccaccgtcatcaccctcaccatcgtgtgagatttgaatgaggctccctctgtcttcagacgagggagcctcatttgttaattacttttcggcttcttcagcggcctgccgggccttgagctcggccttgaccttctgggcgtattcgttcacgaattcctgaccgctcattttctggattgcggtggaaacacgatcggtcagcgaacgcaaatcatcatgtgtaatttcatcagccggcttcttcgcaacctcaatcggcttgccatacaacaccttggtcttgcccttcttgggaatcgacgtgccaatcggctgcagcttgtccgagccgatgatggcggtcggaacaatcgggcaaccggtctcgagcgcaagtcgtgcggcaccggtgtgtcccttgtacagtcgaccgtctgggctgcgcgtgccttcaatgtggataccgaacaggtgcccatcctcgataatctcgcgtgcatgctcgagtgcgccaagcgacttgctgccaccggaacgatcaaccgggaacacgcccacggacgtgaaccaccacttcttgaacttgcccttcaatcccttgccctcgaagtattcggctttgcccatgaagtgcaccatgcgcgggcaggtaatcggaatcaaagcatcgtcaatcaccgccagatggttggctgcgataatcgcgccaccctctcgaggcacgttattcagtccgctgacagcagggctcaaacgatgatgagcaatagggccgagacctttgacgaagaaccagtagagcacttggcattcctcccgcagacgaactagccattggccggtcgcctgattagagtgacagttatgactgagaaccagaatagcaatgccgacggagagcggccaacccccacgccgggcaatggacaggattccgatacttcgtccaagtcgtcgactcccggtgccgccggaccggccacgaatggtgccgatacaccgcaatcgcatgacatgaacgatttggatgcggcgtgggccgcgttcgaagccgagcatcaggccgacttgcatgacgtggcttcctccaggcaggccaaaaagttcgagaagcaggccaagaaacgcgagaaggaagcactgctttccgtagatgacttggatatcggctcgttcaccgatgatgctcgcccgagccgtggcggcaaaaaaggcaagcagtcaggcccccgtgatttcaccggctccagctggctggataccgataatgtgatggacgcctatgatgatggcggcttcactcccccgaaccctgatcttggtccggtcaaagcatctacggtactgctgacggcgttgctcatcatcggtctcgcaggcgaaacggtgatgatattcgttcccggcttgaacgcgattcctctcttaggtgcgctgctcaatattctcttcgggctgggcgtcattttgggtctgggcggattggtggccaaaatcctcaaccgcaaagaccgcccaggggaccggggcggatactacgacgacggcgcgcgggtctaacgcttggactgggcggtttcgatccacttgttgaacagggcttcagccttgccggagtcgacagcatcctcggccagcttgtaggcctcggcgaagcgctcggccagtgtgccgttgccgaccagattgccgtcagccacgatggcggaggcagcgttgagcagcgcggtggtgcgggacgtaatgtccttgccggccaggaagtccttaaatgcgttggcgttgacgtccggcacgccgcccttgagctggtcgacggtaatcttggcgagacccagatccacggtcgggtcgaactcggtttcggtgaccttgccgtcgcgaatctcccagacggaaaccgggccggtgggggcgagctcatccatgccctcatgcgaagtgtagaccaagccggactgaccacggctggcgtagacggcagccatgatcgggctcaccttgcggttggcgcagccgatggccacgtgcgccggattggccgggttggtcaacggtcccaggatgttgaagacgcacggaatgccgagcgcggcacgaatcgggcccacgaagcgcatggccgggtggaaggtgcgggcgaacgcgaaggtgatgcccacctcgtcgcccacttcgccgacggcctccggcttcaaatccagcggcaggccgaggtcttcgagcacatcggcggcaccgcacttcgaggatgcagcgcggttgccgtgcttgacgatcttcacgccggctgcagcggcggccacggagcccatggtggacaggttcacggtggcgaagccgtcaccaccggtgcccacgatgtcggtggtcccaccggaaacgttcagcggcacggcgtgggagaccatggccttggcggcaccacgcacctcgtcggcggtcagtcccagctgctgctgcatagcgagcgcggcacccacggcggccggattggcgttaccttgcatcaggtcgtccacgaaccactccgattcctcagcagtaaggtggtctcccccgaccagcttggtgagaatcgacttccatgtgatctcggccatgatgccctccttggcgtttcctacgccgtgtgatgtatgttcgccgctcattgtaatggttcgtcatttcaaggccctgaatcttccatattgcaaaatatggcgctattgctgttttcgtggatgtcggttcgtcgtcgagccgttggtttcgtaagcgtgaggggcgttcccgcgtattctgttttccgaccaaagaaatgaatcacgaagaacgcctgggcaaaagcccattcaccggattgccgaacgtcaaaggcacggttgcagaggatgcgcggatcacggattcgccgccgcgttccgaacccgtgctcgagatccgggtgcgtccacgtgcgggtatgctccgatgctcccgatgcggaaggaggcgccgcgggcatgaccagggcggcggcgtgcggcgtcgtggtcgcttccgtgccgtgggccgagccgggcagccggtccacacgcgatttcgaatcggaacgcgcgtggccgatgagcgttgcgaaccagaagaccgtaagcggttttccgtacgtcgcgtggcgcgccgccggaagacgccgcccatagggtcgccgaacggttgaaagcgtcgatgctgtctccgttcggcggcctcacgtcgatcggcgtggacgagaccggctaccgcaaaggccacacgtgcatcaccgtgatcgtcgaccacgaacggcatcgggcgatatgggcgcacgacgggtacggcagggacgtgttcggcctgttcttccaaacgttgacgcccgaacagcgcgcctccatcagggtcgtcgccggggacggggcccggtggatcgactcatgcgtgcatgagtggtgcccgaacgccgaacgcgcgcccgacgggttccacatcgtcagttggacgagcgacgcgcccgacaaagtcaggagacacccgtggaaccaggcgcgccgcgacggggacgagaaatccgtcaagcgcatgcgcggcgtcagatacaccgtcctgaagaaccccggcaagctgaccgacagacggtccgaggcgtccgggaacctgcgggaca

SEQ ID NO: 1681 - DNA, 25623 bp, Unknown
  R221_24m  MAG No. k141_161884
actgacttcactcccgaaacccctgttctcacccccatccgcgaccacgctgctgaactggcaaaagccgaagccggcgtggccgagatggccgccacgcgctacaaccgctggtacccgaagttccacatcgcctccaacggcggctggattaacgacccgaacggcctgtgcttctacaagggccgctggcacgtgttctaccagctgcacccgtacggcacccagtggggtccgatgcactggggacacgtctcctccaccgacatgctcaattggaaacgtgagccaatcatgttcgccccgacccttgaagaggagaaggacggcgtattctccggttccgcagtaatcggcgacgatggcaagctcaagttctactacaccggccaccgttgggccaacggccacgacaacaccggcggcgactggcaagtgcagatgctcgccgagccggacaacgacgagctgaccagcgccaccaagcgcggcatgatcatcgactgcccgaccgacaaggtcgaccatcactaccgcgacccgaaggtctggaagaccggcgacacctggtacatgaccttcggtgtctcctctgcggacaagcgcggccagatgtggctgttctcctccaaggacatggtccgctgggaatacgagcgcgtgctcttccagcacccggatccggatgtgttcatgctcgaatgccccgacttcttccccatcaaagacaaggacggcaacgagaagtgggtcattggcttctccgccatggggtccaagcccagcgacttcatgaaccgcaacgtcaacaacgccggctacatgattggcacgtgggagccgggcggcgaattcaagccggaaaccgagttccgcctgtgggattgcggccacaactactacgccccacagtccttcaacgtggacggccgtcagatcgtctatggctggatgagcccgttcgtgcagccgattcccatggaggatgacggctggtgtggtcagctcaccctgccgcgcgagatcacccttgacgatgacggcgacgtggtcaccgcgccggtcgccgaaatggaaggcctgcgcgaggataccctcgaccatggttcgatcacgctcgatatggatggggagcaggtcatcgccgatgacgccaaggccgtggaaatcgaaatgaccatcgacttggctgcctccactgccgagcgtgcgggcctgaagattcatgccactgaggacggtgcctacacctacgtggcttatgacgaccagatcggccgcgtggtggtggatcgccaggccatggccaacggcgatcgcggctaccgcgccgccccactgaccgacaccgaactggcctccggcaagctggacctgcgcgtgttcgtggatcgcggctccgtggaggtctacgtcaacggtggccaccaggtgctgagctcctactcctacgcctccgaaggcccgcgcgccatcaagctcgccgccgagtccggtagtctcaaggtggattccctgaagctccaccacatgaagtccatcggactggagtagctctctcacctccctcacagagggaggttttttgtgtgcccctgtcgttcgccttcgcctatactgatggacggcatataacacaatccatcacacgaccggcaggcgcgcaggctcctcaccttactgttccacgccccggccgcaagcgccaccagcaaaccggactggcgcggaaagcaaggtgacatcccatgtccatcgccaagcgcctcaagcgccgcatgcccaccgtcatcgccgtcatcgtattgctggcagtctgggaaacgtgggtggatctaggacatgtctcccccacgatgatctccgcgccaagcgagattttcgccgccaccatcgaaacgtggaacacgctcggcccggccgcggcgatcaccggctatgagggcgtggtcggcttcctgttcgccgtgttcttcggcattatgatcggcatcgcactgtactgctcgcacacgttcaacgcggcgttctatccgctgcttgccgccgcacaaaccatgccgctgatttccatcgccccgttgttcctgatttggttcggctttgagatttccggcaaaatcgtaatcgtggcggtattcggcctcttccccatcgccgtgcagaccgtgcgcggactagaagcggtgccccagttctattccgacgtcgcattgacctgcggcgcgaccccggtctggacgctctggcacgtgaagctgcgcgttgccgcacgtcagatctatggcggtatccgcgtatctgccgcatacatcttcgccacggcatccaccgctgaatatcttggcgcgcgcaagggcctcggcatctggctgcaggctgcctacaattcgttccgcacgccgctgatcttctccgccaccatcgtcattatcctgatgacatgcgtactgatgctggcggtgaacgccagcgagcgcatcctgctcggcccggccggcgatgacgaagaccccgacgcggaccagtagttctttttaccgtcaaagacacaagccggcggccagaaccgactgaacggggcggcttctcatgaggtctccagccctgtctctataatggaacagctttaccagcgtgtggcaaaccggctttcttgagctttcatagggaatgccgggggcgctggtcgaacggaaatcaaggccctccatatcgttttctgccgacttccgttcgaagcaatcccagagaacgatagagagacaacgaattagggaaccatcattatgaagaaaagccttgtatccaaggccgctgccctcgtgggcgcccttgctatgactttcggtttcgccgcatgtggtcagaccaacaccgccgactcctccaactccaacacctccgacctcaagaaggtcactttcatgctttcctgggcgcccgataccaaccacatcggcgtgtacgtggccaagaacaagggctacttcaaggatgccggtcttgacgtggatatcgtggccgtggcccaggccggtgccgaacaggccgtgaacaacggtgtggccgacttcgccctgtccaacttgaccaatgtgggcatctacacgctgaagggcgctcacatcaagcaggtgctgcaggtgcagcagaagccgagcgccatttggtgcgcactggcgtccaacaccgccatcaagtcccctaaggatttggatggcaagaccttcgccaccttcggctccaacgagtccgatgccgtggtgcgccgcatgatccaaaccgatggcggcaagggcgagttcgacaaggtgaccgtcggcacctccaccttccagaccatggaatccggcaaggccgatttcggcggcttctacgccacgtgggaaggcgtgcaggccgacatgtacggcccgaagctcaactgcttcaccgagcctgactacggcgtgcccggcaacgccgacgccatcggcatcatcaccaacgacaagaccatcaagaacaatcccgacctggtcaagaagttcactcaggccactcagaagggttacgagtacgcgtacgccaacccggatgacgccgcgcagattctcgtggacgaagcccctgacgccaacctcaagcccgaatttgtcaagaagagcatgcaggttatcgtcgacggccagtactggggcgatccggccaagatcaaggacggctctttcgtgctcggcaccaacgacttcaagggcactcaggaatacttcgacttcctggctgaagaagacgcctacactgacagtcatgacaaggtgattcatgaggccccgcaggccaaggaccttggcaccgacgaattcctcggcaagtaatttccgatattccgagtttgaatctacgcaaaaatgcgtccttcccatgaggaaaggacgcatttttgcgtatcggccgataaggttattcataacgaatcatgctaacaaggaggcgattccatggcccaacgtcctgaccgcattattgccagcatggataccggtgttgatgatgcgttggcgttggcgtatttgttggggtcggcggatgagtgcgagctgagcggtgtgatcgccagttatggcaatgtggatgcgaacacggcttatgccaatacttgcgcggtgcttgatttgtttggccgggcggatattccggtgtttttgggctccgagcatccttcttgggctgatgcgtttattcccgatgcagggtgtgcccagtttcatgggaaggatggactggggaatacttggctggcaggggccggggctctggctgatggagctggtgtgcctggtgatgatatgtctggggatgacatgtctgaggatgtgcccgatggggttgtttctgttggcgggtatttggtaggggacgctcatgctcatccggcgtcggggtcttatcctcgtgtggggcgctctcggcctgtggaccgtccccagtcggctacatcgacagctctcgtcagcgggggcacaaggaggtgctccgttgatgctgcggatgggattgagtatctgattgagcaggttcgtgagtttggccgagacgttaccgtgctgtctaccgggccgttgacggatgtggatgcggctattactcgggcaccggatattgcaccgaaactcaggctggtgatgatgggcggtacgcttacccaacccggcaattgttgggatgcggtggccgagacgaatatcatccaagaccctgaggccgcgaatcgtgtatttcattccggcgcagacatcacaatggtgggacttgatgtgactcaccagtgtttgctaccgcgatcggcggccgaccagtggcgtgcgacggggaccaagcgcgggcggttcttggctgatctcgcggacttttccatcaaggcaaatttggaagccgaccccgcactgttctctggcggcatgccgttgcatgatccgttggcggcggcggttgcacttgattcttcactggtcgattgttttgatcttgcgttgcgcgcggagaccaataccggtgatttcaatggagtacgaggtcggaccaccggagacccggttgggctggtgaatcattccatgccgcatgtgcatgtggcacttggtgcggattcgggacgttttttggatgagtttgcagagaggatggctgaggtgtgccggtaactcccctcagtccgctacacggacagctcgaccgcaattacggacaagctgccgctcgcattcttctggctcgactctcgtctcgccttcgcctacaaacagcccatcgggctgtttgttttacggctcagccccctcaattttgaggggcttaacaaggactatttcacacccccagcaatcaaggaccggcttcgccggactcatcattacctggtcatgtcctatcggcctcggccaggcggcgtgaacgaacagtccaccggactgttctttatttcacgccgccaaatcggcgatcgcggtggatgtaatggtcgatggagcgccatagcacgtcacggccgcagtccgggaagagttcgggcacgaagtcgagctcggcgtaggcggcctcccacggcaggaagttggaggtgcgctgttcgccggaagtacggatcaccaagtcgcaatcgggaacgtccggattgtacagatggtcggcaatcatcttttcagtcacacggtcgccggaaatcttgccatcacgcacttcgcgagcgatggcggcgcaggcgtcggcgatttcagcacggccaccatagttgatgcagaacaccacatcgatgaccttgttgttcttggtacgctcctcggcggcctcaagctcgtcgatcaccgacttccacagcttggggcgacggccggaccaacgcacgcgcacaccccactcgtccatctgttccacgcggcggtggatgatttcacgcgagaagcccatgaggaagcgcacttcctggggcgaacgcttccagttttcagtggagaacgtgtacaggctcaaataccgcacaccggcttcgatggcaccggcgatagtgtcgaacaccaccggttcggcggcctgatgaccattggtgcggaccatgccgcgctgcttggcccaacgaccattaccgtccataatcacaccgatatggcggggtaccttgttcttggggaagtcgggaatacgggcaaggtcgctgaacggagctgcgggaatgtccaacgacgtgtaatcaacgttctcaaaagccatactcatgaatctatcaagcgcagcgaacgaatcgggcgttcgaggtaatactccccccaatcttcaaccaactcctgcacaaccctctccacaggcgcggcatcaagcaccgaccaatcgccacgaatcagtgcatcgaactggtttaacacgaacggcgcgatacggcgcgcatcggtagtgtggtcggcttcgcacatcacgccgccggacgcgatggacaggtacgccggctccgccttgccgcataccacgcaagtacccaatcgtggcgtccaaccggccaaggccaaggcgcgcatcacataggagtcgcctatggcttgcggggcgtgggattgtttggcgagcgcgttcaacgcgccgatgagcagccgatattggttcgtcagctgctcgtgttcggtgctggcgagtttatcgatggtctcgacgatgacgttggcggcctcatacgccgcataatccgccgcgatcggagcaccgtaagcggcgaccgcttcagcctgggagaccacgtcaagcgagcggccttcagcgataagcacatcgactcgcatgaacggctcgagcctggcaccaaagcgtgatttggtgcgacgcacgcctttggcgaccgcccgaatcttgccatgcccacgtgtcaggatggtgatgatacgatcggcttcgcccagtttggaggtgcgcaacaccacaccttcgtctcggtacagcgacatctcatctcctttccccgcgacgcccggcagactctactcaatgaagtagtcagtaaataaacaggccccagaaggcgaacaccaacagtatgtacagcatggtgaaggccaccagccagaacaggactcggcccagacgggtggaggcgagtaccgggtcggcaccggtgacgatgtctcgaacggattcacgacgagggggtatctgaatcagtccgcgggcggaagcgacctctatcagatgcataaagacgcgggaccaagcccatagcaccagcacggacaccacttggatgaccggccagctccaatacatgacgcccggcgtctcggtaggagcgctgccccatgcaagtttgaccacacccataatcacctgtccaagtccggcaaagaagatgagcagtgtggcaagagtggtgagggtcaaagtcagcagcgcgttgccgaaaccatgtgcgaaaccgagtatcacaggccgttccggtatcagcatgcccgcacgtttggcctcgcgtttctcgcgccgccatcgggcatccgccgcgattttgcggcccagcgccgccagtgccagcacgatggatgcgagcagcagcagtaccaccgtgacgtgcaggatcacaccatatatggtgccgacgcgtcttgccttcaaagcgcccggcagaccgattgattggtacagattggtgccggccaccttttcgctggtctgcgtgagtccggcggaagtgccgacggcccaatcgatgagatcgtccacataggcgtccgcaaacggggtgcccgcttcggactcatcccccagacgcagcacatggttggcgaccggatagctgcgcacggtcacgttccagttatcggctttgtgggcgttgtagagaatcgcacgcacgccgtcgacctgcgccgtcatcacgtcttttgaaccgtaagccacataggtgggtacggcgtaagcggcgggtttgagcgtggcgaggtcggaattgttcagtccgaacaggccggtgtccgcgctgaacacgcgttggacgatggatcgatagccctcgttcgcgccgacaagagtgaagtcctgggtgacgaaaaatcccagtgattggcgtgggctgaacaccatcgggctcagaagaatctggaaggcgacgtccggatcgtcctcgagcagatatgaggagatccatgtcgattcggaggtggcatagatgccgaccttggcggcgtctacatcgctttgggctcgtaggtattcgatgacctgatcatatgccttggctgaggccggataatcgcggttgatgtcggtggtgctccagacgggtttgtcgagcactgcggtcacaaagccggccgaagccatatcggaggccacatcgccaaaggagttgtcacaggtgccgtatccggcaccgtgcatgaacaccacgccggggcgcttgcctgatgcgttctgaggttcccgaatcaataccttgatggcttggacgccgtccgcattggccttgccccgatcaccaggctccttggtcagattgccgtcgctggtcatgttcagcgtgatgtatcgctcggtgacctcatacgtgcctttcgccggcagcgtttctccggacgggttatcgaaggtgacttcggtatcgtcggtgagcgtggccatcgactggccggtgggttcgatgttccaaggcaccgtggtcaggttggaaatggagaccagcacgccgatcaggataatgaagatgggcaggctgaccatcagccggtgggtgctggtccacggcttggatcgaacagtcaggcgatgctcttcttcttgcgacacgtgcgctattgtaatctgaccgcgatatttacgccgagggcctattcggccgaatcagtgaccgggatgctggattgggaccacgaccgggccggtggaattgacgggcacttggccgtcggcctccatttgggcggcgatatcgttcgctatggtgagcagcgtgtcgacgatctggtcttcaggcacggtcttgatgaccttgcccttgatgaagatctggcccttgccattgccggaggccacgccgaggtcggcttcgcgtgcctcgcccggaccgttgacgatgcagcccatgacggctacacggatcggcgcggtcacgtccttcaggccttcggtgacggcggatgcgagctggatcacatccacttgggcgcggccgcagctcgggcaggagatgatgtcgaacttgcgggggcgcaatcccatgtattccaggagtttgcaccccaccttgacctcttcgaccggcggcgcggaaagggacacgcgaatcgtgtcgccaatgccctcggccaagagcgcaccgaacgccaggcaggatttgatggtgccttgccaggcggggccggcctcggtaacgccgaggtgcaacggccaatcgcccttggatgcgagcagtcggtacgtttcgaccatggtgatgacgtcatggtgtttgacggagatcttgaaatcgtggaagccgacgtcctcgaacatgtgcgcttccttcaaggcggaggccaccagcgcttccggagtcgggccaccgtatttggcgtagagttccttgtccagcgagccggcgttcacgccgatacgcagcgagatgcccgcgtcggtggcggccttgcagatgtccgggccgacttcgtcgaacttacggatgttgccggggttcacacgcacggccgcgcagccggcgtcgatggcttggaacacgtatttggactggaagtggatatcggcgatgaccggaatcggcgatttgcggcagatttccggcagtgcgtcggcatcgtcctgactcggcacggccacgcgcacgatgtcgcagccggcggcggtcagttcggcgatctgctgcaacgtggcaggtacgttggccgtgagcgtgttggtcatcgactgcacggagatgggcgctcccccgcccaccggcaccgggcccaccatgatgcggcgggacttgcggcgcgggtgcaagggcgattcgctggtcaggtcgaccggatcaccggttttgcggaacggcttttcgatgggattttccgtattcaaggtattcatcattgcttgtttatcaggttgtcggcgcgtcggcgggcttcaagctcaagctggttcatttcctccacgtccgtgaacagcggattaccacgaagctcggcgtccatctggtccagcacggctttgaccgtgtccacgatgccgaggtacggcagccgatgatcaagaaacgcatgcacggcctgttcattggctgcattgagcaccgccgtatgcttctcggaggcggccaggcagtggcgggccagttgcacggcggggaacgcctcatcgtccaacggctcaaaggtccaagttgcggcttgcgtccagtcgcacgcggcggccacattggtcatgcggtccggcgcggacaggcccagcgcgataggcagacgcatgtctggcggcgaagcctggcaaatcgtggcgccgtccacaaattcgaccatggaatggacgatggactgcgggtgcacggtcacgtcgatgcgttcaggcgacacattgaacaagcgggacgcctcgatgacttcgaggcccttgttcatcagtgtggaggagttgatggtgacaaccggccccatgttccacgtcggatgatgcagcgcctgctcgggagtgatgttctccatgtcgacacgtttccagccgcggaatgggccgccggaggcggtgaccacaagcttggcgacttcggcgtgggttccggagcgcagggattgccagatggcggaatgctcggaatcgaccgggttgatctggttctcgcgcacttgcgcgctgaacagcagatgaccgcccgcgactacggactccttgttagccaatgccagctgggaaccggccttgagcgccgcgatcgatggttcgaggccgatcgagccggtgatgccgttcaatacgacattcgcaccggatccggccatggcgatgaccgaatccggaccgccggtcacgcggacaccttgtgcgccggcctgtgcgagagccgcttgcagtgctggaaccttggtctcatcaaacaccgcgacttcgggcacatggaactgtgcggcctgttgcgccagcagctcgatatgtgctccgcccgccgccagaccggtgacggtaaatcgttcagggtgacgcgagatgacgtcaagtccttgggtgccgatggatccggtggatccgagaatgatgacggtggagttggaggctatgctcacttttccttcttcgtatcgtcattgttcagtgtggggaacgacaggtcggggatatccgaatcgaagttaccgccaagcgggaacagcagcgggaacgaatcgttggaatcgtgcttatcctgtgacggctgagctgcttccgtgtcgtgggaggcggcaacgtattcagatgattccacagccggacgggagaccgtgctgtctgcaggctgactatcggatacgcgaaccggaatggagttcgtgttacgatccggcttgctggtgggagcaaaggagaccggcatggcagcggacgcagcctcgtcggcagtgctattcacaggttgcgctgccggggcggagggtgccggggatgaaaccgaacccggtacctcattcaatttcagcgcattcggtgtatcaaggctgggcatcttgggagcgaaggacggcgcatccaccgccggaagttcctgagaaaccgcagccatgtgggcgagagcggccagagaggaaccgtcctgcaccatatccacgggctgttccgcgaacaccgatggggtcgatgacggagctgcggattcgtatgacgactgtgccggagcaaacgagggggcgctgccagcggtcacaccggaaaccggcgcggacggggcactggcgggaggctcagccgcaacagctgcggtaggagccacggaaggcgtctcggagacgggcttcgccgcagactcgttggacgtatgcaccgggtatgctgcgggagcaaaggaaaccggctgttccgcattggtgttattggtgcttgtggaagcatcgaacgatgcaggagccggcgcataggcgatcggtgccgccgcggccggcgccgcgggagcaaccggagccggagcagtgaacaagctctgctcggcctgatgcagggcatcgaatgattcgtcatgagcaacggcagacggcgcaaaacgttcgtcagttgccgggcgctgcgttccggaagcgaacaatggcgagacgccgttcgcttgaacggtcacgttcgtggcggtctgggcaggagccgtgggctcgccggacacgaaatcggccacacgtgcataggattccaagcgactcagcaactgcacgcaggcgttcaggaagtaatcgacctgtcgctcgtcatagcctttcttgcccttgcgctgggtgaagatcacattgttgaccgtattcgcattgagatcggccaaagaccgtacatcgtcttcggtcacgccgtcaacgcccaatgcggccgccgccttgtccacaatctggtcgaccagacgatccacctgcttcttatcgtacgaaggctgcttgggcgctccggacttgaagcgttcgcgctcgtcacgctccgcatggttctggacttcgtgatacagcttctcggtcttcgccttccacgtcacacgcccatgctgtgcgatctcccatgtggtctgcttatcgaccacggcacgttccagacgtccaagcgcggcgtcaacctgtgcgatcacatagccgttcttgcgcaaatcaaaggacacgttctgaatgtcatgctgggtgagattcatgccctcgctgtcatacagagcatgggcgcgctccaagaaagcgtccacctgagcggggtcatacccccacttgcgcttgcccgcacgtgcgatgcccgacttgccgtccccttcacgaagttcctgcgccatcggctattcgacctcctgctggatataaacactctgccacaactttacgtgactattgagacgcatctgaccaagaagaccgaaattcacgattttgtagcagtactgccggtttccttctgcgcgcatctcactgagatttcagaaccccttgccgaagactgtcagggaatatcgtcacagcccatgtctgtggaatgaggggattgcacgaagtgatgaaaaatgaaagtgggcaatgagggactcgaacccccgacatccaccgtgtaaaggtggcgctctaaccaactgagctaattgcccgcaaatgacaacaatagcgtatggccggcactgcgcgacacgtggtgtcgcatacgcgtgccgtagcgctcaatcgcgatgacattcagtcacgcccagcagcactacgcagcacgcgacgccagtcaacacgcttaaagtcaagcgtattgattgaggcttatcagcggcccctgccgaatgcgcgcaggcggatgccgttccagtccgagctgacggtcagcggggtggcggcgttcataccggcggtctgtgcggcggactgcacggtggaggagctggcggcacccgggcggccgggcttgggagtcagtatccacagcgggccgtcattgcccagtaccgcgtaggcgtcaacgatcgtatcggacaattcgtcctcatcatcgccgtcgcgccaccatacgatgacgccgtccacagcggagtcgtagtcctcgtccacgagatcctcgcccgtgagctcttcaatctgggcacgaatggaatcgtccacatcgtcgtcccagagccactcctgaacgatatcgccgggctcgaaaccaaattcttcagcgttctgtgatgccgtttgattcacaggggacacattagcaagtcttcgcgaacaaatgcgttaacgcggccgaaaatcgccgcattgtgggcagacccatgcgagtcgtctcaccagaaacaacgactggccgcgcgtgtcatgcctcgcaatgaggcaaatcgtcggcctgccccttgccaatggccaccaacgcctgatacgcctcgtccagcgtggcgaccttgacgtcgcgcagaccatccggcacgcggccggccaaatccgaacaattcgatgcgggagccaggaaccatgtggcgccatcgcgcttggcgccaagcatcttcagctctatgccgccgattctgccgactttgccgtccttgtctatggtgccggtgccggcgatggtcttgccgccgctctcgttggcgggggtgagtttgtcgatgagaccgagcgtgtacatcatgcctgcggacggtccgccgatgctgtccacgtgcatcgtcaccttggcgtgttgcaatgtactggcgtcaatgcccagttcgtccgcatgggctttggcatgcgccagaccgacggcactggccgaatcctgggaaccggccatgtcttgttcgactttcttctgatactggtccgcactctggcccaccggtaccgtggcctcacgcggcatgacctccacctgcggattggcccaaccccagacggcctgcgcgttgatgatcgggtacccgggcacgccggacgcgttcaccgtggtcagcagcagcttgccggaatccttatacgtcgtcacgccggtaccggtgatgtcgataaccgcaccatcctcgaccttgcccagcacgtcttgggtgggtccgggcatctcgatgacgtacgggctgggcagcagcagaatcaccacaccaagcaacacggcgaatgcaccgacgaaatggcgtttcggacgagcggccgcataggcccgagcacggctgattccacgagataggcgcgaatcatgcttcacttcgaacgatggcatgcgcccatcccccgcttccgaatccgcagtcgggctcttctgctcctggacgaagtctggttcctgattcctgtggcgtgcaaacataccctacagtgtaagcggagggccgaaatcagccgaaaacgaacataaaccgaaaatattgctcggccacgagcgaacaggcccgggcagaccctacacttggggtaacacaccgcggcaaagaaggatacgcatggacgacaacgcgattcacgagtggctgatcaaatgcttcggccccattcagggcgagatggcctggcagcagatcagccagttgcctgaggagatccgtgaacagctgatgagtcaggaccccagccgactgcccaatccatccgaagtccagcagatgatggccgcgttcagcgccggcggactcaacacgatgggcgatatgcagcgcactgtcgaggaagggccgatcaacgtcaagctcgccaagtcgattgccttgcagcaggccaacgcctccggttccgcgtccagcgtgtccgccgtggatggcgaggcggctcgccgcgcgatgagtgaggcgaacctgtggctggataccgcctgcgagttcaatcccgcgcccggcgatccggatgtgctgacccgcgccggctgggtggaaggcaccatcgaccagtgggcgaagttcgcagctcctgtggccgagtcgatgaacgacgctttggcttcggtgatttcggagcgtcttggcggcgcgttcggcgatggcgagattgccggcatgttcgccggaccggtgccgattccgattcccgacggcatgaaagatccagcccagctgatgaagctgctgggcaacacgtcctttgccatgcagttggggcatgcggccggcaatctgagccatgaagtgcatggcagtttcgatcagggcatcgcattgctgaagaatccggctggtggactgattgcccagaacgccaccgaatacgcgaagatgctgaacggtgagactcctgcgcccgaggccgatacggccggcacttcaaccgactcggtcaatccgttctccacatccaccgacgcttccgccaatcccattggcttcacttcggccggcaacagcgatactccggcaactgacggtaccgcccaagtctccggctccgatgcctccgccgacgccgccgcgttcgaggctgcgctctccggattcgagaccaccgagaaaattcccgaatccgaagtgctttccttcctggccctgcaggaaatggctcacgcccgcctgtatgcctcggtaccgtggctgatgccgcgtttcgaggcgctcatcggcaagtacgcacgcggcatctccatcgatctggatgcgatggaggaacagctgcgtgacgccacgtcgatggatccggagtcgatttccggcgcggtgaatctcaccaaggtcggcatccccgacactcccgaacagcgcgaggcgctggcttcgctggaatcgctgctggcgatggtcgagggctgggtggattgcgtggtgtggcgcgccggtatggcccatctgcctcatatcgaacagttgcgtgagatgatgcgccgcgagcgcgcgatgggtggccccgccgagcgtacgttcgaaagtctgctcggtttgcagctgcgccccaagcgcatgcgcgaggccgccggattgtgggagatgatcaccgccgccgaaggccctgaaggccgtgacgccaagtggtcgcatcccgatctgctgccttcgctgcctagcgacaagcccgcagatggcgcgtctccgtcatccgacgccccttcaggctcctcttccgatgccaacggttccgcctcccaccctgccgcagatggcaagaccggcgatatcgattgggatgccgaactgtccaagcttctcggcgaagacggagaagatggcggcaacggcaactcggaggatacgcaggcatagtcaaccgtccttcagccaattcccgttcctgaacgttcaggaacattcacattccttaccgacgcccgtcacaaaaatcgtgatgggcgtctgtgttgcgctccataaccatccttggtccgcgcatacgacaaatgcagcgaatcctcagctcgggtgatgcccacatacataagccggcgttcctcttccagcgcatcccccgtttccggcgaaccgtacggcaagagtccttccgaacagccgatcagaaacacgtgcttgaattccagacccttggatgcgtgaatcgtggaaatcgtaacgccgggatcgtcgtttgcggcaagtccggtggcgtccaaacccatcgcctccaatagcgcacgtttggacgcggcatcgtcggcgagcgcggatgattgccatcccgaatccttacggacgcggtatttcagtcttgcagcgcgcaaagcggcaccgaataccggctgttgggcgttgatgcgggtgagaatcgcgcaatcggacggcttggctccgttggcgaccaaccgggcgatgcgtgccgccacgccctgcgcctcttccatatcgctctcataagcggttcgggtaacgcgcggaccggattcgcgggcggaaaccagtttcaggtaatcctcacggttcggcgcggccgcaagcacccggttggcgagattcacgacttccggcgtcgaacgatagtcggtgttgagattgacatcggcggcgagcggcccgaattcatcggcgaaacgcagcagatcccagctggaggcaccggcaaacgagtagatggtctgggccggatcgcccacgacgcatacgttgcggttcatcgcgctcttgccgtcaggccctcccccgcccagccacagggtcagcagcctgtgttgcaggggcgagacgtcctgatactcgtcgacggtgagccagccgatggtggaacgaatttgggcggcggcttcgggaaaatcatccatgatatggcatacgagcagcagaatatcgtcaaaatcgatttcgccacgcgaggtcttttcctgctcgtaggcgctgtagacgtcggcgaaccgggcggtgtcaagtccggcgggcggctgccgatgggcgatggcacaggcccgggcataatcttccaccgccaccaacgagattttggcccaattgatttcggcgagcacatcgcgaacggtcagcggatcggcatcggtacgtgcggtggcgcggatgatcgcgcgggagacgacgtcacgctgatcttcgatcacatgcgggaatggagcctcgcatatgtccgcccagacgctgttgagctgatgcaatgccgctgagtggaaggtcgcggccgtgactccggcagttcccgcacccgaaccggaacgtccggcaccttcccctacgccgagctggcccaaccgtgcgcgcatttccgccgccgcttttaccgaaaaggtgacggcaagcacccgctccggcttccatgccccggtggcgcaggcataggcgatccgccgtgtgaccgtgcgggttttaccggcacctgcgccggcgataatgcgcaccggcccttgcaacgtagtcgcggcggtacgctgccgctcatcgagcccctcaagaatcccctgcgcctgttccatgcgtccattgtggcacgattcgcgctcacggcacgactcacgcctatggctgaatcgggctcacgacaaaacatcgccagaatcatgcgttttgcgtgtcattctgcggtgcgaatcgccacggatgtattagtgtggaagggtgatgaaacgtagcgattatatgttggcggcactcgcctcagccgtcctgccgaatctgggggtggccggcgtacgcgagaacgtgcaggccagcgcaaccgacgaggccaaaggcatcgatcagaccgtgatccaagatgcctcgggcaagttgtacgacgtatacgccactgacagcaaggaagggcgtacacgtctgatccgccgtgtgaaagcggcgcagacactggcagccgcgcgcgagcttggtggcctcggcttcgatatggaccgtgtggtcgcattcgtcccgggagacgtttcccaacccggccagacggccaccgcacaggccgtggggcagcaggcccaggcggagtccacaccgctgaccccgcgcaagcccggtcccacaggcgagacgaccgtgatgatcgccgtccaccgtgatggtcaggcgcggcctctcgacctgttgacattggatgactgcgcggccgtcggcacctccatcggagccattcatcgtctgccttcgacttttctggccaatgccaaatatccggtagtcaccaccggtcagattcgttcgcagctgaccgcctggattcgccgcttacgctccgccggccatgttccccaagaaatcaccgacagctgggcgcgcatcatggacaccgagggattgtggtcgttctccacctgcacggttcacggcggattctccgacggcgacttcctgttctccggttccaccatcaccacggtgaccaactggcaggatatgcaggtcaacgatccggcacgagaccttgcctggattttcggcaagctcgacgaatcccatcgcaacgccgtgctttccgcatacggccgcatgatgggctctcgacttgacgatctcatcatgctcagggccaacctgtggttgcagatggaacaggtgggcgaattcattcaggcgttgaaccatgcggacaacaatcgcatcatgcagttcaaggcacaggtcgaacgactcgcacaccagttgggcgtgatcaagcacactccggcatcggccccagccgcagggtcggccgccgcctcgtcgacgaagcccggttccccctccacaatcaccgtcggcacattgttgcaggacgaccgccatcaggcacccgccacgcaggtacccgcacaaccgcagcagtccgaaaccggtaccgcggcggccgaggtctcggacgacacgcccgatcccgatcgcaccggttccgctgacatcgtggccgctggcgacgtggatcttaccccggaagtcgaacccgatgctgaccggaccgccaatcacccgcaagcgagtgtctccggcaccgcaaccggtacgggatcgaccaaaccgcagccctcacatggcgcttcccattcttcggtgacgatcacgctgaaggagctcctcagtatgaacgggcatagcggcacgacgtcaaccgacgcttcccctgcatctcaatccgccgccccgaccgacgatgcggtgaatgacgatactccggacagtttcgttcagcacggagcctcgagtgcccaaaccacggtgattccgctgttggagcgggaagaacgcgctctgcgcgatgcccgtgccgggttggacgggtatgacagcgagggcaatccgctggccgaatcatccacatcatccaaataatgtcgtgtacggtgttccgcgccacgccgagcgcgtaacaccgcacatgacgacgcagacacgcggcacaatagagtacagaacctcggccggtgacggccacttaccatgatgttcgtcacaaagacggcagaacaaggagccttatatggatatcgaactgggcattcagaacgtggcacgaccggtgaacttcagcaccgacgaatcagccgataatgtgagccaggccatcgcgcaggccgtggccgacaacgcgacgatcgatatgaccgatgacaagggccgtcgcatcatcgtgcccgccaaggcactcggttacgcgatcatcggctccgaaaccaagcacgccgtcggtttcggcacgctgtgaccgtgaatcgcgcataagcggccttgggcatcatctcaaggccgctttgtattgccgcgaatcaccgatataacgggagcacgccgcgatgaacgatctcttcgacagtggcctcgtcggtgaggttctcccccagtttgttcggtttgcctttgccatgccagtcagatccgccggtgaccagcagctggtgccggcggcagatggtgagcagccgttctcgttgctccggtgaattgcctcggtgccatacctccagcccgtccaatccctcgctgatcaacgcttcgatctggtcatcggacagcagtctgcggttacggctcacatcaccggcatgggcgatcagaatcacaccacctgcccctttgacggcggccaccacttcatgagaggtcggcgagggcgtgggaatatagtatttggatgaggcgctgaccgcattcgcaaacgcttccgaacgagtccgatatacgccggcactcaccaaagcatcagcgatgtgaggccgcccaatggtggttttgtcaccctccttgacttgggcgagcacggattgccaggtaatcggataatcacgagacaacaattcgaccatgcgctgcgtgcgttgcaaccgtgcggctcgagtatcggcgaacaagtccgtgatgtgctgattcgtgggatcatactggtagccgagcatgtgtacggagacgttctcatccgtggcggtgatttcggtgccgcggagcaacggcaaaccgaccctatgggatgcggcttcggcctccggccagccggcggtggtgtcatgatcggaaatggccacgcccttgagtcccaatgccttggattgttcggccaatgtggccggcgtttccgtgccatccgagaagacggtatggcaatggatgtcccacccgacggcgggcggctccaaaggcatcacatatccagtcataccttccatcgtaacctcatctcagcattcccacgcaaggcgcagacaggtcgtcaccttctgccaacggccaagaccagacatccggcactcagctgacaaccgcagaggctaatctggagcgcagcgctatcgaaaggggcatgatgactcgtaacaccgcaaccgacacatcatccagcaccacgaacaccacgccgcttggcttggcggaggcgcgaccgttgattggatggcgccacagtgccacttggacatatctcatcatgctgatcgcctcggcagtggcattgggggcctcgctcattctgtccgccgagactttgcagttggctaggcatccggagtccgcgctcggctgcgatctgaactcggtggtgtcctgttcggcggtggcccagtcctggcaggcggaaatcgtgaagttcggcgggctgagctatccgaacgcgttcttcggcatcgccgccgaatcggtgttcattaccatcgcggtgatcggtttggctcgtgtgaaggtgccgcgttggttcgcgacctgcacgtggctgggcggactggccgctttggcctactcgtactggctgagcacgcagtcgctgttcgtgattcacgcgctgtgcccgtggtgcctgaccctgatgttctccaccaccatccagttcatggcgttgagccatgcgaccgtggccgtgcagggattgccgtcacgtaaggctgtggctgctgatgatggcgacagcgaggccgatgtcgcggcggtgccggccggactcaataagtattaccgcctcaacatcgacctcatggtcgacatactgtggatcgtggcgatcgtggtactcatcatcgtcaccgaaggcgcggccctgttcgctgcctgattcctttacaacaaatcgatatcggcgaccagcgtggctgctccggtcagtttcacgtcgctgtcggtgacgtccacgcgcagggtgccgccacgtacggtgatgtcccagtggctgatgccggtcttggcccgcagcacaacgcctgtggcgcataggccggtgccgcaggacagggtttcgccgcagccgcgttcgttgacgcgcatcgtggcttcacccacaccggtgttctgatcgatgtcgtcgacccgcacgaattccacgttctggtcggattcgatgaccggagccaccactggtttggtgaccagatccagcgcctcgaccaccggcagggacgcgaaggcgtcctcgatcaccgcgaccacgtgcgggttgcccatatccacgaacgtgccgcgcgccgagccctcagcgccggggatggtgacctcgtaggcgtcggtttcgccgatcttccactcccccatttcgacttggaacacgttggctccgtacggcctcatattgccgcgtggcgtcagaatcttgacgccggcacgggtgccgaggcggaacggctcggtggagtcggccacgccctcgcgctgagcgaacaaggtgatggcgcgcgtaccgttgccgcacatctccgccaacgatccatccgcattgcgatagtccatgaaccatttcgcgcccccggccagtacgtccgaaagctgatcatcgcttaaatcagacacgaaatcaggccgtgtcaggcgaatcaagccgtcaccgccaatgccgaagtgacggtcgcacaggaatcggacctcatcggcggtgggctcgaatttgccggacttgtcgaggtacaccacgaaatcattgccggttgcgtgtgtcttggttactcgttgcggaagactcatggctttcagagtactctagggagcgaaacaacaccgcaaaacaatcggctttgtgatcggtcgcggcaacatacggttgcaggcatggctatagggaggattcaggcatgagctcttcggctccaatcggcgtattcgattcgggtcttggcggtatttccgtggctcgccaaatcgccaaggatatgccggccgagcatgtgttgtattttggcgattcggccaacgccccgtacggcgtcaagacgcctgagcaggtgagggccctgagtttcgatattgtcgaacggttcgtgcgtcaaggcatcaaggccgtggtcatcgcatgcaacaccgccacttccgccgcggtgaacgatttgcgcgaacactacgatattccgatcatcggcatggagccggccctgaaagtggcgtgcgaccgtggtgacgtgccttccgacccgcatcatattccccagagggtgattgtggcggccactcccctgaccttgcgtgagcggaagttcgccaaactgatggatcgattcgattccaacaacacgattttcaaggagccttgccccgacttggtggagatcgtggaatccgggcggctcggcgaccatgacctggtgatgcgcacgctgcatggctacttcgaccagtacgacatggagcacatcgattcagtggtgctgggctgcacgcatttcgtgttctaccgcgactacttccgcgagctgctgcccgaacgggctgctgtcatcgacggcaatgagggcaccgtgcgccatctgggcgtggtgctggagtccctgggcaaactggcacccgaagacgcgaccggcggcgtggaactcgccaattccgatctgtccgaacgtgttacacggctttcacgcgacctgctgaatgcgtgatcggatgcatgatgatgaataggaggctgatatggcactgaagacggcaatgattgatgtcggcggcgggttccgcgcgattttcggctgcggcgttatggaccgaatgctggaggacggcatcgacgtggacatgtgctatggcgtttccgccggcgcggccaatatgacctcgttcatcgcccgccagcacggccgcaaccacaccttctacaccagatacgcgttccgtaaggagtacgcgagcgcggaaagcttcttcaagaaccacaactttgccaacctcgactacatctacggcacgctgagcaatcacgatggcgagaatccgttggatttcgcggcgttcgaggccaatccgaccggattcaccgtggtggcctgcaatgccgaagacggctcgaccaagtatttcgacaagtcgcgcgtccgcttcgatgatttcgacatcatcaaggcttcgtccgccgtgccggtggcctgcgagccgtatgtggtggatggcgtgccgtatttcgatggcggcatcgccgatccgatcccggtacagaaggcgctggatgacggctatgatcgcgtgatcctgattctgtcccgcttgcgtgacgaagtacgcaagcagcagaaggatctggctccggcccgcatcctcgaacgctcccaccctgccgcagccgagaggctgcgcatacgctacaagacctacaacgacgaactcgaactcgccaagcattacgaagcggaaggcaaagtgctgatcctcgcacccgaagatttgtacggcctcaacaccctgaagaagaacttcgagggtctggagatgatgtaccgcaagggatacgcggcggccgaagccattccggcattccttcaggcatagcacaagcccaaaaaacaacgattctgccatagcccattacacaatggcgcaatgacgtcagaccccgtccggcgatggcacaatcgttgtttttccgtgtcataagctcatcaaacgcggtgaagcccctcactgggaggggcttcactgatacatacgccattatgcggtctagcggccacaagcaccgctatttgccggcggcggtcgcggcgtcgttcgtctcggtcgcggtgagcatggccttggtgacctgttcgtacaggtcctggtaaccgccgggcgtggaggcgggcagcaccacggtcttggtgttcttcgattcggacaacgaacgcatcacgtcaagatactggttgaacagcaccacgttgttcacatcgttgatgtccatgcccacggcctgcaggctcttgatctggtcgacgataccgttggcgatctcacggcggtagttggcctggccttcaccctgc

SEQ ID NO: 1682 - DNA, 8448 bp, Unknown
  R221_24m  MAG No. k141_162186
acacgcgcgcgatcgagttcaagaacttcaacccggagcgccgcgatgcccagaacccggacaagaccgtggtgtgggaggagtacagccgttttgccgagcgtggcgacgagccgtactatccgatcaacaccgatgcggacaaggccctgtacgcccagtacgaggccaaggccgcggccgagccgaagaccgtgttcggcgggcggctcggcacgtacaagtactacgacatgcatcaggtgatcgacaccgccctgagcgcctacgaggaacaggtcgcgccgctgctgaagaagtagaccgtcgtttcaccagaggataaacgatttagcttgaaaccgactgaatattgctgaggcaatagccggtttcaggcttctgtgttttttgggaagccaaatttcctggggtacttaaggctcgccatgaggagtacagttgtctgtaacgcacaatgtggcgcgtaagacgaggggcgtatctcgcaagtggggtgcgatgcagttgaaggagtgcatgtcatgactgatccgaatgccaatccgaacggccaggtgccggggcagcaagctgacgccaatccgactgagccgttaaatgcgatgacgggggaagcaggaaccgccgccaacaatgctccaacccaagcactcgcagcgggcgaacagcccactcaggcgttcactcctgttgagcagcctacgcaggcgtttacacctgccgagcagtccacccagcctcttgcgccggtcaatcagccggtaccgcctacgcaggctttgccaccagtgactcctgccgctgcgcccgcgcctgcgcccgcaccgacagcgcccgcgcctgcgcccgcactagcagcacccaattcgccctatccggggacggctccggcaggcggatcggttcctccggtctacggcagcgtcagtgctccggtatccgggcggcggggccgtgcctccgcaaacgccctataacccgtatatgcaaggcggccaaccgaacggccagccgggatggtctggttcttacggcagtgtgccgcctgaagcgaaccagaagtacaacggcctggctattgccggttttatctgctcgttccttgtctcactccccggtctgatcctgagcatcgtgggcctcaaccagattaagaaacagggcggcaagggcaagggcttggccatcgccggcatcatcatcagtgcggcgggcatggtgatacaggtaatactggtcatcgcgctgatcgtcggcggtgtctcgtacaccagcaaggctatagatgaggcgaaaaccgattccttctatagtcagtcctcttcgggcaacggtgatagcagcgataagagcaaagctcaagataatcttgacgatgcgctggacgacacgttggacgaaacccatgacgatctaaccgacggcgattatgggctgtacgattcgattcaggatttcgtcgactattcggaattcaaggactccattgaatccgaagcggatacgtttgcagataccggcatcaccttcaactaccgtgtcgacggtgacaccttggtgtacgagtacgtgctcgacgacagctatgcctcgctaggcgataccgtcgcttcctcactggatgctatggacagcacctatcaatccaccgcgaatctgctgggctcgatgtgcaagacctccagcggcaaggcatcattgcgcgtcatcatgcacacgcaaggcggccagtcgctgtatgacaaaacctggaccgaaaagtagcaatcccagcgaacgtgcgttttggtcgattgaaggccggtctgcttgctccttggacgtatgcttctgcggaaggaaccgccaaggagtaggcttagcaccatgagactcgcacgtttttctttgaatgattcgccgcgctacgccttcgtacaaaaggacgaaacggacggcaaggactacctcatcgaacttgacggtcatccgctggccggcgaccaggtcaagcctaccggcaaccggtacccggtcgacggcgacggcatccgcctgctctccccggtcatcccctccaaggtttacggtctggccaagaactacgaggcccacgcccagttcatgcacgaggccggccactccgaaatcgcccacgcgccggaagacatggtgatcttcaccaagccgtccacctcggtgattggccccgacgatccgatcgtgtacccggcctgctccaaggacatgaacttcgagccggaagtggccgtggtgatgggacgcatcgccaagaacgtgaccgtcgagaacgcgatggattacgtgctcggcttcacctgcgtgaacgacgtgacgttgcgcgacctgcagggcatcgaccccacgtggacgcgcgccaagggcttcgatacttcctgcccgcttggcccgtggattgtgatgcgtgacgacctcgactggaaggacgccaagatttccttcacgctgaacggcgaggatgtgccgatggcgtctggcaccaccgcgaacctgattcacggcatccccgagcagattgccgcgatttcgtcgttctccacgctgctgcctggtgacgtcatcatgaccggcaccccgaacgcctccggccacctcgacccaggcgacgagaccatcgtgcacgtcgagggcatcggcgatctgcgcaacgtaatcgttcgggcgtgattcgactgacgaacgcatggcccggtcattttcctatttgggggatgtccgggccttcgtgctttgtttcatatatttcatctatatatgcatctgtctaatgtacagatgattttttcgcgaaatctaagtgttgcaccaagctatatgttacacttatttcagttatgaaatgaggtatgtgcattatgactgcagtaatagaacgtgaacagcttacagaacgcgatttggatcaggcgaaggcgtgccgagagctggtgcaaaaaggctctgtactcgctgcaattttggatggcattattgacgataatgtactggtggttcgcaaggacgaagaattatcccctgctcaagctgctgagattcttggcgtgagtcggccctatgtgactcgtttgctgaagtcaggactgctcgaatctcatatggtgggcagtcatcatcggattacggtacttgctttgcggacgtacatggctaatcgtgatgcgggacgtaaggaatacgcccacgcaatcaattctcgggcaaaggatattgccgatgcggttgacgaagtcgctccggtgtctgagacaagtcgaaatcgtatgcgtgatttagttgcagagcatcgccgtgaagcgatcaaagcgagtagtgccgcagtttctcccgcagagtgaggattgtctcaggcgaatcgtggtgaatctattgtctgtgcgatttacccggtatgcgtcaagtcatgactattgctcaggcgtgtaattacgtctcagatactccttgacttccagtatgtcttggcaatcggggcatgcaggaagtcctgagtattcatctctggttggcacgaaccatttcccgcacagagaacggatgagggtgccttcaacatatgcgtcggtcagagtctctttgggtacgcgatgtagcatagattctggctcggtgtcgcctatcgtcttgtataacgattcggaatcatcgaggaagttcgggcttgtgatgcgcttgatgtcgtctggttccagcagcacgaatgctgacatagttgcgcgtctttgctgaccgtcgctgtatgtcttcaacgacgtttctgctggctgattggggtctttgggctggcagatggcgttaaagcatctcaagaggatgcggtgaagtcgggcgtatggagaactgttgtcctgttcctcgaccggaaaatcaagggtcaattcaacgaattgattgacagttgctgagtcgtcatcgtcatcttgctgaatctgaatactggcctttacgggggctcctgaaatctgataggggatatccagcgctgagagggcttcggactgggaagttgtttggcccgcataaattcctgcacgaattttgttaagcatctcctgaacgactcgtcgctcaaaatccagaaaatgctgacgttcttcttctcgtttccgaaccagataatcttcttcgctgggcatatagttgctggcgttggaagccttaatgattgatttgcaattgcctgaatggaaatccccatgcgatccgcaatagaccatccacgggtcgccatattggtcaagaatgacgatgcctcgccagccggtttgcttgttccttatttcatagactgggcgctttgccacagcgctaaattccgaatgcttggtggcagcgattttgtcaccagcgaaagcctgacgagccatattgagtagtgtgacgtcgaatgcggtgaaatcaagaccttcgaacggtgttactgcttccgtccgcatgttctgttcaatgagttgttgagggttctctgagttgaagagattattgtcaatcatgctcaacagaacttgaattgtagggcgaactggtctcatgatgattaaccatagtcggtgatgcagcttagtcagtgattgatatcacatagaagaagtattgctctttttggctcccctcgtgtctgggcccgtaattcccccttacgctcccggcagaagtgcgtgcagggcggtcatcaccaccaagctgatgatggccgtcactgtcagcgagaagccggcgagcttggcgttgccggttagcgaatcggtgaacttggttgagaagatcgtgataggggcgaacgagcccaacacgatgatctcgcgaatcctcatgtcgaatggcagtaggaaccaggcggccacggcgataatcgcgccgaataccatgcgccagacaatcaccttgcccaactccaccttgtccttgcgattgttcggaatctccatcatcagtccgatcatggccatcgcgcagaaggcgttcgcattggcgaacggggtgatgagcgtaacgatgggctgtgggatcgtgatgtgcaggaacatgaacaccagcatcagcatgtagatgtcgaaggaaatcgagcttaggaagtccctggcaatattgcgcagacgcaggatgagcggtagcgacttgaaattgtcatccatatgcagcagcgtgcgtgtgatggtcagtgacccggccgtggccacggtggcgttgccgatatcgagcatgatgatcggcagaccggcggacgggcccatgaacgtctgaaccacaggcaggcagaacgcgcccaggttcaggcccgaggcgttgagcatctggaaggcgcggtagttcttctcgtcgccgcgagaaccgaaatacacgatgaacagcggaatcgcgcaggcgaagaagccgaacaacacgatccacagcatgcgcatgtcgtgcttgttcgtggcgaacgacaggataatcgcacaaggaagcgtcagattgaataccagaccctgcacgattttgtaatcacgctcgccgaaaatgtggacatgtttgagtatgtagacaccgatgataacgagcagcagcgaaccggcctgaaaaatcatgttcttctcttatcccacaagcacccgccgcagcaccggcggcggtcaggcgcataacaaaccagccgtgagtataggagcgttcgcgcggcgctggcgcggggcggtgcatattgtggacagtcccgtaacgttgatatgccatgctggcgagatgaatatatccaataccaagtggagctcggcacgatagagaggtaggaaaacatggcagagcagacggtcaccgtaggcgttggggcattgagcatcgaggacgttatcgccgtagcgcgcggcggtgccaaagtggcgatttcggacgaatcgaagcatgagatggcgctaagtcgcgcggttatcgatcatttggccgacgacaccgtgccgcattacggtatctccaccggattcggcgcgctcgcctccacttccatccccagggaacagcgcgcgcagctgcagaaaagtctgatccgctcgcatgccgccggtgccggaccggaagtggagcgtgaggtggtgcgcggcctgctggtgctgcgcctgagcaccctgtgcaccggacgcaccggtgtgcgcccggaaaccgcgcaggtctacgccgatatgctgaacgccggcatcaccccggtggtctacgaatacggttcgctcggatgctccggtgatttggcgccgctcgccgcctgcgctttggtggcgatgggcgaaggcgaggcccgcaacgctgacggccgcaagatcggcggcggcgaagcgctgcgtgcggccggcatcacgcccgtcgatttgaaagagaaggaaggcttggcgctggtcaacggcaccgacggcatgctcggcatgttgtgtatggccatcaccgatctgcgcctgctactcaagacggcggacatcgccgccgcgatgagcgtggaaggcatgctcggcaacgaccgcgtgttcgccgccgacttgcaggcgctgcgtccgcatcgcggccaaggcgattccgccgcgaacatcgtccgcatgctcaagggctccggtctgatcgaagccggccgcccgggctccaccgtgcgtgtgcaggacgcctactcgctgcgctgcaccccgcaggtgcacggcgccgcccgcgacaccgtggaatacgcggcctccgtggcgggcgtggaactcgcctccgccatcgacaacccgtgcgtcacgctggacggccgtgtggagtccaacggcaacttccatggcgcgccgctggcctatgtgctcgatttcctggcgattccgactgccgacgtagcctctatctccgagcgtcgtaccgaccgcttccttgacgtggcgcgcaaccgcggcctgccggcgttcctggctggtgacccgggcgtagactccggtttcatgatcgcccagtacaccgccgccggcatcgtctccgaaatgaagcgcaacgccgtgcccgcctcggtcgattcgattccgagctccgccatgcaggaagatcacgtgtcgatgggctgggccgccgcccgcaagctgcgccggtcgattccggcctttgcgcgcgtgctggccgtggaactgctgtgctcctgccgctccttcgacttccgcaagccgtaccgtccgggtgcggcgggcgccgccgtataccgcgtggtgcgccagtacgccaacgaaatcggccccgacgtacgcgatacctggaccaccccgcaaatcgaaggcgtagccaacgccatcctctccggcgaaatcctatccgccgccgaagctgccgtcggcctcctgaaatagatgtgagctccctcatcagagggggctactgttcaccctccccaccaaaatccaaaacttgagtcacctgcactcaagttttgggaatagaatgggttccaggtcggttgaccatatcagacaacgacaagttgcggtctgcggtggcgcttgcggggctttcgaagcccgcgagccgctccgcgcgggccgcatgatatggaggaatacgatatggaacagaagttcaccaccatggcccaggaggccgtcggcgacgcgattcagagtgcgtccgccgcaggaaacgcgcaggttgagaccctgcacgtcatggatgcgttgctgcgtcaggaaaacggcgtggtgcgctccctcatcgaggccgcgggcggagacccacaggccatcggcgccgccgtgcgtaacgctttggtcgcactgccgagcgcatccggctccagcacttcgcagccgcaagccagccgccagctgaccgccgccatcgcccaggctgagaaggaaatgcagcagatgggcgacgaatacgtctccaccgagcacctgcttatcggcatcgcggccagcaagccgaaccagtcggccgaaatcctggagaagaacggcgtcaccgcagcctccctgcgcaaggccgtacccggcgtgcgtggcggcgcgaaggtcaccagcccggacgcggaaggctcgtacaaggccctggagaagtactccaccgacctgacggccgccgccaaggaaggcaagctcgatccggtgatcggccgtgatcaggaaatccgccgcgtgattcagatcctctcccgtcgtaccaagaacaacccggtgctgatcggcgagcccggcgtcggcaagaccgccgtcgtggaaggcctggcccagcgtatcgtggcgggcgacgtgcccaccaccctgcaaggcaagaagctcatctcccttgacctaggctccatggtggccggctcgaagtaccgtggcgagttcgaggagcgcctgaagagcgtcctcagcgaaatcaagaacgcggacggccagatcatcaccttcatcgacgagattcacaccatcgtcggcgcgggtgcggccgaaggctcgatggacg

SEQ ID NO: 1683 - DNA, 2686 bp, Unknown
  R125_18m  MAG No. k141_315
tccgcgtgcgcgccggactcagccaatccgggctggcccgccgctccggcgttaccctgcgctccatccaaatgtacgagcagcgccgcaaagacctcggcagagccgccgtctccaccgtgctcgctttggcccgcacgcttggctgccgcatcgaagatctgttggagccgtagggctgacagcgccatatctttactcccgaccgattgtgcgtgcgaaacgacaggttgtgtaatacgggcggcgcggcccgggcgaacctgattcaatcaaactagcgatggatcgtgcgttcgcggactgccacatcggcctcggccgagtcgggcactgcgccgagttggcactgcacagacgcggtgcctgcggcgtgacgcaacggattcgtcagacagccgtacaacagtgcaagggagaacgatatggaacttgaagaactatcggtcgccgagaaagccgcgatgctctcaggtggctccgaatgggattcccgcggcaacgagaaggccggcatccccagcttcgtgatgagcgacggcccccacggtgtgcgccgccagctcggcgaaggcgaccatctgggtctggggtcatccaagcccgccacctgcttcccgaccgccggcaccgttgccagctcctgggctccggcgctcgccgaagaaatgggcaaggcacttggcaacgaagcgcacgatctggacgtgaatgtgctgcttggcccaggcctgaacatcaagcgcaacccgctgtgcggccgcaattttgagtactattccgaagaccctatcgtggccggtcgtatggcagccggtctgattcgcggcattcagtccaacggtgtttccgcctgcccgaagcatttcgcggtcaacagccaggagctgcgccgtcaagcctccaactccgtggtcgatgagcgcacgatgcgcgagatttacctgaccgcgtttgaaatcgccgtgcgtgaggccgcgccgatgaccatcatgacttcgtacaacgagatcaacggcgtctacgcacacgagaacaagcacctgctgcaggacatcctgcgcaacgaatggggcttcgacggcatggtcgtctccgactggggcggctccaactccgccgtggccgcggtcaaggccggtggctcgctcgaaatgccgagccccggctacacctccgtgcgcgaactcgaaggcgcggtcaaggccggcaccttgtccgaggccgacctcaacgctcgtgccgccgaagtcgccaagatcgcacgactgaccaaaaccgagggcgtaggccgagacgacctgctcaaagatgccgtcgccgctgcgcaccacgaaatcgctcgtaaggtggccgagaactcgtccgtgctgctcaagaacgcttccgccacgctgccgctacagtccggcactcgcgtcgccgtaattggcgacatggccaaaaccccgcgattccaaggctccggctcttccaaggtgaatgccactcgcgaagagaacatccttgatgagctcaagaacgccgcagcagccaccggcgtgaccgtggccggctacgcgcaaggctacgaccgccaaggaaccaagaaccagacgctcatcgacgaagccaaaacgctcgccgccgccgacaccactgatgcggtgatcgccgttgtcggcctcgacgagcgcagcgaatccgagggcctcgaccgttccaccatggcgatcccgcaagtgcagaacgatctggtcgacgccctgaccgccaccggcaagcccgtcatcatcgtgctcgtggccggctctccggtcgagctgccatggttcgacgccgtgtccgcaatcctgtacgtcggcctgtccggccaagcgggcgcatccgccaccgtgcgcgccctgaccggccagatcaacccatccggtcacctggccgaaacttggccgatcagttacgtcgactgcccgtccgccggctggtacccggccatcggtcgcgacgccatctaccgcgagggcccgttcgtcggctaccgctactacgaaaccgccaacgtgcccgtccgcttcccgttcggctacggcctgagctacgcgaccttcacctacagcaacctgaccgccgacgaaaccggcgtccagttcaccgtgaccaacgattccgacgtgcccggcgccaccgtcgcccagctgtatgtgaccggcccgtccgacggtgtgctacgccctgcccgcgagctcaaaggctttgccaaggttcagctcgacgcacacgaatccaaaaccgtgcgcatcgaattcgaccgctacaccttccgccatttcgacacggcagccaacgcatggcgtactgaatccggcgtgtggacgctggctgtcggcaccaatgccgaagacctgccgctgacctgcgaattcgcgatcgccggcgacgtggacgccatccccgccgaccctgcgctcggccactacctgaccggtgacgtcaagcacgtgaccgacgccgaaatggccgtgctgttcggtcacgaggtcatcgcccccggcaaacccacgaccttcggcgtgaacgacccgatctccagctgggtcgattccaagggtctcgtcgcccggaccatcgctaaaactttgaccaaccgtgaggccaagacccgccagaagaccggcgcaccggacctcaatatgctgttcatcctcaa

SEQ ID NO: 1684 - DNA, 18384 bp, Unknown
  MAG_14  MAG No. k141_365
gagacatccctgaagatcagggagtcatgcggatgcggtgggcaataggccgcatccgaacgcaagacagctatttccaatggagaaaacaaccatgaacatcaagaagatcgcttccgccgcttccaccctgctcgcagcgtcgctgctgctgtccggctgcagcgcggtgagtaatggcgacaacgatgccgccgaggtctccaagcccacggaaatcaagagcatcggcctgatggtgcaggatatgtccaacccgttcttcaccgccatggacaaagaagccaaggctcaagccaagaagatcggtgcaacgctcaatgtccaggacgcccagctcgatttggccacccaggacaaccagatctcctcgttcattcagcagaaggtcgatctgatcatcgtctccgccgtcgatgagagtggtttgaagcccgcaatcgagcgtgccaaggccgccggcatcatcgtggtcgccgtggacactcctgcgaagggcgctgatgcggtcgtaacgaccgatggcgtgcaggcgggtgaactgtcgtgctcttacctggccgagcagctcggcggcaagggcaacatccttatcgtggacggaaccccgatccagaccatcaccgaccgtatcaagggttgcaaggcggccctggagaaggactatcctgacatcaaggtcgtcggacagcaatcctccaagaacgatcgtgccaccggcctgtccgtgaccaccgacatgctcaccgccaataaggacgtgcagggcatcttcggtatgaacgatccgtccgctctgggcgccgcgctcgccgtcgagcaggccggcaggaccgatgaaatcatcgtgaccggcatcgacggaagtcccgaaggcgtcgacgagctgaagcgcgccggctccccgttcgtggggacctccacgcagaaccccggcgagatggtcaagcaggccgtcgcctacgcccagaaggtcgccaagggcgatacccccaagaagtccacgattctcattccgagtgtcatggtcactcgtgagaacgtcaacgattacaagggatggtgagcatgcctcagttgctgcccctattgcagctcgagaacattgtcaagagcttttccggagtggtcgtactcgacaacattaacctaaacctttatgaacatgaggtgcttgccctcatgggtgagaacggtgccggaaaatcgacgatgatgaacatcctttcgggcaatctgaaaagggactccggacgcattctcattgatggcaaagaggtagacgtctccacgccgaagcaggccgacgacctcggcatcgccatcatccatcaggaactcaatgtggtgcccaccatgacggtggcgcagaacctcgcactcggcaacgaaccgttgcagaagtcggggctgctggacaagaagcgcatgcgggaggacgccgtacgtaaactcgatgtcatcaaggcggacatcgacccggacacattcctcggtgatctgggcaccggtgagcagcagatggtcgaaatcgccaaggccatcgcgcaggacgcgaggatcctcatcctcgacgaacccacggcatcgctgtcccgagccgaatcggagcacctcttcacgctggtgaacatgctgcgggagaagggcacgggcctgatttacatctcccaccgcatggaggaggtgtggcggctcgccgacagaatcaccgtgctcagggacgggcatacggtgatgaccaccgacatcgagcatgccgaccagaatgacatcgtcgccaagatggtgggacgcaaagtcgagaaactttacgaccatggcaagcgtcatccgggggagggcgtgctcgagatcaagaatctcaggctttcgccggactctccgccggtatccttcaccgtgcatgcgggcgaggtgctgggcatgtccgggctggtgggcgccggcagaaccgaaatcgccagagcgatcatcggagcagacaagcatgattccggtgagatccggctccgtggcaaggcggtgtcgttcaaatccccgaaggccgccatcggtcatggggtcgcgtatcttcccgaaagcaggaaaacgcagagcatcttccctgtcagaagcgtcgaagacaacatctccgtctcttcgctgggcgaatacgagaggctgggtctgcttcagaagcaccgcatccgcaaggatgtgcaggaatcgatgaaactggtcaacatcgcgcaacgtctgttgaccacttccatcatcaacctgtccggcggcaaccaacagaaggccgtgttcgcccgatggatgatgaagaactccgacgtgctgattcttgacgagccgacccgtggcgtcgacgttggcgcgaagcaggagatctacgagctgatcagttcccaggcagcgcaaggcaaggcgattctcgtaatctcctccgatctgcccgaggtgctgggcatcagcgacagaatcctcgttgtcaggcaggggggcatcgctgcctgtatccccgaggatgaagctaccgaggagaaagtcatggggtacgcaacgggcgtgctgaaggcgcaatccgaggattccgaaacgcgcgacggagcgcaacgataaagaggagcttccaatgaaagaaaagaaaaagatgaacctggcggcgacctgggagaaggtcggcatgccgttcgtattgctggtgctggtcgtattcatgctgatcaaggccccgaacttcggcacggtgagcaacctgttcaacgtggcgaggtccatctccatcagcgcgattcttgccgcgggcatgacattcgtcatcattaccaccggcatcgatctgtccgttggttcgaccatcgccgtcagcggttgcatcgccgttctggccgcccagcaggggctcaaccccctgctcgccatccttctcggcatggtgatcggtgcgctcatcggcttgatcaacggattcctgatcgcctactgcaatctcgccgcgttcatcgtcaccctcggcaccatgaccttcatgcgaggattggcatacaccatcaccggcggtctgccgatcgtagacaacggtttgaacttccgcgccctcggcaacggatacctgttccatgtgccgattccgttcatcgtgatgataatcgtttatgtagtcatgtggatcgttctcgacaaaaccaagtatggctcgcatgtctacgccgtgggcggcaatgccgaagccgcaaggcttgccggcatcaatgtcaagggcgtactgctatccgtctatgtgattgcaggactgtgcgccggtctcgccggctgcatcttcgcggcgcgtgtggtctccgcgcagccgactgccggcgacggttatgagatggatgccatcgcagcggccgtcctgggcggtacctccctgatgggcggcaagggcaagatcccgggcactctgatcggtgccatcatcttcggcgtgctcaccaccggcctcgtgctcatgaatgtcccgttcttcacccagcagcttgtcaagggcatcgtcatcatcatcgccgtgctcatcgatggtctcaaggagaactcgttctcgttcgggttcctcaaaggcataggtgccacacaagccaaggctgcgaactgaaacaggagaacgacaatgacgcacgaatatccacgattcaccatcaccaatagccaccaccatcctacaaagccacagccggtcacggtgaccgtgccggaaaaagttgaggccgatctgattctcggtaccaccgatttgggacagtcttcgccgttccagaaggtgctgggggattccgacggttcctcgacgacgttcatcggcattctggtgccgcatgacggagaggtcctgtccctacatgacccggacccgggggagacgtttgaaggaggcatcgtcgccgacgacaacacgctcgaaagcgatgcggtctgccaccttgatacgggatatttcgacattgaactatgtcgtggcaccggcaagggcgagggcgcctccaaatggggcatccgccatttcctcaccaaggacgagggattcgatctgctcaagagcgggaacaacgccattggcgggttctacggccctttcttcactccggaaaacggtctgatcaacccgcccgaacatgccatcgccgatgtccgtcttatcgagttcggccccgtcatgcgccgttacctgcttgaggggcgcatccctgatggtcttcgacctgaactgcagggcaagaccttctccatcgagttcacgttctactggaacgtcgatttcttcgatcgtgtctaccatgtggattcgtttgtgacggaggtcgatggcagaagcgtcgtgaaccgtatcacggtcggtgacgagttcgaaagcggcgaaggaaaccttgtcttcaaccgattcgacacctaccagcctgttcctttccgcggaggggacccctacgccggcttcctcaaggatgaagtgcggaacgtgctatcggagcggacggaaacgacatcaaggttcgcctatttctccactctgcttgacagggatctggagaacgctcactgggatctctactggcgtttgttctcgcgatgggaaaatgcccttacccccaaggggctcgatgagaggctcgggcatgtgcgggcgcttgcccaccgcgcagctgatgagacctcccgtccttggcagttccccgagggggcggtcgatgtgtcggcacaggaggaggagaccatcttccccgggccgtctgcctgcagcgccgaatacgacaccaataccaaccggtgcatgatctggatcacctcggaggcgtcctcggcgttccagatcgtgcagaggcctcaatccggctgggtcaactggggtacgaacggcgaaaacgaatgcccggcattgcctgtcggagtcaacatcaggacgatttatggtccgtatgggaacgggtggcgtgatcgcgccgatgagtcccgattcggtgtcgtgaacgttgaacgataggctctgagcacccgtatgccggtggttccgacggttttcctcctctttcccgtcggggccaccggcatcgtcattattcggctcctgattcccgctcctcatcgaactgcaagatatccaatgtaccgacgacgattatgccaagcatgccgttgacatacttatcgaccgcatcgaaggatactcaggcccggcccgtacgtacaccaccgatttcacattggtggaacgtgcctcaactcgacttgcccactagcatccaacaagttcgcatcggcttcgtgaggagtgtgtgtctactcgaacaatgtggcgtcagtcgctgggtagccaagttggaacgcggtgtaggcgtgcttggcggccagtgcggcgaggatgagcagcgtatcgctctcggtggaagatttcgattcggtcacggccttgatctgcgcgcgggcgcagtccatttcgatggcggcggcggtcggtacggtctggccgcttgccttgtcggcgatggtggtggggttggccagtagttggtcgatggcatagaccttttggcgggggtcgctctggccggaagaactggactgtgcgccggaatcatcaaaattgccgttcgccagcgacaccagctgctgcccggcggtcttatgcatatcgctcaatgccaacgtagccccagcggtctgtcctcgtgcggccaagacctcgatagcgaatccggcgcgatcctcggccacggccatcgcatccaataccggtcggtcaacgttggcggacgtgacgccatcaagacgcgccggcgtcacctcaggcgcggactgcccgaatttatcggccagaaaagccagccattgcttggtctgcgcgtcacgtaacgttccctcggcaaaacgacccgaacaatacccggcaacgtcaatccaagtcaggggagcggccaggccggtggcatactgctctaataacggcgtgccttcagccggatgggtggcgtagtccgccaacgtcatcgctttctcgcaagggctcatttgagcttccgcctcggcccgtccggccagtcgcggcatcgaacacgccgaaagcgaacacagcatcgcgctcgcgcatagtgcggatgccaagcgccgggtaaaccgtcctgaagagaagcgtgtctgcatggaaacctacactaatagctaactgtgaccactcataggccatgcgccacataacttcataggaggtacggatcgatggaactggacctgacaggaatacacaagctcgccgccgagcaaggaatcgaccccggaaccctggatgatgcgctggcagaggccctgcgcctcgcctacctcaagactccgcacgccgccaggcacgcgcgtgtggagcttgacgaacgttccggcaacttcaccgtctgggccgccgacgaaatcccggtcgagcccaccgaggacgacccgcaccccgctcccaagctgggcgaggaatacgacgacaccccgcgtgacttcggccgtctcgccgccgccactgcacgccaggtcatcacccagctgttccgccgcgccgaagatgagaaggtattcggcgcgttctccggtcagaagggcaagctcatcaccggcatcatccaacaggatgcttccgacccctccaacgtgcatgtcgcgatgggcgatgtcgaagccattctgcctcgccgtgagcaggtgcccggcgaacgttaccgccacggcgaacgcatccgcgtgtacgtggtgaacgtggcccgtggcatcaagggcccggaaatcgtggtgtcccgctcccacccggagctggtccgcaagctgttcgagcgtgaagtgccggaactggtctccggtgccgtgtccatcatggccatcgctcgtgaggccggcgcccgcaccaagatcgcggtcaaggccaacaccgatggcgtgaacccgaagggtgcgctgatcggccccggcggcgctcgcgtgcgtgccgttatggagaaccttggcccggagaagatcgacatcgtcgactactccgacgatccggccaagttcgtggcagccgcgctgtccccggctgtggccaccggcgtacaggtgatcagcgagaagaacaagaccgccatcgccttcatccacgacgaccagctatccctggccatcggcaaggaaggccagaacgcacgactggcagccaagctgaccggctggaagatcggcatcgaatccgccgaggcccatgccaagaaggtcgccgctgaaaaggccgcccaggctgcggccgaggctgctgctccggaagccgaataggccgccgggctcgaaggcgaatgatcttcagggcgcattatttcctgatacgagccgcgtcagcaatggcgcggctcgctgcgtctacgctatccagcgctatgagtatgcttgattggcgtatgtgggctggtgcagtgtgcgcgaaatcgcccacaccagagacgaggtaacacgatcatggtcgcacgatgagacagggtaggcttgccgtcatcaccaactgaccacgcccatgcacgcgcgtggtcacagaataggagtaattagtggcgaaaccacgcgtatacgaactggctaaggttttgaatgtcgatagcaaaaccgtgcttgagaagcttaaggacatgggagaattcgtcaagtccgcttcttctacgattgaaccgccggtagcccggcgtctgaaggcagagttcgccaaggacaacgccaagggcgattccaagcccgcatcttccgtacaaaagcctgctgccaagcccgtgcagcagcgccgcccggccgcaccttcggccccggcttccacttcatcttccgcaccgactccggccgctcccgcacgtcaggcatcgcccgcctcggcacatcagcaggctccgactccgggcgcaccgacaccgcgtccgcagggcggcgcacgccccggcatgccgacccccggccgccacggtcagcacgacaaccgtgagaatggtcgcgataatcgcgaaggccgcgagaacggtcgtcagagtcgcccgaacgatcgccgtaacaacgatcgtcgtaacaaccagggccgtccgaacaatggccagccggggcagcatcagaacaaccgcgacaatgcttcggctccgcgcccgcacgctcagggcggcgccggtgccaatggcggcaatgccgcttcaaacgcgattccgcgcccgcacgctcagggcccgcgcccgggcaacaacccgttctcccgcaagcagggtatgcacaccccgacgccgggtgatattccgcgtccgcatccgatggctcgtccgactgctgatagcggtcgtggcggtcgtccgggccgtcccggccaaggccaggggcaaggccgcggcttccgtggcggtcgtccgggccaaggtggtcagggcggtcctcgtcccggccagtggggccacaaccgtccgggtcagggcggcggctcccagggtgccggtcagggcggcgcacgcggcggcttccgtgggggccaaggcggcggcaataacttccagggcggcggcgcaccgagcaacggtcccgcacgtggcggcggtcgcggcggtcgcggcggtgccgcaggtgcattcggacgtcagggcggtaagtcctcgaaggcccgtaagaaccgcctggcaaagcgccatgagtatgaggagctgaaggcaccgaccatcggcggcgttcgcatccccaacggcaacggtcagaccatccgtctgcgtcagggcgcttccctggccgatctggcggagaagatcaacgtcaaccaggccgcgctggtcaccgtgctcttccacctgggtcagatggctaccgccacccagtccttggatgaggagaccttccagattctgggcgaagagatcggctggaacatccagctcgtctccgcagaagaggaagacaaggaactgctccagcagttcgacatcaaccttgacgaggaagaactgcaggatgacgaggatctcaagcctcgcccgccggtcgtcaccgtcatgggccacgtcgaccacggtaagacacgactgctggataccatccgcaagaccaacgtcatcgcacgtgaggccggcggcattacccagcgcatcggtgcctaccaggtcaccgtgaaccttgaaggcgaaccgcgcaagatcaccttcctcgatacccctggccacgaggcgttcaccgccatgcgtgcccgtggtgccgagctcaccgacgtcgcgatcctcgtggtcgccgccgacgatggtgtgatgccccagaccgttgaggccatcaaccacgctcaggccgccaaggtgccgatcgtcgtggccgtcaacaagatcgatgtgcccggtgccaacccggagaaggtccgcggccagctcaccgagttcggcctggtccctgaagagtatggtggcgacaccatgttcgtcgacatctccgccaagcagaacctgcacgtcgacaagctgctcgaagccgtgctgctcacggctgacgctgagctggacctccgcgccaaccccgacatggacgcccgtggtgccaccgtcgaagcccgactcgacaagggtcgtggtgccgtggccaccgtgctggttcagcagggtacgctccacgtgggcgatgccatcgtggccggcacttcgtacggccgcgtgcgtgccatgctcgacgagaacggtcagccgatggaagcggccggtccgtccacacctgttcaggtgctgggcttgacctccgtgccgaccgccggtgacctcttcctggtcgcctccgatgatcgtgccgctcgccagatcgccgagaagcgtcaggccaccgagcgtgccgcccagctggccaagcgtcgcaaggtcgtctccctcgaggacttcaagaagaagttcgccgagtccgagatcgacatgctcaatattgtcatcaagggcgattcgtccggttcggtcgaggcgctcgaggattccttgatgaagatcgaggtatccgacgaggtcggcatccaggtcatccaccgcggcgtcggtgcaatcacccagaatgatgtcaacctggccacggtcgacaaggccgtcatcatcggcttcaacgtacgcccgaaccgtcaggtggcggacctcgccgagcgcgagggcgtggagatcaagtactactcggtcatctaccgtgcgatcgaagacatcgaggcatccctcaagggcatgctcaagccggaatacgaagaggtcgtcacctctcactccgagatccgcgagattttccgctcctccaagttcggcaacatcgccggcgtcatggtgcaggacggcgaggtcaagcgtggtacgaagtgccgtatcctgcgcaacggcgtggccacggtcaacgacctcgagatctcctcgctgcgtcgcttcaaggacgacgttcagtccgtcaaggaaggctacgaggctggtatcaacctcggcaccttcaacgacattgaactcggcgacatcatcgagaccttcgagatgcaggaagtcgagcgcaagtagtcattgttaagccctctctgacgagtgggctgtcagccgcaggctgactgggggagagacatggtagttccatgaattttctctcccccagcctcactgcgttcggcagcccctcgtcagagggggctcaagtctagaaaaggaaattcctatggcaggaaccaacccgcgcgccgcacgtattgcggccttgattcagcgtgtcgtcgcctcctccattgagcgcgaactgcatgacaagcgactcgccagcatcaccgtcaccgaagttcgtgtgaccaacgatctgcagatcgccaaggtctactggacccagctcggccacgaaggccacgaggaaggcgaacgcaagcgcgcccagcaggcgctcgatcaggccaagggtcacctgcgttctctggtgggccacaaggctggcctgcgcctgactccgcagctccaattcgtgttcgatgaagtgcccggcgaggctcacgagatcgaagacattctcgccgtggccaagaagcgtgacgaagaactcgcccgcgcccgcgccaccgcccagtacgccggcgacgccgatccgtacaagcacgacgacgaggccgaagccgagggcgatgagttcgagtccgacgaggagtagtgtgcttcatacaacacccagcggcctactcatcatcgacaagccgcaaggcgtgaccagtttcgacgccgtcgccgccgtgcgcggcgcgttgcacatcaagaaggtcggtcacgccggcacccttgaccccatggccactggcacgctggtcatcgccttcggccacgccacgcgactgctcaacgccatcgtggcgcatgacaaaacctacgaggccaccatacgcctcggcctgcgcaccactaccgacgatgccgaaggcgaggcgcttgtcgatgatgaagcccgctcccgctggcaaacgctgtcagcgcagctgactgagggcggccagagcggcgaaccaacggcgtcaccaactgcctcatggcaaaacctgctcactcgcaccatcgccaccaatttcaccggcgatatcgaacaagtacccaatacgttctccgccatcaaaatcaacggccagcgtgcctacgacttggctcgcgaaggcaaggatgtggaactcaaaccccgcctggtgaccatcagcgaattcaccgtgctggatatccgcagcggattcgtagcaggggagcaggccgctgaaccattgcgggaagacgcgaacacgggaacgattcccgcacttgatattgacgtgcgggtcagctgttcatcgggcacctatatccgcgcgctcgcccgcgacctcggcaatgaacttggcgtcggcggatacctgacccgtttgcgccgtacgcgagtcggccgattcgcgttgccggacgataccagcggacttatcgcctctgaggcgatgcttgacacgcgaacccataccgtcaccgcacataccgatcagaagacgttcactaatcgggaagggcaaaccgtcacgcgcaacaagtgcgtattgaacactcctgaaggtcttgccggtgacgagcgccgcaactggctgcttgaccatgccctcaccatggaacaggccgctcgaggcgcgatgccggcgcttgacatcacacctgaggaagccagcgaattgcgcttcggccgccgtatcgagcgtacaatcagcgagcccactgccgccattgtgccgcaaacgcatgatgtggcggcgattatcgagcgtgccaacgctcatcaggccaagccggtcaccgtattccccctcgcgtaaagtagacgcggtgaaaagtgcagcttgatacaggccgcgcacaacaacgcctatattgcatgaataacatcgcacggataaaaggaacagcacactgatggatatcacgcacctgacccctgacgccgaaggttcgattgaatggccctcgttcagtaacgacaagaaggccgtggtgacattgggcgcatttgatggcatgcacttgggacatcaggcggtgatcaagcgtgtggtggaactcgcgcaccagcatgatgctttttccgtggtgattctgtttgacccgcgccccgcattcgtgcacggctgggccgcctcgcaccatggcgaggaacccgcggtgcagaacgtggatgccgaagccttgaccagtgtggatgatcgactgcaccgcatggaacagttcggcgtggaccatgtgttggtggtgcactacacgctggccttcgcagccatgtcatacattttcttccttggcagactcaccggcaagctgggcatgcgtacgctggtcctcgggcaggatgccgccatgggcaaggggcgagaaggtgatgtgaagcatatcgccaatcttgccgccgccaccggtgtattcgaacttgatgtggtcgatgaccgtggcccgggtgaagtgcgcattccgcgcgatttcaagccggaagccccgagcgaatggggagagcccgtcgacccgctggccaatgccaccaaggccgagcgccgcgcatggagcaagaagaaccaggccaaggcaatgcgcgcctggagctccaccaatgtgcgctacctgctggctcatggccgaatccaggatgccaacgccattctgggtgctccgcacgccatcgaaggcgaagtggtacacggtgaggagcgcggccgcaccatcggattccccaccgccaatcttggctccgacattgcaggctacattccggtcgacggcgtctatgccggttggctggtagatggtgagaaccgctggcctgccgccatctccattggcaccaaacccaccttcagcgagaaaacaggactcaacgaacgcgtggtggaggcctattgcatcaccgatgagtggattgatctgtacgaccataaggttcgcgttgaattcgtcggtttcctgcgcccgcaggtcaagtttgatggtcccgaccaactcgttgacgaactcaagcgcaacgtcgaagagaccaagcgtcttaccgcctgaggcatatctcagggctatttacgcactcccaaggcatctaaggcgtcggacaatgtgttggactccaccagccgaagtccctcgacatgcaccggcttgcgcagcggaggaatgactgccgtcgtaaagccaaggcgcgcggcctcgcgaaggcgatattccatacgcggtaccgggcgcacctgaccggtcagggaaatctcgccaatggcgcacgtggctcgcgcaatgggttttgacgtggcggcgctcgccagtgccgccactatcgccaaatcggaaccgggctccttggcctggcccccggcaatagtggagatatacaggtcgttggacagcaggttgagcttgctgtgacggtagagcaccgcgaccagcatggcgatacggctggggtccacgccattgaccgcacgtcgaggtgtgggcagcaccgacgtggtgaccagagcctgtacttcgataggcagactgcgatgcccatccaatgtgaacgtcacacaggtgccttccatgggtgccgcgttggccgcatcagggccgtctccagacaggaacaatccggcgggatcggtgacctcttcgatgccctcaccgctcatgtcgaaacagccgacttcatcggtcggaccaaaacgattcttcaccgctcgcaacattctcagcgcggtctcgctgtcgccttcgaattggcagaccacatcgaccagatgctccaatgtgcgcgggcctgcaatcgaaccgtccttggtcacatgaccaaccagaaataccggaatgtcaagcgtcttagcggtatctatcagcgcgcttgccacttcgcgcacctgagtcgaaccgccggaaatgccatcgacctcctgcgagacgatggtctgcgccgaatccacaatggccaaggccggcttgttctgttcgatcagccccaatactgtggacagatcggtggtggaggccagtaacaagttcggctccaccgcgttgatgcgggaagcgcgcaaacgaacctgcgcctgtgattcctcgccggaaatgtacagcacggtattggcatgtaccgacggtgcgttgccctgtaccgacaccgtgtttgatgtgccgccctgcgcccggcccgactgttgggcagaccgctgaccggctcctcggaatgtactgtctcccgccacaacgcgcgcgatattgccggccgtctgcaacagcaatgtcgacttgccgatacccggttcgcccgctatcagcgtcactgaacccggcaccacgccaccgccgagcacacggtcgaattcggaaaacccggtaccgagccgctcgacgctttccgtgcccacttcggtaatcggacgggctgcagatctggcgttgtcggcaaccgtaaccgactgcgtgcgtgatgttcggccgggagcggccgtgcgagagcctgccgccggccgagcctcgtgaaattcctcgaccgtgccccactgaccacactcggggcaacggccgtaccacttcggcccgttccaaccgcattcggaacatacatactgcacacttgatttcgccatggtctcaccctaacccaaacaccagcggacggtaaatttttaccgttcacaagagtttcacgcggcttgcgcacaacgactaagattacggccgtctagcgtcacgcggctgtgagagaatcggggtatgactaatagtgagaactcctcgaccacacaatcccatggcaagttgattgcagtggtggttgccgcagctgttgtgattatcctggcagtgctttcggcctttgtgtggccgggttgggccatccagaagaatgatggcacctccactaccacccaaaacagccagcagaaaaccgaatcatccgagccgatcaagccgaccatcgacgccacagctttgccggatgatgccagtgagctgttgaaggccatgccggacagcgtgctgaattacgcgcgtaccaaggcggatgcctccacgacgtggaattccgcgtcgccgctcgaggagtacactctgacctactccactggtgatgccgccaaggatgtcacgctggtcgccgcgcagtggtcgtcggcggacaatgccaagacccagtacgatgcgttggtcgctgcgcagaccggcgatgagtcggcatccggcaacgtcaaggtttccggcaacgtcacgggcgcgtacgtggtgaaggccgatgcctccaacagcaagaacgccgctgccatctggcagaacgataccgtggtcttccaagctaccggcaccaaggaagcggtcgatcgcttctaccagaagttcccgatgtagtatctagtatcggctgtcagctgctgcacaaacttatgaacgttggggcatccacattgctgatgtggatgccccaactgcgttcagggcatatgcggactatcgacaacatactggtttcctctgtctggcaacacgtgtattatggtgcaagttgcaacttttacgattaatcgaaatggaggcttcagatgggttctgtcatcaagaagcgccgcaagcggatgagcaagaagaagcaccgcaaactgctgcgtaagacccgccaccagcgtaagtagtcttacctgcaatcaaggcattagaaaccccgtgatcgttatggtcgcggggtttctctttttggctcctttgccttgttcgggcaacagtaaagcccgcacctgcgatgtacagatgcgggcttggaaaagttcagtgatgtgagacgatcacttgttggcgttggtcaacacgcgcgggccgttcgggtcgccgacgatgaccttgtcgaccatgttgaggaacaggccgtgctccaccacgccgaccgtgttgatgaggtcttcggccagctcctgcgggtgatcgatgcgctccaggtgcagatccaccacgaagttgttctcgtcggtgcgcacttccttgccatcggcgtcaagacgaagcaccggcttgtagccgcggtcctcgaacttcttgatgacgtggccagcgccgaacggaatgacctcgaccggcagcgggaacttgccgatggtgtccacaaccttggactcgtccacaatccacacgatctggttggagttggtggccacgatcttctcccacagcagagcagcgccaccgcccttgataccgttgaagttcttgtcgacttcgtcggcgccgtcaatggtcacgtcgatgtggtccacgtcgtcgatgtccacgatcttgatgccgtagctttcagcctggacctgcgtgcggcgagacgtggttacgccagtgaactcaagaccttcctcctgatgacggcggccgagctcgtccaccaggaacttcacggtcgaaccagtgccgaggcctgcgatcatgccgttttcaacgagcttggcggcttcgatgccggccgccttcttcagcgcatcctgctgtgccttatccatggtttctcctttgccatccttgcctccgccgcatggatcaacggcgtgaagccttatctcctatcctaacgcgaatgagcgattttgtgtcatcgtgtccgattgcggtacatattcgtgtgtttgggtgttagtgtcgtacgaatggtgcgttggtgatggtcaggttgccgtcgccgtccacatagccttcgatttcgatgctgcctttgatcggcatcggctgcccgttgaaatacgggctcgttttcggcgcgggggagaaggtcagcgtaccggataccgtcagtccgcttggctttgcggggtgtacggggtgcgctgattgtacaggttgcgctgattgtgtcgctaagggtgacgaagacttggtctctggccttgtggcatccgtcgaatccgtcgccgcagccggcttgcgcaaacttgccgcatccgccttgccatccagcaccaactgcacatctggaggcacatcggtgccatgtgcgtattcggagcccagtagcgactgccagccttcaatcggcagatagccgtcgcgcgcacccgaacggcaatcgcccgcataggtgcgtgccagttcatcgaccaactcattgccctcgttgccggcgtgacctttgacccatcggaaatccaccgggccagggcgttgtgagatctcacggtcgatcgcctgaataagctctttgttcttcacaggctttttctgcgaatttttccagccgttcttcttccagcctttgacccacttggtcgagcaattgatggcgtactgcgaatccgattcgatgagcaatggctcagggcccgggtgcgctcgcaaagcttccagcactgcgcacagctcaccaatctgattggtgccgttggtcgcgccgcccgcatcataaccatggtcgtcgtgcttatggccgggcttgccgccggcgttctgctcatgatcggcccaggcccagcccattggcccgtttggattccctaatgcggacccatctgtggatactgtgatagtcatgttctccaccctaacgcaagctgtgcaatctcttgctgaagtggggttgcccagtgcgaggcaaaacaacgtagtgaagagtgtgaataacatcacacctattgactttgcttgaaaaacatgccatcgcgcgtgaataggtgagcgctcacaagaaaaacaagacatttcctctctgcgggtgaggccggcaacaatggcgcatccggtatctggaatgagaataagggactgtacaaaaccagtgacggcaacatcgaaatcctcaaaccagaggcggacggcgatggttcgacggccacggccgcatccaagggcaccatgcttatcgcaggcaactccaaaaccatggcactcggtccaggcggca

SEQ ID NO: 1685 - DNA, 5156 bp, Unknown
  MAG_14  MAG No. k141_440
aagcggccctcggcgatgcgcgccttcatgcgctcaaacaaatcgggatgctcgtcttccaaccattcatactgctgggcggaactcatggcataagtgaaatccggatcctcatccatcagggcgagcacgttggacaccgtgcgtgccaccttgcgccgggtttcgcgcaccggccacagccaggcggaatcgatatgggcgtggccgatggcgatgtgtttgattgcgctggaggcggccggttcggcgagcactcctgcaagctccgcccgggcggcggccacggtctcgagatcgcgctcgtcatacaggttcatggaacgctgcagcgccttggcgagctgccagtagcgtgggtcgtcgtccttgagctcacgaatcagcgaggagacggtttccagatccatgtagtaggcgaacacgtcttcgttgaagatggtgatatccatgcgactcagtgtgtatgggaagtcacaggtgccggtggcctcttcgccgagttcggtgggtgagaacggggtggggccttcgacgaatgggttggcggcggcttcgatatagacggtgaagtcgccatgttcatcgagttctacggtgctgctgccgtccgcgtagacgagtggaatccagtggttgcgtgggttcgcggatttgatggcggtgccgtcggcacgatagacaagtccctcggattggaatccggggccgcggtgatcgagccagccgaggtctaccatgagttcgacttttcgtcctttgaccgccgccatgtcgatatggccgttcacctcgaaccatgtggtgccccatgtggtgccccagacgccgggaacgcggaaaggttcgaagggcacttggccgttgcgcactttggctagaaattcgctggagggcaccggttcgccgggattgtggaacgaacgcaaggcgcatgcggcgagtgtggtgtggatatgcggtttgacgcgctgctgcatgacgcggtcgcagcgctccaactgctgatcgggcagaagaaacatggagagttcaactcctttgctgtgtctggtggtaggggtgggagtgatggtaattggagaaaccgtaatacgacatacttctgccccctcatggtacaaggaggcagaagcgtcaggcgaaaattcagcgcgtgatacgcagggtggcgagctggaacgggccgaagtgcagtgtggcgccttcggcgttctgtgtgccgtcttgcagcgcgaccggcaggtcggcggccaaatcgtcgccttccaacacgttggtctcatgcaccgaagcgcctgcgagcgccgggcagacgtgcagcgtggcatcggccctgccgccggccgcctcataggcgcgcacaatcaggtcgccggagccatcgtcggccagctttatccagtccaacaccacggtgccgtttgctgactcgatcgaggcgagcggcgctaagtcgggcatgtcatgaagcgtcggtgcgttgagtgcgcaagcggcgtcaagcgcacggcccaccgtggcgttggccaccacggaccagtcgaactcgtgcgagccgatatcggtgcgcgggtcggggaaggtcggcgcggagagcaatgacagtcggaacatggtgcccgagtcacaaccttcggcggcattcccggcgatcggcgtggcatcggacccgtataccgatccgttgatgacggccgcggcgtaaccggcatcgccgataagggcgaaacggttcgtgctgctctcatacttggcttcgtcggatgcggtgtttttgacgattgggcggcggaccagaccatactggcagtcgtatgtcgcttggtcggccacgatacccagcggcagatcgactttgaggaagcgttcacgttcgtgccagtcaatgtcggcgtggaaatcgagcgtgtgtgaacccgggtgcagcgtgatggtggtggtgatgacggtgtcatcgtcggcggtacgcacgcggactcgtgccgcaccgttttcggtatcgaccgattcgattgatccggtcatggcattcgccatgagcagggattcgcgttcgatctcccaggcatcccaaacggcgggttcgtccttcaacagttcgtattggcccaatcgggtgccggccggaaccagttcacggccatgctcctcgtcaagcagtgacgagattgtaccgtcggcctcgatggtgacggacagtacgccgttggccagcagtacacggccgttgtccaatgtctgggtcagtacggaaagcgcgtcggtcggttcgttgatgcggttggcatgccaagacgcgccgtcattgcggaactggctgatgcgggcctcggcgagcaagtcggcctgcgggttggccttgcgcagcacggcgcacatgtcttgggcgatttcagcgagacgcttcaggtcgcggcgatagtcctcgcgggcttcgcggtgcacccatgcgatggccgagccgggcaggatgtcgtggaactggttcagcagcagcgtcttccatatgcggtccagctcctcgcgcgggtagacgtactccggatcggacaacacggcggctgcgcccaggtattcgaccgtgcgcaacagcgattcctcttggcggcagccgcgtttcatgtcctgttgcgaggtcaaggtgccacggtgcagttcgagatacagctcgcccttccagacgggcatttctgggccggcgttctctgcaagctgctgatgcgccttgtcgaagaagtcattcggctcttcgatgctcaccttggagacgccttcgaggttctcgtagcggtgcaggtgctccatcatgttgcgcgtggggccgccaccgccatcaccgaaaccgaagagcagaagcgagcggtcggagagatccttgtcctggaagttcttctcggcgtagtcgagttcctggaccttgcaccaagcagcataagtatccgccggcgggaagtgggtgaagatgcgcgagccgtcgatgccttcccacatgaacgagtggtgcgggaacttggtagtgtcgttccacgagatcttctgcgtgaggaaccattcgtacccggcacggcgggcgatctgtggccatgcgccggtgtagccgaagctgtccggcagccatacgcccttgggctccacaccgagatgttccttgaagtatttgcggccatatgcaatctggcggatcagtgactcaccggcgggcaacatgccatcggcttccacccacatgccgccgaccgggatgaaccggccttcttcgatgcgccgcttcatgcgcttgaagatgtccggatgatcctcttccagccaggcgtactgctgggcggagctcatcgcgtatttgaagtcggggtcggcgtccatcagcgccaatgcgttggatacggtgcgggccaccttgcggcgggtctcgcgcaccggccacagccatgcggagtcgatatgcgcgtggccgatggcgctgacgttcatggccgaggcattggccggcttggccagtacgccggcgagtgctgcgcgcgcggcttccacggattcggggttgcgctcgtcgtaggcgttcagcgaacgctgcaatgctttggcgagttgccagtaacgcggcgactgtttgtcggcgaattccatcagggagctcaccacgtcgagatcgacggagtagttctcgtagcgttcatcgaattcggccagatcggcggacttgaatacgtacggctcgtccggcttgccggtggcatggtcgcccagttcggtctcaatgaacggaggcacgccgagcagcagcgggttgctggcggcttcgaggtacagggtgaagctgccgtcttcggcgaccggcacttgcgcgttgccctcagcatccatgaacggcacccaatagttgagcgggtgtacggctttgatggcggtgccgtcggcacggtagacgaggccctcgatatggccgccgcaggagtgcgggtaccagccgaggtcgaggatgagctccagcggcttgcctttcgggtagccggccggcacggtaccggtcaggcggaaccagactgtgccccatgtggtgccccattcaccgccgagcgtaaacggcttgaagtcgatgtcacctcgattgagcttctcgaagaactcgtcagtgggcatcggctctccgggaatgtcaaaggactccaccgcaagctgtgcgatcgatgggtggatatgagggtccacgcgctggcgcactatgcgcttgcaccgctccagttgctgttcaggtttcaggaacatctgctgttcactccccttatctctgccgcttgtgcggccacatcattgtgctgcccgttcatgggaaacatatcgacatgcgccctcgcccgcagaagactaaagcgctttagtaacatattggagggaacgggatatgatgtcaaattactatcgcaattcagcgtgttccgtcaggcatgtcatgctcggtgtcgatgacgatggtcaccggcccgtcattgaccagtccgacccgcatatgcgcaccgaaacgaccttccttcaccggcactcccccggagcgcaacgcctcgtcgaacttgatccacatgaaatcggcatgctcgggcttgccggccttgatgaagctcgggcgattgcccttgtgcacgtcggcgaacagcgtgaactgcgagatggagagaatctcgccgccgatgtcctggatcgaacggttcatcttgccctgcgcatcctcgaacaccctgagattcagaatcttatgggccagccaggcgatctgcttgtcgccgtcctcatcggtgacgcccaccagaatcatgaatcccgggccaatctgctgcggctcgaacgtgggatccagcgtgcccaattcattgaccacgtccacggacgcttcggatactcgttgcaatacgactttcatggttccctacagtacaacgtgtgcagtcatcaccaccgaaccatgccaatactgcggcagccagcaggtcgaggcaccatggacgctctgccaaggttgaccgcaggccgcgcacccacaggataatcggcgtctgccccgaatgcggacgcgaagtgatggccgcgaagggcgaggcgctgcgcctgtgcaggtgcggcaatcccatcaacgtgcaggagctgcgcgagcagagccg

SEQ ID NO: 1686 - DNA, 4460 bp, Unknown
  MAG_14  MAG No. k141_1729
tgaccagtatgcggacaaggatgtggattccgctgctgacgaccacgcttccggtgccgccgaggcagctcccgccgcgcaggaggacgacctcgacgagtacgccaagtgggcagccgaagcggcagccaaggcgaccagtggagaattccccgcatcggcacccaagaaggcggtcaatgtaccgaaaccggctccccgtaagccgattccgatgcccatgccttccgcgctcaagcccaagaagagctgagcgcacgtaggcatatgccggatatcagcgggcaggatgggccaaggcccaccatgctcatcatggacaacgaccgcatggccctgatggcattacagtcgattttgtcgaaggccctgccagacttcgaattgttgccgccggtgagcgagggcagcaaagccattcagctgtgcacggccaccaaacacccgcctgctgtgctattggccgatatcgcgatgaacgacatcaatggtccggatgtggtgcgtgcaatccgcagggaaaacgcgaccacggcgatactggccattaccgcctcgattgtgggccgacatgcccaggagatggcccgggccggcgcacagggcatcatgagcaagaacgatgatgtgcgattgcaggccgtggctatccgccaggtgcagaccggcaaaatatggggcgatggtggcgacgtgcggttcgagaccgcggccgttgcgtccgcgcgcatcaaggccgagaaggacaaccgtctgagcgcgcgtgagatggaggttgcggaactgtggtcccgcggccggaccatgccgcagatcgccgccgaactgtccatcaccgaaaccaccgtgcgcacgcatctgatgcgtgcggccgacaagctcggcgctggcaatctcaaggaacttatcggcgcatggattcgcatgaacctgcactgatgaaggcgccgatgggtgtgtggggacacggtagaagaagcgcaaggcgcataaggggagcgggccggtgaaacgtccgattatcatttcgcggcattcgtcgtattcgtatggtcacgccgacggcaagaagcatcatcagattgatatcgatatagaactcaatcatccgctggcgatgttcggcccgatcggtgtgcttgcggtggcggccatcgtctatgcggtgaccgggtcgtggctggtcacggcgtcggcggcgttgacggcaagcgtgctgctggtattactgggcattgcgttgcgctggcgcaagcgcgtggtgaatcaggagaacgaaaacgagcagatggaatcggcgctggccgatctgcgccacggcaaccagctcgcgatcgaactgcacgacacgctgtccaacgatctgacgtatatctcgaccatcgcccggaataatctggccgcgccagccggcatcgatggtggcgactggcagcgcgtgctggatcgcagccaacgtgcctttgcggaagtgcatggcatcatcgattttctgaccgagcagagcggaatggacgccggcttccgggacgagtccttgccggtcggtggcaccgggacatctgaggtggcgactgcagaatcagggcaggttgattcgccgacgaaagaatccgccctggctcgtgacccggtaggcaccgggagctgtccagcgattgcgaatgaggtggttgacaatgccgtgcccgagaacgccggtggcgatgaccgtacgcaatccacagcgggcatgccgcaatccttcgtcacgcgtgtgaaggcgcagatcaccgataccgaggagtttctggaggcgcagggctatcgggggacggccgcggtcaacggcatcgccatggtcgtggaccccgaggcggcggcctaggcgctgtcgctgatgacggagatcggcacgaatatccgccgccatgcaccggcgggagatgattcctatctgctgttcgtcacgctgtctcccgaatggattgagcttcgtgagaccaacgatatccgtgacgatgccgacgcgcagagtggcctgtccgcgcaggagcggtcggggcgtgggctggccatgcatcgcacccgtgtgcaggagttgggcggtgaattgaccacccgttcggatgatggcacgtggatgatttacgtgcgtatcccgtgcgtgcggggctgatggggcagaagctgcgatgtccggcgtccggcgctgattgtgccctgtcctcacaaatgaggacgacgaccgcagccatgtccccataaccgaggattgcgggtgttcggctcggcggcggctccctatggtggcgtccataaggaccaatcccagggaggacaacgatggcaagtgatacggaattatggcggggaactgattacggatggtggctggctgcggacacgtccggtgcggtcggtgccagcctgatcgcgttcgcggtgccgctgatgatgctcgccacgacaggatcctctgccgccgccaccacgacggaaagcatctgcgtggtggtgcagacggtgctgggccttgccggcggcgtgattcaggaccggtatgatcgccgtacgctcatgctgatctggggtgcgtccggtgtggtgctctcggcggtggcggcggcagcggtgatgctgttcggcaatgcgccgaagacgagcggccatggggttaacggggcaaacgctccggcattcggcggaccgtatgcccacgtgcttccgatcgcgctgctgtgtatcgtcgtgctgttttcggtgcgcgatgggctgttggagaatacgtcgaatgccatgctgcgtggcgtggtgccggatgagcagctgcctcacgcgatggcgttgaacgacgccagggattcgacggtcacgctggcaggcgggccgttgggcggtctgctgatgaccgtgggacatgcggtgccgttcctgaccagcgcggtgctgagcgtgctgggcatggtgtccgcatggcgtatccgccgctattggaaacgtgcgactgtgagcgatagcggccgtccgggcaatgttgataccggttcggaggtcggggccgtctcggacgccgatgatgccgatgactccgccccacgctggcgcgacgcactggacggcatgatctggctgctgcgcgaccggttccaacgccatctcatcatcgcagcggccatggtgaccggtgccagcaatgccttcctactgctgaccgcgctggacatctcccaaggtggcagccagctgatatccgccggatccatcaacgccgcctccgccgttggcatgttgctgggcgcactgatggcctcgcaactggtcaaccgtgtgcccggcggcgtactggtgggtgtgatgttcgtcttgctggctgtaggattcaccggtgccgcgttggtgccctccatggttggcaaggccatatttgtggcctgctcggtactggcattgcccgcgggcaacgcggtgcttggaggcctcagcaataccttggtgggcaaggacaagctcggccgcgttggagcgggcagcatggtgttgcagtacggtgcctatggcgtggccgtggcactcgccggctggggtatgcagaccatcggctacggtctgacctgcctgattctggccgccgtgctggtagctgccgccgcttacgcgctgacgatgcgcagcctcatcaccctacccacgccggaccgctgggccgagcacatccagcgttggagcatcgcacagttctgataaagggcatccgataccgggcatccgacgatttacagcggcagcaggtcgctcagatcgtcgcgctctccgaccgcgctgatgtggccggcgtccttttcctctgcccacgtggtgatgccgcaggccagccgtagccagacctcgggctccagttcgatgacgtccggtggagtgaggttgtgcgggtccgattccgggccgtccaggattttgaccgcaccccacggcgcaacgcgcacctccacgcccggcccgggcgcacgccgttccagcaggaacagcgagtagcgcacagccatcgcccacaccgggcgcggcagaacgggggaggtggtcaggcgatgtggtgtgttgtcggccagttccagggctgcggcacgccattgcaccagtgcgtcgtgccctcgtttcaagtctttttcgagaattactgccatatgctccatcatggcaccggcacgcgaaaccgcaaggtatgcaaacgatggcatactgtaggatgcggaaccgtgagatatgtgatacgctctcaatgagaacgtatgcaagaacgctccgccatcgtcgttacggagagttcatgcttacgtctatgcgacgatacctatcgcgcggcataataaacacgggcacttatcccggaaggaaagtcagaatgaccgaaatcaccgcaccgaagtctcctgtcacggcggaacaattcgccgacgagattcgtgaacaactgaaataca

SEQ ID NO: 1687 - DNA, 11657 bp, Unknown
  MAG_14  MAG No. k141_2496
gacttccgtccgctggtgtttggactgggcaccgtgctcaccgcggccaaggaagtcattcgcctggtgatggtggatcgcgaacacctcaagaccggtttggtgcagattgccaagggctggtgggactcgcgcaagctgatgcacgaccccacctggaagcccatgccgtcgcttgagtgacggccctgccccggcccgtccggcgcgtccgcgtgatggtcgcgttagactgggcgcaaccctacgaactgatgaaaacgtatggaaaggaaggtcaacgatgattgaaactgcacaggctttcggtgttgacattggcggttccggcatcaaggccgcacctgtcgatctgaccaagggcgatttcgccgagccgcgattgaagattctcactcccgaggtctccacgcctcaggccgtggccaaaatcgtcaagcagcagctcgaccacttcgaagtgcctgaatccgcacccgttggcatcgccttccccgcgccgatcaagcccggccagaagctcgacttcatggccaacctcgaccagtcttggattggcgtggacgttactgaagtgttctccgaagcctgcggccgcccggtcgtcgtggtgaacgacgccgacgccgccggcctggccgaagtccagttcggtgccgccaagggccaggatggtctggtcatcgccaccacactgggcaccggcatcggcaccgccttgatctacaacggcgtgctcatcccgaacaccgaactcggacacatcatcctgagcgccaagcatctggacgccgagaagtatgcctcctccgcgattcgcgagaacgaggaactgggctacaagaagtgggccaagcgtctgaccaagtactacggccttatggaaaagtacttcaacccggacctgttcaccgtcggcggcggcgtgagccgtcagagcgaaaagttcctgccgtacgtggatatcaagaccccgattgtgcccgccaagctgcgtaaccaggctggcatcgtcggtgccgcctactacgccagcaccaagcagcagtgagctgagttatttctgctggcgcaggagccgtattgaccatatgtaaggccgtccaagtatttcgggcggccttttttaatgagtaattcgttcattaggtcgattatgtgttcattaggtcactcccattccaaacctgaattgcaatgggctcggaatggcggcgtttcaagcatcaacaattgtgaggctcgactagcagtgacctaatgagcgcgaaaatgacctaatgaatgtagctaggccgttattcgatgtggattgaagtcatagtatgtctgacgactccgctgccgtgccgcacgattgtcgtagtgctggatgctggtggatatgaggcctcgatatacctggctcggcaggggtggttttatcgtggagggtatgagcgtgcatttctcttctcgtgtggatatttctgcgccgaatcccattgcggcggccgaggcggcagccaaggcaaacggcatcgcactcagcaaactcaacgattccaatccgacccgccacgggttggcacccgaattagtgccgagcgtgtatacggccgacccgcgtggaccgcgtgcggcacgagaatcattggccgcattcctcaatacggcaaacgtggtagacgcaagcagccctcagttggcttcgcccgccgccggcgagggcaggaacgagcgccatgccgctttcaccaatgtgaataccgccatcgagggcgccgacccggacgccctgtacctgctgagctccacgtccgaggcgtattcgtggctgattaagttactttgcgatgccggcgacgcggtgctggcacccaaacccggctatccgctgattgagtcgattgcacggcttgaatgcgtcgatacggtcgaataccagttgcaattcgacggctcctggttcatcgacatcgccgaactcgagcggctactcagcgagcccggtggcgaacgcgtcagagcattggtactcatcaacccgaacaatccgaccggttcgtacgtaaaaccaaccgagcgtgcacgtatcgtgacattgtgccgtgagcacggcatcgcccttatcgccgatgaagtgttcttcgattactctctcgaacctttccccggcgacgcacggctcgcgggggagcgcggcgtgctcaccttcgccctagacggattctccaaaatgctggccgcgccgcacgccaaagtcgggtggattcaggtgtccggacctgccgaggacgttgccgaggcccagcgtcgactggacgtcatcgccgacgattatctgccgatgggcgacatcatcgccgaacggattcccgcattattgaacgccgcgcccgcacagaccagacgggtgggggagcgcgtgcgcaataacctggccaagttgcacgagttgcttgacgccgatcccaacgggctggtcagcgtgctacgggccgaaggcggctggaacgtgctgttacgagtgccttccgtcatcgatgagaacgaactggtgttgcggctgattgacgagcaccaactcaccggacagcccggctacttcttcgacatgacctccaatggatacctggccgtttccctgctgcccgaaccggacgaattcgagcgtggcatccgcgccgtgctcaataccgtcgccgctttgctgcgataggccggtgtttgccggcaccacacctgtactccacgtacaatggcggcatgggattcttgtttagaccgaaagaactgccacacccggcatcgctgacgttcactttggaacaggccgggcatacgtatgatgatgggcacgtgggacttgctcccacggacatcaccatcagcgagcgccgggtggccgtgatcggactgaacggcgcaggcaaatccacattgctgggtctgctggacggttcgttgaaggccaacgccggcacggtgaccattgcgggcggtgaggaacgtcttgacccggctgtgaagaaggacgcgaagcgcatcgataatctggtcggcaaagttcgccgcgaggagattccgaacagtttctaccaagcggcgaatatttccgaggctgtttccgaagcgttgaaaaagcacaaggtgcccgagtcagaacgtcatgcgcgcatcggtaatctgttcgcgcattttgatttggcgcaggtctccaaggccaaggccggcgaattggactccgagaaacggcacctgctggctattgcggccgcgctgagctttgagccgagtgcgattgtggcggatgagccgagcaagggattggatgagattggcaccgcgcatgtggccaaggcgttgttcagctacaacaagcaggtgattttcgccacgcatgacacggatatgatccgccggcccgaatacgccatcgaccgcatactggtgctggacgagcacgcggtcgtgtttgacggagcgccggctgaggctgtggcgttttatgaggatctgatccgacgccgatacgagactagagcatcgtgaaccatgcctgaacctgatgccagagcgccggattgttgtcgatcatcgaatcgctgcgcgactgcacgaagcagctcagtatggctatgcccagcgcccacaatacggccagcaccacgacccagcgcatcagccaacgccacggagtgacgcgggcgatgccatcgcctgaagcggcgtcgttggcccccgccaatgaccggctcggttcgcgcccattgaccagccacagtagccccggtatggacgccagcgagatcagccagccgaaatcggcggaataccgccatcccaaaccgccgacgcggctgtcgaatacgaccagcaccgccgccacggccaagcaagacatcagccatggccgcatgccgtgtgtttccaatctgcgcagcaggggcagcgccaaagccatcaaggtcagtggcgtggccgtgaaaatcgcgccgaccatcacctcgtaataaccccattgcggcatcggggcgggagagcccgccagccacgggaaacgatccatgaagcgcagcggcaggaacaggtaataccagatgttggcgggcatatccgcggacggggtggtataccgggtcatatcggatatggagaactgatacgcattgccgaaattgaacggggaatcgaaccgaaccatgttccacgccatcagaggcgtcacgacgagaatggcgggaatgattaccgccagcggcgcgcgcaacgcctgcaacggcttgatgcggcgtgtgcgcagaccggtgcccagcgcgcgaatctgcggccagaacagggggaacgcaagcaatgcggccaaggtgaacgtcggtcggcatccgaaattcgccgcaatgcacaaggcgcccaaggccagtcgtggcagggagagaggcttggcatcgcccgcctgccatcggtccgatggtctcagcggacggcgggacgtgtccgcgccgagccatagccatagtcccagcgacgtcaacgtcagcgatgcggcgaacggtatctgatagaagttcgtgcgatacagcaaataccccacttgcgcgctcaccaacgatgagaccactactaacgacgcggccgccaccgaagtcttcggcatcacacgatggatgacgcgcagcaccagcaaggagaagaagatgatgaacagcagcacgagaatatactcggcggcggatgtcggcagattatgaccggccagcagacgataggggacgaacagcagcactgcgggcaacacgccaaaataggaataccagtgaccgtcataatacgcgtaatcccagtagagcggactggctccattggcgagtagctgggcacgtgtggctacgtcataggggtgctcggtggcggccagttgttcgggaaccggcaagtcgagccagggccggccggcgaccagcgcatcggccacatgcccatactggtcgaaatcataggtgtaatcgccggaaacgtggaagacgagcgaagacgcgtaccacagttcgtggatgatggatacgccgataagcagggtaggaatcgccagaagccccgcgaaagcaagtcgttgccgagtgctggacgggtcaagcgtgatacgccacaggcgcgatcccggcctccagacggcaatcatcagcaacaccaaggccatggcgagcacgcgcatccaattgatgacgaacggtacgcgcacgttggcgcgggcgtcggtgaccggtacgatcgcgccgcgctcttcctgaatccaaatacgcacgatgccggcacccggcgccttgacataatggctgcgaatagcgtcgggattcatcgactgggccttgccggtgatgccatcgacatccgcgcgcacatgaatggtcgccagcggtttgaagacttccttatcgtcgttcgctttggattcggcctcggcctgctcgcgggccttatcgatgaccttgctgctctcggtatcgatgcgtaggtaatccgacgtgccgtccgcggtcagttcaagataggccttggtcggatcggtgacggtcaacatgccatcattccggcgcgtgagacccgaacccagcgtgttatgcacggcgttcgtatccgtgctcgctccgagcgtacgccagaacggcaggttgaacacgatgcactccatggcggcgatggcggcgacggcggccagcaaggcgatcagcaggcgcaccaaacgcagccggtgccgggtatccgggcggctgggcaggtgccgttcatgattcgacggcatcggacggtctgcgcgagtgtggtctatggaatgcacgcatttattctataggctttattcgggcttgatgtcgggcaaacaagagacaatgtgaatcatgccaaaacgtacatcggaccatgggaagcacaaccgcacgccactgctgggcgggctgaaggattcgatgaacgcgctcgcggccgatctgggactgtccaagccgaagaagcacgatacgaatccgttcggcgatgccttgcgggagaccagtgagcgtaaaggcggcattatcgacgaactgactcgccatgcagtggcgctgagtccagtaatcaagcgacgcaccttccccgaattggagaacgtgccggaagggctggtgcttggatgggcgcagctgccctccaccagaggccgtggcttttcgcttggcattttccccgaccgcgatcattttgcgcaggtggcgttcgccgatacgcatggccgcgtattcgtgggcaccgaccccaacatggacgtgcaggatatgcaggcgcgattcatgttcggcaaggaaaaggaagtgactctgccggacggtgagcggctgggcgaaagcgacgagccgcgttcacgttccggtttctcccgtgcaggccatggcctgggaagtgcgctgcatcatgggcgtggtttggggcgtggccttggtcatggtgctgacggcgtgaaggccattaccggtggcgtggtggggcgtgacgacaccggacgcatgacgtggctcgcctcatggctcaaggccggcaaccggtacacgcttgagcagatgcgtgccaatctgccgcctgtgatgcgtcatgatttggaataccgcgatgccattaccatcgcgttcttcgccacgtatatgttgccgcagatcaatggtctgctcatcggattcggttccggcaatatcttccgccgtctcaaccgtgaggcgccaatcggtgcgattcgccgttcggtgcgtgacactttggcggcacgagcccacggcatgcgggcctccggtctggaggatcacttcgccgatctgatgcgcgaagccggcgccctcgacaccacgccgggactggaagcggtgcatggcgccgaaccgttgcacctgtacacctcgacgtattcgagcggctatttctttacgtgggataagtccttggcattcgggcaggcgctgaaatccttgaagatcgaaggcaacctcaaccgattcgctgcggtgagcgcttggctggagcgcaacgcttccttggggcgcaaccctacggaagatacggtgacccgtgccgaggccgcgcaaatcgacatgaaactcattgagaaccctgcgattatggcgcttgacccgtatgatggcgagcaggagcgtcgggccgtgctgagcctggtcgatatcgccgcacgcacggctgggcagattcacagtgaattccctgatcctcgagatgtgctgacccagcagaacgtgccggattcgggtgtgacgaatgctgcgggcgctgaaagtactgagagtgttgagggcgctgtagagcggaccaataagagcgacaccaacactcaagccgctcggccttcgtattcgccggcgaggagcgacgaatgggtgtatcgtcagaccctctcctcactgttgcgccggttacggttgccgtatcggtttgatgtggagttccggtcgcgcttggattcgggtgaagtggccattggcttcaccactgccggcacctcgatgatgcccgatagccggtatgacaccactcgccgtacgtggcgtgcgctgagcagcgccgaacgcgcgtcgatgagcgccgcctacaacctgcgtgtcggcctgatgatggcagcgctgagtttcggcaccagcgaatccgtgcgccaggtgtcgttgcacatcgattccattggtcttgaagaggcgattgccgaacaggattccgccatcgaggcgatgatgagcgaggccctaagcgccttcgaacatctgcgcagtggcgatttggggcgtgtgggttccaaagccgaccccaaagatggtgatttccatggcgacccgacccgccccatcacccatgaggagacgttcgggcaggcggcgtccggtgacgaacgcggcacggccgggggaacaggcaccggtaccggaccgtctgcggatgctacggatcaggccgcggccgaatccgctgacgccgatggcgccgcgtccatcgattcgcagttcgaagacctgatgaagggcgtcgatatcgacgaaatggcgttcggcatgccggacgataccggcgcaggcgacgacctgggcggtatcggcggcgagggcgtcggcactgacgatgctgatggggccgccggcatggacgatgatccgatgagcgtgctgcgccgcaatcccaccgtgcgcaatatggtcaccgtcaccttcacccgtgatgccttcctcaagcgactggacaccgatgggcttgacaatcccgaggaaacctaccgcatgttcggtgccgtgatggacgtggacggcgaaggcggcctgaaacccatcagcgccgacttcgacttggcggacagccggttctctcccaccggatcccaggaggagcccgaactggccgaccgtcaattcagcccggcgaccgctcacgtgctgggcgcacagaatagtgccggactggctatccagcgagtggacttactgcagcatggcgtcaacgaattccatgatatcgccaggaacacgtcgctcggctccgtggaaaaggcccagcgagccatgcagatcatcgaatcgatatgcgatcccgaactgaccggtttggcctctcaggtcaccagtgcgttgatcgatggcaaggacaccccggacttcacgttcacgcttgccgacgatcttgacaaggagcgtctgcgcgcccgagacatgctgttctcgggccaagccgatcaggccatcgaagcggccgaagcggctgtggcccatttggatcaggtgtatgcggcaggccatggcgtacctcgatacttcaactcctatgccgagcgcgtggtctacaaccgactgttcgccacattggacgagcgtacggtgctcatcccggacaatctgttctacgcacacatggagctggctgacgtgttgagccagatcaagggtgccgaggcggccatcccgcacctcaaccgtatggtggcgtacgcgcccgcctacccgctctcacatctgaagctcgccatccaactggcccgcaatgaggattgggattcggcacgcgccgcctgcctgaatgctctgcgcgtggccttggaccgcgacgatgccgcgttcgcctactaccggttcgcgtacgccgaatggatgcttgaccggttcgacacagccgccgcagcctacattatgagcgatcacatcgctcccggggccattggttcgctggagagcgaactgcaggaactggtttcccgtgcggactcgcagtgcataccggtgcctgaatcggtggagacggccgcccatgtgcttgccacgcatgatctgccggtctggccgcataacgaagtggccgacatcgtgcgtgacgccgcccgcgtgtgcgtggatgaaggcatgttcgtgccggcccgcacgctctcggtggccgtggcccgcatgaatgacggtgaaggcgacaacatcgacatcatccaagcccagttcctgcgctcgctatccgcgtagccgcctgaggggagttgacggtatagccggccgaggggagccgagcccgctaggatagacaaccatgagcacgaacgaacaactggcatgggatttcgacgatggggatgtggccgaggtccggcctgataccggtattgcacgttttgcccctggctccgaacaatggatagccgcactgcagcccactgacgacgacgcgatacgcctcgaccgtttcgacgtgaacacgatgaccgctgaggccgccgcccgcctgtgggctcgcgtggccgcatgggtggaatccgatcagatcgcctactacatcgacgactcacccgtcagctccgacgccgcctacgacgcgcgcatgcgttgcctcgaacgactcgaagcggcgttcccctcattggacaatccacagtcgcccacccatcgcgtcggcggctccttctccaacgacttcgcctccgtgcgccaccccagccgcatgatgagccttgacgacgtcttctccatcgaagagctcaaggattggtacgattcggtgattcgcgacctcgattggcccgaatccaagcccctgcccatgagctgcgaggtcaaaatcgacggcctcgccctgaacctcatctatcgcaacggcgtgcttgaacagggcttgacgcgcggcgacggcgttaccggcgaagacatcaccctgaatgtgcgaaccatcggctccattcccgccaacctcggcggccccaaggaagacgttccggacttcgtggaaatccgaggcgaagtgttcatgcgctgggatgacttccacaccctgaacaacgagcaggaggacgccggacgagcgccctttgccaacccgcgcaacgccgccgccggctcgctgcgtcaaaaagaccctcgcatcaccgccacccgtcgcctgagtttctatgcgcatggtctaggtcagctcacctgggggccggaccatccgcgcggcacccatgacgtggtcgccgaccagtcgcaggcctacgatctatacaccaggtggggcgtgccggtctccccgcacaatcgtgcggtgacctcattccaggagatcctggacatgatcgagtactacggcgagcatcgcggcgacatcgagcacgcgctcgacggcattgtcgtcaaggtcgatgacctgggcctgcagcgcgccctcggtgccacctcgcgcgcgccgcgctgggccatcgcctacaaatacccgcccgaagaggtcaacaccgaactgctcaacatcaccgtgcaggtggggcgtaccggccgtgtgacgccggtcgccgtgctcaaacctgtctacgtggccggctccaccgtggctcgtaccacgctgcacaacggatttgaagtcaaacgcaagggcatcctgatcggcgacaccgtggtggtgcgcaaggccggcgatgtgattcccgaactggtcggcccggtgcttgaacggcgcaaagggcgtgagggccagctgcgcgaattcgtcatgcccgagttctgcccttcatgcggcgcgaaactggcacccgccaaggagggtgacaaggacatccgctgcccgaatgtggaaagctgcccggcccagttgaccgagcgcgtgatttcgctggcctcacgcaaggcgttcgacatcgagcatctgggtgaacagtcggccatcgctctgaccaacccggaggagaaccggcctgattcggtggcgacctacgcgccgaacatcaccgaggtgctggtcgcccccggcgaagagcctgacccgtatgagccggtggaagggctggaattgccggccgcgcagaagccggtgttgtccaacgaatccgggttgttcgacctgacctccgccgatctgcgcgacgtgcgtgtgtggcgtgaggccgcaatcgtcgaagtgcatgagacggtcgatgcgaacggtaagaagaaaaaggtgcgtaagcgtgtcggcggctctggcctgtggcatcaggtgcctgccttctggaccgcgcccacgccggccaagaagctcacggccaagcagttggccgaacgcgcgcaagaagaggccgcaatcgaatccaccggaacacagggaggtgccgccagcgagacgaccggcgcacctaccggggctgaggctccacttggtactatgccgggctttgc

SEQ ID NO: 1688 - DNA, 10823 bp, Unknown
  MAG_14  MAG No. k141_2933
ctgttcgtgatcggcggcggcgtggtggccgtgggcgacatcctgctggagccggcccgctacaactaccagcgtttcctagaaggcagcgcctaccgcggccatgccaagatcgtcgcggccactgcgggccaggatgccggtctgatcggcgcggccaacctggctctgcgctgacgatgtcgctccggcaacgggacgttagtctaatggtgagtcatggccggtgccatggctcactgccgcgctgatagtgcggtcgatgagtttccgctgcctgaccatggaatcgaattccgggttctcagcgatttcctcgtactcgtgttcggtggtcacgccggcgatttcggcgataatctcctcataggacgtttcgacggttcgatgcacgccggtgacgtgcccctgacgtatcacgacaatgcggtcggataccgcgaacacatccggcagatcgtggcagaccatcaccacggaccggccttcggagcgcagtctcttgatatatgcgagcacttccgccgactgcatcaccgacagtgcggcggtcggttcgtccagcagaataagctgcgggtcattgagcagcgtgcgtgctatggccacggtctggcgctggccgacggataaggatgcgataggggagccgacccgaatcgccgagctcagggtcttcagcacggaacgggcacgcgagttcatcgaatcgtcatcgcgtatgccaatctgattgatctccttgccgaggaacaggttcgaggccacgtccaggttgtcgcagaactcctgcccctggaacaccgatgcgatgcccatgcggtccgcctccctgatcgagggaatggtcacctgttcgccgttgagatagatatggccgaatcccggctgcagaaatcccgcgatgaccttgatcagagtggactttcctgcgccgttatcgcccacgatggcgacgacctcctggcgttggatggacagattcaccgatttcaacgcctcgacgaagccgaacttcacacagatgtcctccagccgcagcagagggggtgtgctcgaattcctcatggtgtgttccttcttctcactcttctcctggtaccggtcactggctgacgtcattgcgaaccgagaactcgatggcgcataatgcgccgcctagcgcgcagttgtcgttcgggtgggatgacacgagtacatcgatgggtgccacggcatcagggaacagcatgcgctgcaacgcttcattgaacggttggatgaatacgtcgccggtcatggccagcttgccgccgagcacaatgacctccggatccacgctgatgcacagatcagccgccacctgaccgatacgcacggccgtgtcggcgatgatgcgacggcaaccggggtcgccttcgttggcaaaggacaccagatcatccagcgtcatattgccgtgtgtgacgctgagcaactgcaccagcctgttttccgccacgacggtgtcaaggcagccgcggttaccgcacgaacagatggcacccagcgggtcgacctggatatggccgatttcaccggccaggccggtcacgccatgcatgatttcgccgttgatgacgatgcctgcgccaaccccgtcgttggctgagatatatacgaaattgcgtttgcctgccgccacgcccatacgggattcgccgtatgccgcgaaattcgcgtcattatcgacgtatacgggaacgttgaacgccgtgcgcaacggggccgtgatatcgacgccgtcccatccgggcagaatgccgggaatcgctatggtgtggtcgctggtggccaccggtgcggccacggccacgccgatgccgaccagctcgctggcttcggcgtcgatgctgctcagggtctcattgatgagcagcatggcgcgttccagcgttgtgtccgccttgtggcccaacggcagggggagcgtgtgctcagcgatgattgacttcgagaagtcaacgatagaaagcgtaagatgacgtcgcgcgatccaaagcccgacgccgaggccctgatgccgtgcaagggtcaccagagtggctctgcgaccgttgcgaacggtgtttttggtctccagctggtcttcgtcgacaagctgatggacgagcgtggacacggtcgcagtggacagtcctgtcacctctgccagttcgacctgtgtcatggcgccgaacttgtggatgctggccagcaagttggcgcggtttgcctcgcgaagcgaggtctgcgaaccgaaaagccttgttgccataagagttcagtgtagtcgttaccggcatgaggcacagcgaggcgcagagcgtggatttttcggcgtgtcgccttgtgatgcgcgaaaaatcgacattgcgttcattggttgaacataaacgacaggaaattcgctttcttgagtttgacaacttaattcaatacggtattctatgagatgaacctgaggttattctcaggttcgggcgaccaaggagggttcgccatcccctcgaagatgaaggagaacaaatgaagttcactaagaagatcgtcgccgtggtggcaggcgttgccatgtgcgcgggcctcgcggcctgcggtggcagccgtagcggccaggcaactggcggtgatgccaagatcgaaaagggcgccactatcggcatttcgatgccgaccaagtccgaagagcgttggaacaaggacggcaacaacctgaaggccaagctggagaaggccggatacaaggtcatcctgtccttcgccgacgataagccggcccagcagaacgctgacatcgagaacatggtcaacaacgacgccaagatcgtcgtggtcgcttccaaggacggcaccgcagtgggccccgccgttgagaaggcccgcgatgcaggcgccaaggtcatcgcctacgatcgactgatcatgaacaccgacgccgtcgactactacgccaccttccagctggagcaggtcggcgtgctcgaggccacgtggctcattgaccagctcaagcttaaggatggcgccaccggcccgttcaatatcgagctgttcaccggttccccggatgacaacaacgccaagtacttcttcaagggcgcttgggatctgctgcagccgtacttcgagaagggcgtgctcgtctccccgtcccagcacggtcagggtggcgtgaccaaggacttcaccgttgaggattggcagaagatctccgtgatgagctggaagaccgagcaggcgcagaaggacatggaatccatccttgactccacctacgcccacggcgagaagctcgacgcggtcctcactccgtacgacggcatcgcccagggtgtgatcaacgccatcgaatccaagcgtcccgacatgaagccgggcaccgactcctggccgtacatcaccggtcaggacgccatggagatcgcagttgccaacatcgccaaggataagcagggcgagaccgtgttcaaggacgtgaacaagctggctgacgccgtgtacgacatggtcgtcgagatcgccgagggcaaggaagtctccggcctgaacggcaagttcaacaacaacaacatcgacgtcccgtccaagctgcttgacccccagaacatcaccaaggacaacctccaggatctggtcacggccaactacatcacccaggatcgcttcgacgagctgactaagtagtcctcatcaggcaatccgtaaacaaacacaatgacatgcggcgcatagccgatatgcgccgcatgtccatgaacacagaactgtgacgaggagtgatgacatgtcatcaaatgacaccatcttgacgatggaaaacatcacgaagacgttcggtccggtcaaagccctcaccgatgtgaatctttccgtcgatcgcggcgagatccacgccatctgcggcgagaacggtgcaggcaaatcgaccctgatgaacgtgctttcgggtgtgtacccatacggtagctattccggcaaaatcacctttgatggcaaggaatgcaaataccatactattaatgattccgaggccgacggcatcgtaatcattcatcaggaactggcgttgagcccgttcctgtccattgcggagaacatcttcatcggcaacgagcaggccaagggtggcgtgatcgactgggacaagacccgcgccgaggcgaagaagctgctcgatcgtgtgggacttcccgaagacccggataccagggttatggacatcggcgtcggcaagcagcagctcgtcgaaatcgccaaggcattgtccaaggacgtgaagctgctcatcctcgatgagccgaccgctgcactgaacgatgaggattccgcccacctgcttgacctggttcgtcagctacgtgacgagcagggcgtgaccagcatcatcatcactcataaactcaacgaggtcgccgccattgccgacaatgtcaccatcattcgagacggttcgaccgtcggtgtgatgtacgtgacgccggagacgccgctcgaccaggaagaactcatccgcaagatggtgggtcgtccgctgcacaacctgtacccgaaccacccctccaataccccgggcgaggaatacctgcgcgtcgaggattggaccgtgcatcatccgctcgacgcggagcgcgtgatcgtagaccatgcgaacatcaacgtgcacgccggcgagatcgtcggtctggcgggtctgatgggtgcgggtcgtaccgaaatggccatgtccatcttcggccactcttacggttccaacatctccggcaaggtgttcgtcaagggcaaggaagtcaagatgcccaacgtgcagtccgcgattgacgcaggtctcgcctacgccaccgaggatcgtaagggcaacggtctgaacctgctgcagaacatccgagagaacgcatccctggcctccctgaccaagatcagcaagggcggggttgtggacgacaaccttgagcgcaaggaagtcgaacagtaccgcaaggacttcaacatcaagtgtcatgacatcgatgtgaatgtctccaccctctccggtggtaaccagcagaaagtgctgctcgccaagtgggttatctcgcagccggacatcctcatcctcgatgagccgacccgaggcatcgacgtcggcgccaagtatgagatctacgaaatcatcgataagcttgccgatgcaggcaaggccgtcatcgtgatttcctccgagctgcctgagctcatcggtatctgcgaccgcatttacacggtgtcctacggtgtcgtcaccgacaatgtcgagaagaatggatttacccaggaatacctgatgaagggtatgaccaaggaaagggaggtggcagcctgatgagcgccgcaactgcaacacctgcaaagaaagaagaaaagaccggcctgctggccacggtcgccaacaatgcccgtcaatacggtattgtcggcgcactgctgatcatcgtcgtggccttcgagatcctgaccggaggtgtgctgctgaagccgaactccttcgtgtccctgatccagcagaacgcctacgtgatcatcctggccattggtatggtgatggtcatcatcgccacccacatcgacctttcggttggttccttggtagccttcatcggtggtgtgtgtgcactgctgatggaacgcgccggagtcaactggatgctcgccatcgtcatcgctctggtcgtcggcctgatcgtcggcgtctggcagggcttctgggtcgccgtcatcggcatcccgggcttcattaccactctggccggcatgttgatcttccgtggtctcgccaccgtgatcgtcggcgaatccgtgccgattacctccctcgaattccgtggcattgcccgtaactacctgcccaacatccttggctggtggggtccgttcgacggtctgaccattgtgctcggcatcctgtgcattgtcggctttgcctggagccagctgcgcaagcgcgcccgtgtggccaaggtcggcctggtgcccgagccgatgagcctgaccgtcctcaagattgtgcttgtcgcggtcgtcatcgccttcgtcacctacctgctggcttcctccggtaacgctgatcagggtggtaccccgatcatgctggtgatcgtcggtgtgctggtcttcatctacaacttcatcctgaccaagaccgtgttcggtcgccacgtgtacgccgttggtggcaaccgcaaggccgccatcctctccggtatcaacacccgccgcgtggacttcctgctgttcgtccacatgggcttcctgtccgcagtggccgctgtctgcatgctttcccgtctggcttccgcaactgctcaggccggtatggagttcgagatggacgccatcgctgcctgcttcatcggtggcacggccgtcaccggtggtattggtaccatcccgggcgctgtgattggtgcattcgtgatgggtgttatcaaccagggtctgtcgattatgggtgttgacaccgccgtggtgaagaccatcaagggcctcgtgctcctgctggccgtcgccgtggacatcatatccaagcgcaagaagagctgaccttcccctttctcctcctcgatgtgggattcgtgccggtgccgctggtgcggatcccacactgttatctgccgtcattcttgtaatcaaaggactttttccgccatgaaactcaccgcgcgctccacctcccgtatgtatgcattgacctgcttggcctgcgttatctggctctggcagtcactggtcgaggccaataacgatggctcgctgttcaattgggccactattgtcttctcgctgtgcttgctagtggtcatcggatggagtggttggaatgccgtcaccgggtggaacgccaaggagactgaggccgccacggcgggtgccaaggatgatgagggcagcactgattggtaacgtatatacggctgttgttgccgggaacatataggtcccggcaaacctgcagcgatatgtgcattgcaagcccgggatcccctggcttttttttatgccgaaacggaactcgacacgggcgcgcaggtcgttgggtttgtctagagcctgcatatagttacttatggtaatgactattggtaactaattggaggttgggccagcgatgtgcgattcccgaaccgataccaagaccggcttgcttccggtgaatgaggtgcggagcctcctggatgtctgctggaaggccaagaccatcaccgaactgatgccggcattgccgaaaggtatgaaaccgcgctatgtccacgtgatcgacgccgtctggcatatcaacgaaccgaatgggcaagataccggcaccgcgcgcgtgggcgacgtcagcgcattcctcggcgtcactacgccgagcatcaccaagctcgtcggcgaaatggccgacctcggactcgtcgtcaaacacgccgatgccgccgatcggcgtgcggtgacgctcacgctcaccgaacgcggcttggatatccgccgcatctatgtggaggaatatcacgcgcatttgagccaactgctgggcggattgacctcggaccagtgcgaaaccacggtacgcaccttgaccgaggctctgcgactcatgcaggaagacttccaacgtcgtagtcagaatatctgaatgaatggaggagagaacaagatcgtgactcattccgcaacacagctgcctaacggcggcaagcaaccggtctccaacaaactcgtcatcgcggtcgtctcgctcgcgatcctgaccttcctcggcatcctatcggaaacgtcactgaacatcgcctactccacgccggtggaggagttctccatcggcgcctcggtggtgcagtggcttgtcaccggttatctgctcttgctgtcggtgtcgattccgagctcgccgttcatggtgcgcaaattcgccaccaaaacactgttcatcatggccatcgtgattttcaccgccggcacattactgggcgcgctcgcggtcaacttcccgatgctgctcgccgcccgactggtcatgtcgctcggtaccggcatctccctgccgcttatcaccaacatccactggcacgaagaagcgtgattccaacatgcaacgccctattatgacttcgcggtcgtttttgcgcacgccgtctgaagcggctgggcccggcgacgaggcaactattcaggacctcgtggatacgttggaggccaaccgttcacggtgcgtgggcatggccgccaacatgatcggcgtgagcaagcgcatcatcgtcttcgtggacgaagatctcggtggccgtatcacggtgatgctcaaccccgtgatcaccgcttcggatggtgccttcgacacccaggaaggctgtttgtcgctgaccggtgaacgccgcacactgcgctgctgccgtatcgaggtcaactacgaggaccgtcggttccgcgcccgccacgccaccttcaccggctggaccgcgcagatcatccaacacgaagtcgatcactgcaacggcatcgtcatctgattcattcggtgctcgttgcagcccaccccccccgaggctggtcatcgcgattacgatgcaattacatcgcaaccgctatgaccagtttttttatgtgcactgttggggtgggtgttctcagcggtgttggggtgccatgcgctggccggttggcttcgctgaggggtgtgggtggtgtcatgttgccagcggttggctggttggcttcgctggaggttctctcagcgtcggtgatgtgccaaagagtggcgggctggcttcgctaaggagcgttaccgtcggtggagaaccagtgcgtgacctgctgccgacgctaagcgttcattaagcgtcgttagcggccaaaacttggacgtgtaacgatgctgggcggttttagcgtcgttgctgtgccaagttgtggtcctctgccgacgctgccagtgcagtagcgtcggcgttgggacaggtgttgggcctttgccgactctataagcgagggaaaatcattcgccggtgcctaagtgggtctattgccatgctgaatacatctgctgagtgtagctatgcgttcgaaggcgatttcgggacctttctcagtagcaaatatgcctaatgcgcggagttatacacttcaccgtgcacttatacacgccaaacgaagcagaaatcgactgctgacagtggacgacacgccagagacgatgtggataacccagagacggtggataacagctgcgcgatcagtggataacctgcaagaaagtgcggttatccaccgacggtagccactgttatgcacattccataccccttggaatcattgggttttccacttatccaccatctcgccatgcgggcttgcgggccgccgcacgaacgtcatacagtgtgcctcacggcgggcaacgtagcccgccgtccacatcacatgaaggggaaacaccatgagcaccgcaaccactactactgccgaaaatgccggtttgccagcaatgctggacaccaaagacgtagccgagatgttcaaacgctgcaatctcgccgtctatgccgaagcgagacgcatatattatcgcgaagtgaatctgaacccatgcaaaaagtatccgaagcaggtgctgcaaaggatcgaatggtggttctgggattggtttgcctatgactgcgccgtcagcggtattggactgaccggcaatgaatccgaagatttacgtatcgaattgcagcacggtccgggcgcaggtatctcgccattcctagccttggccgaattcatgtatgacaaggacgaacgtatcggcacacgcgagatacgtgattttcgcgaacttgatgacaccaatttcgcttcgatgttctggattcgcgatgccagcgcggtcaaaggtcgtctgacagttgaggacatcattcatggtggtgtctacgaggtggcggacgtacatgccgcctcgcaatacgatggtgcgcacggcggcatgatcgtcaatcgcatcgcacatgtgagaggcgtgtggcgatcctgttccatcccgatctatgaggcacgaaggcctgatgacccgcaaatcggtgattcgctggcccgttcattccgggaaaccggatataaaccggactttgccggtctggtgcggtttttctacgggagggccaaagacaccggtctcgactgggaagatgtggaagccgcgcgccaagccggtactttgggcgcgctgatcaagaaggccagcaatcggtgaaggattcgcctaacgctgctgtccaagtcggcggccgcgatcacgaatgaagagtgacgcaaccaaacagaccgcacacacaatggcgaccgtgcggaacgaagcccgcacgccaatggccgatgccgccgcttccggcactccggtgcgcatggccgccgcggtgtgcgtgttcatgatggtgaccagcagcacagccgcagacgtcatgatcgcgaagcccagtaaggcgagcggccggccaccgatacggtcatacatcttgcctgccaccgggttcaggatgcccatggcgatgccgctcggcatcatcaccagaccggacaccagtgcattaacgccaagatcattctgcaaatatgcccatcgcgtgcaggaacagctggcgggtggtgaaggtctcgatgaggaacgcggtgatcgggatcatgatgccgttggtaagcatgaatccggtggtcagccattgcacggtgctgccgggcacatcgaattcatgcatcaacgtgggcagggcggagatcatcagcgtttggttgaggatggccacaaacgagccgatcatcagggtgatgaccatggcggtggtgttggc

SEQ ID NO: 1689 - DNA, 3311 bp, Unknown
  MAG_14  MAG No. k141_3675
cagaaggccatcgacctcggcgccgccaactccctgctggtcaagctgaaccagatcggttccgtcaccgagaccctcgacgccatcgagctggccaccgccaacggctacacctccatggtttcccaccgctccggcgagactccggacaccaccatctccgacctggctgttgctaagaacacccgccagatcaagaccggtgccccggcccgtggcgagcgcgttgccaagtacaaccgcctgctcgagatcgaggaggagctcggctccaccgctcagtacgccggctacagcgccttcaaggcctgcaagaagtacttggccaagtgagctgaaacgcccgtaaaggcgtgagtttccactgaagctcgatacccgtcgtgttcgtcaagtcgaatgcggcgggtattttcatgtgacatgagcaagtcgtcccgtaccggcaaacctggcaaaaccggcaaagcacaagtcaggaaaaaagggtcggcgggacccatagcgttcttcgtctccctgttcatcatcgcacttggcaccatccagctggtctccaccttccacacttatgccctgaacctggccgagctcaatggcctcaagcgtgaggaagcctcgctgatcgcccaaaagcaggagttggagaacgatatcaagcgttgggatgacaaggcctacatcaccgcccaggcccgtgaacgcctcggcttcgtattccccggcgaacaggccgtgcgtgtgctgcatcccgaagccgtgaccggctccgatcgcgaatcccagaaaacggaagattccaataccagcaacaaaaaagtcctgccatggtacagcgaactgtcttactcgctcaaaaaggccgatgagcctgtgaccgatagcgagtccggcaaatccgatacttccggttcctctgactcgtcatccaacgactcatccaagcagtccgataagtcagaccagaacacccaatccgatcagaacacccagcaaaacacaggggagggaacccaacagtgaccatcgatatcgccgccaaggccaaggcccttgtcgacaccatgcttgccgagcccgccaacgaccatgacatcgatctggtgcaacggcagctcggccgctacccgcgcggcatggtcgccgtgggggcgcgatgcgtctgcggtaggccacttgccgtaatcacccgcccggtgttgcccggcggaatccctttccccaccacgtgctatctgaccggtccggaagccgtcaaggccgcctcccatgtcgaggccgccggcgtgatgcagcaatacaacgacatgttggcctcggacgaggagctcaaggccgcatatgagcaggcccataacctgtatctggcattccgtcacgaactggcaggccgtcttggcgacagtgaggagcatattgaaggcacttcggccggtggcatgccggtgcgcgtcaagtgcctgcatgccctgctggcccagtccttggttatggggccgggcgtcaaccccattggcgatttggtgctggaacgcgtcaaagacgaattcgatccgaccgtctgccgctgcacgctggatgattgatcaacagatgagccaccgcgaacagcccattcatacgcactaagggatacgaggagaaggcaatgagcaaggaatccgtaaccgtcgccggcattgattgcggcacgaactccattcgactgaagatcgcacgtgtcgatgccgatggcatgcatgaggtggtgccgcgcatcctgcgtgtgatccgccttggtcaggatgtggacaagacccatcgttttgccgacgaagcgttggaacgcgcctatgcggctgctcgggaattcgccggtgtgattgccgagcatcccatcgacggcctgcgtttcgttgccacctccgccactcgtgacgcggaaaaccgtgaggagttcgaggatgagatcgaacgtatcctcggcgtgcgccccgaagtcattcccggcactgaagaagccgacctgagcttcctcggcgccacttccgtggtcaatcgcgacgatctgcccgccccctatctggtggttgacctcggcggcgggtccaccgagctggtcatcggtggcgacggcgtcagtgcgtccaccacccaggttcagggcgcattctccatgaacatcggttccgtgcgcatgaccgaacgtcatctgaccaacgatccgccgacccaggcgcagatcgatgaggccgttgcggacatcgacgagcatatcgatgaggccttccgcaccgtggacgcaggcaaggcccgtaccatcatcggtgtgtccggcacggtgaccacgatgaccgccttggctatgggattgaaagaatacgatcacaccgtggtcgacgggcatcggttgagccttgaagacgcctatgccgtggacgacaagttccttaggatgacgcgcgccgagcgccgcgaatacaagaccatccaccccggccgtatcgatgtggtcggcggcggcgctgtggtctggagccgtgtgctggcgcgtgtcagcgaagccgccaaggccgatcatggtgaagccatcgattcgttcgtcgccagcgaacacgggctgctggacggcattgtgctcgattatggtcgccggttgctggctcaatagcgtaagtggtaagtgcctccagcgggctgagccgttaagcaaacagcccggtgggctgtttgcgttatatgcgacgccggcgacgctatcgctaccggctgctacaaacagcccactgggctgtttgtaggcgaagggagcggctatgccgcgacggctgcacgaagcgcagcaacccgcaagcaatgctcagggcaggagatagcttataatagaaaagttggcctccgtggcgaaatggtatacgcagtcgacttaaaatcgatcgcttcggcttgtgggttcgagtcccaccggaggcactttcggaaacccggcttggatgccgggtttccttgtttttccaatggtttccgcatggtttgcaattcactccaaatcactccaaatcactgcaattaccggaagagtgtgggcaaaatgtgggcacggaatcgctgtcggattgatgtgagacgaatgtgccgatggcttaggatgcgatatgtccacgcttgtccgcgtatatcatgaggatatagctaatgagagggtgaatgactgtgtgggaggtgcaatcgtgaaagatcccttccaagaggccgtcagagcacgtttggagacggtgagttcatctgatgggcatctgaccgtgccggttgatccggagaagatcgcggag

SEQ ID NO: 1690 - DNA, 14111 bp, Unknown
  MAG_14  MAG No. k141_4058
acgggcggtggccatcgggatccagtcgccggtcaacgggtcgcggcgcatctgcggggcggcgtacggcacttcgttgccgtcggcgtccaggtgcggggcgaaacggtagtccagcgggcgcgggtccttgagctcgcgggtcttggcaccggagacgaactcggggtcgtcgtccaggtagaagaagtcacgaccgtcggcaagcgtcgtcggcgtgatgcggatgtgctccttcgcatactccccgggggtgtagttggcgaaatcagccatgggtttactcactttcctcaatgatctcgctctggtgggccagcacgagttcctttaccaaatccttggttttggcggcggagtcgggatcgagcccgtcgtcagtaatgaccgtgtccacctggtcgaagcgcgcaaacagcgacagcgatgtgcagctccacttggtgtgatcggtcaaaactatggtacgatcggcgatgtccatcatcgccatatcggttgcggcttccagcgaattcggcatcaggaagccacggggaatcgacaccgagtgggtgccgaggaatacggtgttgacacgcagcgaggcgacgaccttgtccgcgatcggaccgacaagcgagttcgatcgggtgatcacgccgccggtgacgatcacctccacgtccttggattcgagggcctggaccagttcggccacgggaatcgaattggtgaggatggtgatgccgctggactgctgcgattcgagcagatgctgggcgaagacataggccgtggtgccgccgccgatggcgatcacatcgccgggagccacatatttgatggcttcctgggcgatggcgtccttcaggccgagatccatctgggacttgacagagaacaggggttcgctgagcaaggtactggtagtcaccgcgccgccatggacgcgtttcagcagtcccttgtcggcaagttcggcgatatcgcggcggatggtcatcgctgacacacccagttccttcgatagcgccgtaatgcgcactgccccgcgcgtgcgcaacctgctcaagatgaggtgctgacgttgtgacgaaatcatgtgaacattatcgcacacaaaagctcacaaaccaaaccggcttgagcgttttggggacaatctctcgaaaattccgggcaattcaggtgttcatttccacaaaaccgcgcaaaatcgcacattgtgcgaaccgatattctcgcagcgaccactagcgcgatgactcacgaccgacgactctcccgagcgcgttgctcagcggcgagtcacgcctgatacctggtgcatcccgattcatgtatcttctgccgagccgacgcctgcgtgcgcctcgacacgcggtagccccttccccaattcgcctaggcaggaatcgcctagccgcaccagcccaagcgtgagacaataggcggtatgacttacgtttctgaaagcttctggcacgacgccgtcaacaaagccaccaccgatctgttcaccttcggctacaagcacatcatcaaaccgaacttcgtgttcaaccaccgccccgatgaggcacacgatcagatgatcgagttctgccacgtcatcaagaacgtcccgccgctgctgctcgccgagcagctgatgctcgactacaccgaccccattctggaaacgaatgtgatgggcgtcgatttcaccaacccgttcggcctgtccgccggcctcgacaagaactgcgacatgcccgtggtgctggaccatgccggcttcggttttgaaaccgtaggatccaccacctcgcgtccctgcccgggcaacgccaagccgtggttccaccgtctgcctgaatacgattcgatgatggtgcacgtcggcctcgccaacatcggttcggacaaggtcatcgagcgcgccgagaaggcttggactcaggcccgccagatgcagctgtccgtgtcgatcgcccgcaccaacgacgaccagtgcggcgatttggacgaaggcattgaggattactgcatttcgatgcgccgcgccgccggccgcaccgcgatggtggaggtcaacgtctcctgcccgaacacgcgcgtcggcgaaccgttcaccgcgactccggaagcgctcgaccgtctgtttacggcgctcgacaagatcgaccgcccgcagcccacgctggtcaagatgccgttgaacaagccgtggggcgagtacaaggagctgctcgatgtgctggccgagcacaatgtgcaggggctgtccatcgccaatctgcagaaggaccgcaccggcctcgagattccgcgcgattgggagggcggcctgtccggcggcccgtgcaccaacgccagcaccgagctgattcgcaaggtgtataaggagtatggcgaccggttcgccatcgccggcatcggtggcgtctttacccccgagcaagcctatgcgaagattcgttccggctccagcctggtcatgttcatcagctcgctgatgtaccgaggcccgcagcagatcaccgtgttgaagcgcggtctggcccagctgctgcgccgcgacggattcgagcacgtctccgacgccgtcggcgtggacgtggagtgaactcacatattgccctattacccatggggcggtaaaaccctcatggggcggtgattgtcccatggggcggttagccaaatttcacattccgcagaataccgccgttttgggttaccgccccatgagggttttaccgccccatgagggttttaccgccccatgggaaagtcaccgccccatgaggattcagtacgcaccggccacgtattgcggggcgtaggggacctctgtggacggtatgcccagcttgttggccgcacgcaacggccagtacggatcgcgcaatgcggcgcggccaatttccacggcatcggcttcgccacgggccaaaatcttggccgcctgcttcggcttggtgataagacccaccgcggtcaccggaatatcggccttggacttgacctgctcggcgaacggcacctgatagttcggcttgaccggaatcgacactcccgacatgatgccgccagtggacacgtccatcacatcgacgccatgctccttcagcaccttggatagtgcaatggtctgatccaaatcccaaccgccagcggcccaatccgtggccgaaatgcgcaccagaaccggcacgccctcggggacggccccgcgcacggcatccacaacctcgaccaggaaacgagagcgaccggtcaaatcgccaccatattcgtcatcacgctcattgctcagcgggtcaaggaactgagaaatcagatagccatgcgcagcatgaatctgaatagcctggaagccggcggccaccgcacggcccgccgccgcggcgaacgcaccgaccagaccatgaatctcatccacggacagcgcgcgcggcgtacgcagcccgccgaacgcgatttcagacggtgccatggtgggccagccgcccgcctcctccggcacactctgaccgtcgtaaccaacggcgaagcaaccggtcgaagccttacgccccgcatggttgagctggatggcaggcaccgcacccgcctcgcgaataccgtccacgatccagcgccaagcatcaatctgcccgtcttcccacaggcccagatcgcacggcgtgatacgcccttcaggagccacggcggtggattcgacgatcaccatgccgaatccgccgaacgcacgagacacgtaatgctggtagtggaacggcgtgggcctaccatcgcaggcgaacgacgaacacgtgcacatcggcggcaaccaaatacgattacgcacggtcacttcgcgcagcgtcattggcgcaaacagtcccggacggtccttgctggctttcttatctgccttgctcacagcttccctttcctcataatcctcataatcatcgaacgattcgctcgtcttgcccgcgccggcccgcttcttggaccgtgcgtcggattttgacttcttcttaccgtgcctacggttcctcgatgcatcctcgtgcttggtcttcggctgcttggactgttcgccgtccgaagacgaagccagcgtcaccgctttgagatccggcacgtcgaatccacgaaaatcaaaattctcatgcgtcagatcgtcgtcgctcatcgttcccctttccaatgcgcgttcatggcgaatattcgatgaacgcgctggcgttgtcattaagtattgtaaaacgggcgtcacctgaaacaggtaacgcccgcaaactacgtaatttgggtatcgcagtcgactatgttacgtagactcagccggcctgcaatcaccaaatgtcaaacgccaatcaccaatcactggccatcattcgaccgctctgaattggtgccttgggtttgggtgttgttttgcccagtgttctgcgactgagactgcgactgggattgaccattggtggtcgtctgcgattggctgttgccattcgtagtggtctgcggcacgctgaacgttcgtccgccaatgcccaggtacttgccagtcgtggtgtacttcgagacgggctggccgtaatcgttgtcaatcggtattttcttcttggaaatgtagctattgaagaagttggtaacggccggagctgcgattgtcgaaccatcccaatagctgttgtaccggccgttgatggcaatgttggaaatacggttggtgtacgggttctgtgcatcgccgaccacagcgaacgccgcaatctgattaggaatgaacgatccaccggacaccgcaagatcctcactggtaccggtcttaccaaacgacttacgcccgtcagccaatctgaatgaccaaccggcaccatccggccgcaccgtaccttggttcagggtataagcgagtgtttggatgatgtccttatccaccgcctgatggcagttcgcggatggaaccttgagatcgttgccgtccttatcggtcaccttgctgatggcaatcgggttgcattgcacaccattcgaggcgtatacggcgaagatgctcgccatggtcagcggggacacattcaccgagccgatcatcatggatggtgtatacacctgggttttgtcgatggtctcacccgtggcggcgtcatggtatcccagtttggtcgcggtgtccgccaccttgcacagtttgaggatggcgcccatggaggcctgggtggtgttgtgcgatcgcaccagaccgaggaacgggctttccgggttcaccgtgccggcgcccatggcgttcgacacgttccacgaatcggcaccgcccttgtagttgttgcaggcgaagtcggtcgtggggtacgtcgtggtggtctgtaggttgtcgttgatcgaatgacccgcctccatccacgcaatcaggttgatcggcttccaagacgaaccaatggtccaaccggagccgccgccgtccaccagatcgacggcatagttctggcccgacttggtcggatcgttcgcggctgccggagtggcgtcatagtaacgattcaggccaaagctcagcacctcgccggttcccggtttgactgcggccatggctatttccatgccgctgggatcgtccggtggaatggtattacgcgcggtctccatcatcgtggaattcgcttccacatccaacgtggtgacgatcttcaggccaccctcctgcagcagcttgttacgctccgcacgagtcttgccgaattcttcggagttctggatgcgatgcaccacgaaatcacagaagtatgcgtagtcgccggtgtcctggcagccgacgttcacggcctgcaccttcagcgtgtccttcagcggcgtgttcacggcttcggtgtactgcttctgggtgatgtacccctcctgcagcatcagcttgagcacgatgttgcgctggttctcgctttccttctggttctcctcgaccagcggatcgtactggctcgggttcttggtgatagccgcgatggtggcggactgcaccacgttcaaatcggcggcggacacgctgaagtagcgctgggctgcggtttccacgccatacaggttgttgccgaactgggcgatgttcagatagccctgcagaatctcggccttggaatacttcttctccatctgcacggagatcagcatctcgcgaatcttacgggcgacggtgtcttcggtggcatggtactgggcgatcgggtcgtcgtcctcgatcgcctgcatgagcagcacgttcttgacgtactgctgggtcagcgacgaaccaccctgctgggagcctttgacgaggtaggtctgcacgaacgcacgcatcacgccttgcacgtcgacgccggcgtgagtccagaatcgacggtcctcgcgcgccaccactgcctgctgcatggttttggaaatcttcttcagcggcacgacgatacggttttggttgtagaacgtcgcgataacggtggaaccgtctcgcgcgtacatcgtcgacttctggggcagaccggtcacgtcgaagtccacgttttctaccttgagcgacggaatcaccgctttggcggctttattggcaccgaccacacccggtacaaacaacacgctggccgccacgccaccgcagacggcaagcatgatataggccaagaggagaacaagcacacgttggagagtgagggacttctttttgggcatgggccccattctaaatggggtgccctaccaaccgggctcgcggtcagcttccgtgaacatatcatcacaagaaccgcactagcgtaacattggctggaagtcagccgaacggtcagcgccgcgagcgtcgaatcagcatgcctggctggaagatgatgatcgatcgaccgtcacgtgcgatccatccgcggttggaaaagtccatcaacgccttgttcacggtctcacgactggagcccaccagttgggccagctcttcctgagtcaggtcatgcggcactttgaggccctgttccaccggctcgccgaaacgtgagcccaagttgagcaatgtcttggccagacgcgccggcacatccatgaataccaagtcggagatgcgttcgttgttgccgcgctggcggttggccatgacctgcaacatgtcgatggccacacgcggatgctcatcaagccatgcgaacagggcatcatgctccagccagaccacgcgcgtgccatggctcatggacaccgcggacgcggtgcgcgggccaccatgagggtcgaataccggaatctcgccaagcacttcgcccggcgcgtggatggacagcagctgcacgcggtcatcggaagaagtgcgaatcagcttgacgcgcccctgctccagtagatacatgcgctgatcggtatcgccttcggagaagatatagtcgcccttatcgaaggtcgcacgcttcaaatgcggcagcagctcctcggcttcggctggcgatacctgcttgaacaatgccgtatgcagcaggatgttctcctcgtcagcaaaagcgtttggcgtttccaagctcatcgcaccatccttattgtcctacgaccgtcgtcggccatccgtcatattgtaacgcgccccacaggtttcgtcagaagcatgccatcattcgtcacttcatgtgtggcgcgatccgatagccgtacgacatgctgacgaatgtgttaccgcgaaaaacggcactgtcgcggttaccgcgctcgcccatgacaaaaccacgcacggccaccggcaaaatcgtatacggccatcggtgaaatcacgccgcaaaccagtcaataaggtgttcgacgatgtgttcgcggctgagacccgtctggcttttcatcgggtccacgcgtttgactgctgatttcaccgctttgtctgacatcttctcgcgactggtgttgagcacacggctcatcttggccgcatcgatgtcatatgccatggtcacatggtgcagcaccgcgccgcctgagcctacggggaagcgccgttgcgccgctcccccgatcttgccgtactgcgaggcgatatcattgaggcccgcgaaccgcacatccaagccaagttcgcgcagcgcttcgaccagccaccagtcacagagccggtaggattcttcgatgcttacgccctgaacgaaatcgagcggtgcatacagagaataggtaatggtgttgcccggttcgataaacatcgcgccaccacccgtgcaacggcgcaccacgtcgaaaccgagctgctcggcaatgtccagattcacctcgtcctgggccgattggaaacggccgatgaccacagccgggcccgcccactcccagaaccgtatggtcggctgtcgtgttcctgctgcgacttcacgcgcccaggtctcgtcaatggccatttgctcgtccggagtacgcggatggtcgtggatcacggtgagttgaggtctgagggcgttccagcgctcccggtattcagagcttttgtcgggctgcttggtttgtgtattgatggatgccggggtgttcggcgcatcggggctggccacccccacccgctgcgcgggagccgccaccagcgggggcaagttgctgcttacggctcggctatatgcggttttgatggcaacttcatctgtgccgataatttggcaactagggtgagcgtccaatacggaccgcaatgaatcatcactaattagagcctgttccaagtcacgcaacaaagcatgagattcggcatccgaaactgattcaataaagaaatcaccgctgatatggcatgactgtgcggtgccgtcatcatcgacggatacggtcacggcgactagtttgccgccaacggttttgcattccccatgtcgcatttgcatgcaactcagtataaacttggctcccctctggaggggagccaagtgggacatcacatgcgggccagaatgtccttgccgacctggtcggtggagcgcacggtggagccgagctcctcgatgtccgcttcgacggcggtgtgaatcttcttggccgcatcatcaaagccgagatgctcgagcagcatggcggcggagaggatggcggcggtcgggttggccttgttctgaccggcgatgtccggagcggaaccgtgaatcggctcgaacatggacgggaactcgtcggaggcgttgatgcagccggaggcggagtagcccacgccgcccaccacggagccggcctcatcggtcagaatgtcgccgaagaggttgtctgtgagaatcacatcgaaacggctcgggtcggagaccaggaagatggtggccgcatcgatgtgctggtagtcgtgggtgacctcagggtattcctcgccgaccttgtcgacgatgcgttgccacatatcaccggcgttgacgagcacgttcttcttgtgcaccagggtgacgtgcttcttgcgcttcatagcgagcttgaaggcgtaacgcaccacacgctccacaccgtatgcggtgttgatggacacctcggtggccacctcctgcggggtgttgcggcgcaccgcgccgccggcgccgcagtacagaccttcggtgccttcacgcaccaccacgaagtcgatgtcgccggggttggcgagcggcgaggtgacgcccttgtacagcttggaggggcgcaggttcacgtactggtcgaggtcgaagcgcagcttcagcagcaggccgcgttccagaatgccggccttgatgcgtggatcgcccacggcgccgagcagaatcgcgtcgttggccttgatgcgctcctcttcgtcctcgggcaggatcgcaccatcgcgcagataacgctcggcacccaagtcgaagttctcatactcgaagtcagctacgccttcagcggccttttccaaagccttctgagcccacggagtgacttccttgccaataccgtcgccgggaataacggcgattttatatgtctttgccatagttcaaggagcctactcgcgcgaccacctgccggcccgaacccgctcagctagtggacacaaccaacatgcgtatcgtgtcgagacattcattaggtcattttagtgttcattaggtcggcgtgggttcatttcagggactgaaatggcggcatttcagtctcacatagaagaggacaccgacctaatgaacgacgaaatgacctaatgagcgagccccatcacatccatgcaccaagcgttctcataggaaacctcttcccattgcttgtaacgcccggatagaccgccgtgaccggcctcgacctcgatcttagccaccgcgtccacgccggcggactgcagacgggccagccatttgagcggctcgacgtacagcacgcgggtgtcgttcatcgaggtggtaatgaagattctcgggaattgcgcggcggcgagcgcgccggcggcagccccatcagcactgccgtcaccggcagcctcgtcgtcgccgccctcgagcacggtgaccggcacattctcgtatggcgtgtacgacttcatgtactgatacacctcagggtcatgcaacgggtctccccattcgtcccattcggtgacggtcaacggcaagtccgggtcaagaatggaggtcaacgcgtccacgaacggcacatccgcctcaacaccggcgtagcattcgggtgccatattggcaatcgcgcccatcagcaggccgccagcggatccgccgttggccacggtgcgccaagcatcagccaaatgcgccttctgcagcgcgcgtgtggcgtccacgaagtcctcaaaggaatgcttcttgttcagtctgcgcccctgttcataccaggcgcgtcccatttcgccgccaccgcgaatgtgcggcacggcgtacagcacaccgcgatccaacatgctcagacgagagaccgagaaccccggatcggaggaaatctcgtatgcaccatatccggtaatgaacatcggcgaatcctgcgccgggcaatcgcggtgccagacgagggaaacaggaatgcgttcgccgtcgcgcgcggtaatccacacacggcgttccatgtaatcgcgtggattgaagtcgcccagcacggtggctcgtttcagcagcgcatcttcgccggtggcgggatcgatttcgtgcagctcgcccgggcgggtgtagctggcgaacgagtagcgcatgcgcggcgcctcatacgaggggttgccgccgacgccgatggtgtacaggcgccgggtctcaccgggcaggtggtcgtcgctggcaccatcggaagatgacgtgtgatccgtgggggcctcatcttcggtccacaagatctcgccatgatcgccggtgaagttttcgcgatcggcggcgaccatgtcccagtcgtcctccagggcaggcggcagcaattccgtaaaccgccacggccgtccggccaggaagtcggcggcagccgcgctcttggtcatgtatgccacgtgcggctggccgtcggcacggtagctcagggacacaaagttgcgatgcaacgcgatgccttcgatgcccagaccgtgggcaccctgcaatatcgccggattggcggcgttgaagtatgcctcggtaatcggcttatccggctcaccatgttcacagccgtacggcgacccggcggcgatgcacacgccttcgccgagtcggtacggcggctcatggccacgcatgtcaatgacgtcgatttcgaaattcggattggcggcgttgtggtagaccacggcgagcggcacatccgcaccgttctcccccgcgccttcaaaacaggcaaagctcacatcatattcaatatcgttctgacgtggaatgaaggcttggaattcgccttcaggcgtggccaccggcagcatcagcacttcggtggtggttttggaaccggtgccgatcacgatattgcgctcatcaaaactgatgccgacgcccacccagaaccgttcatcggtttctcggtacacgcacacatccgattcgaccgccgtgccaacacgatgccgccacacggcgagcggccgccaggaatcgtccaattccacccagaacacccattggccgtccggcgtgaagcatgcgctgccaatgccggtgaactgttcgggcagttcgctgaccggctccccggtctccagcccggcaaggtcgcgaatgcggaaatcatatcgttcgtctcccgcaacatccacgccgtacagcatccaacggccgtccttgctcagatccaagccgccgagccggaagaagtcatgcccctcggattccttgttcgcatcaaaaacgacctgttcaccgggcatggagccgggcgcgccttgcggatccacgaccggcgggtcccagtcatcggcatcgcgcacggggatgcggcattgcacgccatactgtttgccctgctgcgtgcgggtgaagtaccagtaatcattgacgcgcgtgggaacagacatatcggtctcttccacatgcgatttcagctcttcaaacaacgtatgccggaaatccgccagatgcgccatgcgacgctcgcagtactggttttcggcagctacgtagctgcgcacatcatcggagtctttgtctcgcatccactcgtaatcgtcgtcgaaaacgtcaccgtggaattcgcggcgcttcggctcgcgcttggcgtaaggcggcatcgcggccgcggcgtttgtgctctcgtcagtcataccacgcgattataggcgaggcaccacaccgggacgcattcggcgttcatcacgccgcgcttatcgcaacaccgtcttcagatacggcagcatggtcttcagaatgttcgagccggtggtgccggtgaatactggtacatcggttaccggagtcggctgggtcgaggtgagtcccgtcaccgacgccaatccggttgattcgcgcgggctcaactcacgaatgacgatcgccagtacacgtccgggatatctgcgggcgatggtggcgtacgtggtcgggtccttctgcccgtcatcgcccaccagaatgaacttcatgtccgggaagtcggccataagttgttcggcaaactcaagtttgtgctgggggccggtgggcacgaaggtcttgggcctcgggtcgaggtcgcgcagcagcagcgggccttcgggaaaaccatggtcagtgatgaagttgcgaatcgaactctccacattccagggcgatgtcgaaagatagaagaacggtgcgccggggaacaagtcggcgatgcgggtgaacagcacgctcatgcccggcacggaggctttcttcttggggtcgaggaacagcaggttgtacgcggccttccatggcaccggggcctgtgtgatcatgatggtgtcgtccacatcggagatgatgccgactttggcactggcggggatggtgtacaggttggcgctcacgggtttgcggttggccacgctgtaggagacgcgatggatgccgggcaccagacgatgctcggccacgaggtcgaggtatccggcggaatcggagatggcgtattcgctgccgagatcgcgcgtgcggtccaccttgtcatagacctcggagacgccgatctgcacggtgttgagcggcgtgtcatcaatgctggcctgcacgtgggtgcgcggcgcggatacggcaagcatgccgcggatgccgcggatcagttcgccggattgcgcatgcttgggggcgtataccgtgcggcagatcaggcgcgagtaatcgccggtgccataacccacatagggttccactcgcggataccagccccattggcgcaccacctgagtggagatgtgtgaccatacgccgaacacgcgggtgatggcacgacgtatgaatcgggtgatcggcggcttgacctcgatgcgctcacgcttggagggggtgtcgaacgtcgtggcagccttgcgtgcgggaatcggcacggtgggcatgtcatcggaatgttcagcattgctggcattgctggcattgtcggcgccattggcggatgccttgacgtcagagactggcgcggtggcggacagcgctgcattgcgagcagcagcatcccaaggcagtcgcttgcctgccgcctcaaaatcctcgcgtgggcttctcatagacaccaatataggccatacgcctcattttcttggctcccctccataagaggcacgatgcatataggtttgatgccacatactggct

SEQ ID NO: 1691 - DNA, 15093 bp, Unknown
  MAG_14  MAG No. k141_4172
atgatcgaatacgtcgataaccagcatgaacatttcgtccacccgaccgagatcaaggacggcaactacgtcgctccgaccgctccgggcaacggtaccgaaatgacgctggagacggccgagaagtacctgtatcgcggctgaccgcaactgaaaattcataactgaacaacacaactcaacacaacaacacacaaccactccggctggggtgccgaagccccggccgggcgtgacatggaacacccatgaaacgcagaataaggatggacgaaggagttcccatggatctgcatctcgaaggcaaagtcatcatcatcaccggcggtttcaaaggcatcggcaaaggcatcacgctgcaactggcccaggagggggccatcccggtggtgattaatcgacccgacagcgctctcgacgagttcaagaaggatatcgagcagtacaccaccacctatgatgtgcacttgcttgacctcaacgacaccgacaagatcgccggcgtcgtcgaagcaacatacaagaagtacggccatatcgatggcattgtgaataacgccggaaagaacgacaacaaggatctcgagaccactacttggcgtgagttcgaggaatcgcttcacggcaacctgactcactattacgagctggtccacgcggccgtgccgtatctcaaggaaagccgcggatccatcgtgaacatctcgtccaagaccgcgcttaccggccaaggcaagaccagcgcctatgcggccgccaagggcgcgatcctgggcctgacccgtgaatgggccgccgcattggtgcacgatagcgtgcgtgtcaacgccatagtcgtctccgagtgctggaccccgctctatgccgattggatcaagacctttggcgatgaagcggcccagcaggcgcgcctgtcggtgatcaccgacaagattccgctggaacatcgtatgaccaccaccgaagagatcggtaatgaagcggcattcctgctctccgaccgctccagccacaccaccggtcagtgggtgtacgtcgatggcggctatgtccaccttgaccgtgcgctgagctgacaagcagccctttcccgaatattcgcgcggcaattccggagctttgatcattgctccatccgtacgccgtatccgcgtatgccgcccgtatcacccgcgccctgggtcatccgtttaccaacatggcccagggtggtccacttctcgctaggtaatatcggggaaactcgtatcactaaggagtcaatgatgacatccaaaaacacaaccggttccaaggcgaccatcgccattgtgctggtgacctcactgttctttatctggggcctgaccatgaacctcgtgaacgcgttgaactcgccgttcgcaaactacatagaactcagcagcgccgaagcgtcattactgcaggtggcctattacggcgcatacttcgtcatggccattccggccggcttgatcgccaagcgtttcggttataagggcggcgtcatctccggtctgttcctgttcgctctgggcgcgttcatggtgatccctgccaccagcatggccagctacggcctgttcctgttcgccatgttcgttatcgcgctcggcgcggcatcgctggagaccaactgcaatccgtatatcaccaagctgggtgatgaaaagggcgaatcgttccgtatcaacatggcgcagagtttcaacggcgtcggcaacatcgttggcccgctgattcttggccagattctcggcaccaccgtcgcatcaggcgagtccggcttcgacgccgctaaggcgcagttcctgaatgatacccgcacgatatacattgtgatcggcgttgtgctggtcgtggtgctcgccgtgttcgcgctgttcaagctgcccacgcctccgggagacgaagaggaggccgcgggcggcgcctcctccgagaacagctccttcttcgggctgctcaagcgtccgtacttcgcattgggcgtgcttgccgagttcattttcatcggcctgcaagtggccggcatggcggtcttctccgcctacgcgctcaagcactggggcgcgggcatcacagccggcaccgcggcgatgatgctttccgtgctttccctgctgttcaccatcggacgcttcgccaccaccccattgatggccaaattcgatccctcgaagattcttggcgtatacatgaccatttcagccgtgctgatgttcgtggtattccttggcctgggcaaggtctccgtcatcgcgttcatggtggcgtatctgttcatttccatcggatacccgaccatattctccctgacgctgaaaggtatcaagggttccgcggcgaagaccggttcctcggctttggtgatgagcattgtgggcgccgcgttgattccgctgctgctcggtgtgattcaggatgcggcaggcatcgagatcgccatcctggtgatggtcccgggcttcctgttcgtggcatggtacgcattctggggttccaagatcggtctgaaggaggcctgatatgacactcaacgtaatcgattcccacttccatatctgggatccggatgcgcaggatctgccatggctggcaggattgccctcgctgcaacacaagtacacgattgaagacctagccgcacagtacgccaagtttggcgtgaacttcctcggcggcgtatatgtggaggtcgacgcggccgatcacgagctcgaggaccggttgttgtacgagaatgccagccctctgatcctgaagcgcatgttgcaaggacgggtaagcccttggatgcgtgtcccgatcaacgccgatggcatcagggaaccgctgcatgtggattccgagccgcggggccgtgcgctcgaacccgaattcatcgccggtctacgcgcgatggccgccaagggattgccattcgagctgtgcaaccggggcccggagttgggcgacatggccaaggcgttctcgcaggttcctgaagtgacggtcatcatcgatcatctcggcaacgtgcccgggcttgatgaggaatcgtgcgccgcactcgcagcgttggccgaactgccgaattcgtatatcaaggtttccggcgacaacccggtggacccggacatcgtgaaatacgtgcgggacacattcggcccgaagaaggtgctgtacagctccaactggccggtcgtggaactcaactcgacctttgccacgcacttccaactcatgctggacacgttcggcgaggacgaggacttcttcgaaaacaacgcccgccgcgcttacaacatcgactaaacccaagccccctctgatgagggggctatcgtccgcaggacgactgggggagaggccgcaaacccggtgccgcttgtgcggcacccctattccgtaacgaaaggaacaatcatgacgagcagcgccgaattctcaggcatcatctgcccatccatcaccatcaccaaggacgacggtgacatcgactatgaacgttgggggcagcatctcgatcatctgatcgaggccggtatcaacggcgtgctggtgtttggcagcatcggcgagttctatgccttccctctggacgtcaagaagcaggcggtcgacttcgtggccaagcatgtcgccgggcgcatcaaggtgttcgcgggcgtgggcgataccaacttgaacaatgtgatcgacttcgcgcgggcagtcgaagcaagtggagtggatgcgctcgtggtcgtttcgccgtattacttcggccctactgcgggaggcgcgaaggcgtacttcggcgcggtcgctgaagcgacgaatcttccggtgatcctctataatttcccaccgcgcaccggcagcgacttgaccccggagcttgtggccgagcttgccgccgcgcacccgaacatcgtcggtatcaaggacacggtcgacacaatcagccacacccgcaaggtgattcgcgcggtcaaggccgtgaatccacggtttgcggtgttctccggtttcgacgagtactatctcgtcaaccgcgtctccggcggtgatggcgtgatctgcggcatgaccaatgtggagccggagaccttcgttacgctgcaccgtgcatatgaggccggcgactatggcaccgcaattgaggccgccgaacgcatcagccacctgatggcgctgtacgatcagaccgacctgttcatctccgccatcaagggtgcggtcaaggccaagggactgaacatttccaccctgatccgtgagccagcggtgcaactcactgctcagcagtatgaggcgattaaggcgatcctcaagtagcgtatatctcaggcttccgcggaatcctacggtggatttcgcggaagtttttttacggtgattacagttgccggctcagctcagcagcgccgcgatgatcgcgataaacaccgggctggtcatggtgctcatcagaatgccgtcgcgcgcgaaggtgaggcccacgttgtagcgggccgcgtagttgtacacgttctggccggtgggcagagcggcgagtaccacgcaggcgtacagctcggagccgcggaagcccatcacgaaataggcgagcaggaacgcgatgattggcatgatgatgttcttgaggaccgcgaccgtgaagatggccgggcgatcgcccttctgctgcagcggcttggtgccgtgtagggacatgccgaacgccatcaggatcattggcaccgctgaatcgccgatcatgtcgatcgggtcgaaaatgaatttcggcactgggaaccagccgcttttagcggaaatcgcagagaccacaatgcccagcagcgaaccgataagcagcggttgatgcagtggctgcttggcgatttccttgatggagaccttgcccttggtggtcacgtccagcactgtcaggcccaccggtgtgaagatggcctgctgcatgaccagaatcggtgccaccagagccggattgcccagaatgtaggtggcgattggcaggccgatgttattggaattgaggtacagcgaattcagggcgccgatggtggcgtccggggcgttcaggtggaagaacatgcggttgagcaccaggaacaccacgcctaccagcacggcggagaagaacgccacgataatcgagggatggaagatgtcgaagatcggttccttggagaggatggcgaacatcaggcacgggctcgatacgaagaaggagaaccggttgagcaccatctgagcggacggcccgccgattcgcattcgtgcggcgacatatcccaccgcaatcacgatgccgataacgcagaagccttgcatggcgctgattagacctgacataatcctccctttcgccaccccagtgtggcacataaaaatgtattcggccgcaaaatctcatgtagtgggtgtgctgggcccgccgcccacgcggtacgctgttcacatgacgcttgaattgaaccgcaccgcatccactgccgagcagctgaacagcctgctcacccagatcatggagaacttctccgtgtccgaccacgagggccccctcaccgacgaggtcgaggccttccttaacgagcaagagcacctgaccgtccgccgtcacggcgacacagtggtggccagcaccgacttcggcgagccgaaccgtgtgatcttggccgggcacctcgatactgtgccggtcatcgacaatttcccaccgaagtggctggagcccggcgattcgctgattcgcgaagaaatcgcccacgctcatcccgaagaccgcgtgctgtggggccgcggtgccaccgatatgaaggcctccgacgcggtgatgctctacctcgccgccacgctcgacggccgcacgccggaaaccaccccgaaagtcgacctcacctacgtcttctacgaccatgaggaagtcgtcgccgaaaagaacggccttcgcaaagtcgtcgaggcccatcccgattggatcaccggcgatttcgccatcatcggcgagcccaccaacagcggcatcgagggcggttgcaacggtacgattcgcttcgacgtcgtgacccacggcgtggcagcgcactccgcccgcgcgtggatgggggagaacgccatccacaaggcggccgacatcctgagccgactcaacgcttacgagccggccaccgtgaacgtggacgggctcgactatcgcgagggcctcaacgccacgctgatttccggcggcaaaggcacgaacgtcattccggatgaatgccgcgtacacgtcaactaccgcttcgccccggacaagtcgctggccgaggccaaggctctgatgatgggcgcggatgccggtgccgaactcggcaatggcgagcatgtggccactggcggcgtgttcgagggctacggcatcgaaatgaaggacgaaagcccctccgcgcgcccgggcctgaacgccccgctcgcccaagatctggtccgactggtcaaggagcgcaccggccgcgacccgttggccaagctcggctggactgacgtggcacgcttctcccagctcggcatcccggccgtcaacctcggtgccggcgacccgctgctggcgcacaagcacgacgagcaggtgcccgaatccgacctggccgccatgaccgcaattcttaccgactggctggtctgacacctctctagctcccctctctgaggggagctgtcaccgcagggaggggagccgagagaacgtcagcctcgccgggccacgcccgcacaaaatatgtggcatactaaaggatggtggttctgcataaccatcagcgtgcgagatggcgtcgatccccttgcggctctcgagaatgagacaacgcaagcgccggtgtccgccacccgcaggacagacttgagacgaagttgcctttacgcggcgcgttttcgcgcggccacggtgagagcgtggtgtgagtcaagcgtataggcctggaaataggcgtcgtgatgcagcgcgccgcgaggagcattgtgcccactgacaaccgtgaaggtttcgtcaacgacggaaccgataattcaaccgtatccaatgccgattcggctgcagccgtgaacgctgcgcctgccgccgcctcccagcccgtcgaacctgttcgccgtcgtcgtggcggccgccgcgtggtccgcggcaccggtgctgccggcgcctccctggaactgcaagtgcaggaacgcaccccgctgttcgaagcccccgcgcttcccaatgccagcaccgcggccgattccaagtcatccgattccggcgattccgatgaatccagcgattccaaggattccgccgaacgtccaacccgccgccgtacgcgccgcgtttccacggccgacgatgccgccgaaacgccgcgtcgcacccgtcgtacgtccgccgcatcttccagcgataccgatgatgacgacgagactccgcgccgtccgcgccgcgccgcttccgcagtggccgacttggatagcgaggatgatcgtccgcgccgttcgcgccgcacggtcagtgccgatgatttcgatgacgatgacgccccgcgttcccgccgccgttcagtcgtggacgatgacgattacgacgaggaccgttcggttcgccgccgctctcgctcccgccagtccgacgatgatgactacgaggatcgcccggttcgctcccgcctccgccgtgcgcctatggatatggatgatgatgacgaagaccgtacggttcgccgtcgttctcgccgtgcagttgcggatacgcacgaggacaccccggatgagcgcctgttcgacgcggtcgaatccctgccctctggccacgagaccgtgcgccgtggcaagccgatgacgtccctgctgttccaggaaccggtgctgcccgccgccgtggatgcgcacgataccgctgacactcgtgatgacgatgttgacgccgacgaacgcccgtctcgtcgctcccgccgctcgcgcagccacgacgatgacgatgcccagccgcgcagccgtcgccgcgacgatcgcgacgaccgcggccgcgcctccgccgaccgtgacgcttcccgtgacgccgcgtccggcgataccaacgccgatcacgacgatttcgacgccgacgacacctcggactcccgccgttcgcgccgctcccgccgtctgaacgcccaggagcgccgtgcagccgccgaagtcgagcagattgaggaagacctcgagctggacgatatcgcctactcgccgattgccgaggaggagggcgacgaggaatccgacgtcacccgcacccgttcgcgccgtcgccgccgtcgtggttcacgcggcgaaaccggtgccaacggcgagcacgataccgccgagaacgatgccgaggatacgcgttcccgccgtcgtgacgatcgcgatgatcatgaccgtgatcgcgatgaggacgatgaggagcagaccgtcactcgccgtcgccgccgccgtcgtggcggcaagaacggcgagggcaccgacgaccagagtcagaacagcgaacagccgctggtccgccgctcccgcaagcagcagtacatcgacgaaatcaccgatgtggaaggctccactcgtctcgaggccaagaagcagcgccgccgtgacaaccgccgtgagcgcagccgccagagccagcttatggaacaggacttccttgcacgccgcgagaacgtggaccgcctgatggtggtgcgcgagaaggaacaccacacccagatttccgtggtggaagacaatgttctggtcgagcattacgtctccgacattcaggaagtacagaccgtcggcaacatctatcttggccgcgtgcagaacgtgctgcccagcatggaggccgcattcgtggatatcggccagtcccgcaacggtgtgctctacgccggcgaggtcaactgggatgccgctcgtctcgaaggtcagccgcgccgcatcgagctggcgttcaagtccggcgacccggtgctcgtgcaggtcactaaggacccgatcggccacaagggtgcccgcctgacctctcaggtcacgcttgccggccgattcctggtgctcgtgccctccggtggcatgaccggcgtgagccgcaagctttcggatcgcgaacgcagccgtctgaagaacatcgtctccaagatcgccccgaaagacatgggcgtgattatccgcaccgcggccgaaggcgcatccgaagacgccatcgtcaaggatctcgaatcactggtccgccagtgggagcgcatcaacgccaagcgcgaggaattctggcacggcaagcgcccgaaactcctgcagggcgagcccgacgtggccatccgcgtggtgcgcgacatcttcaacgacgactttagcaagctcatcgtggaaggtgacaaggtctacgaccgtatcgaggaataccttgacaccatggcccccgacctgaaggacaagctggagaagtgggacccggccgagcacgaaggcaaggacgtgttcgacaaatggtccatcgactcccagctgcgtaagggcatggaacgtcaggtctacctgccgtccggcggctcgattgtcatcgatcgcaccgaggccatgaccaccatcgacgtgaacaccggccgctttatcggcaagggcaagtccttggaagaaacggtgacgcgctgcaacttggaggcgtctgaagagatcgcccgccagctgcgcctgcgcgatatcggcggcatggtgatgatcgactatgtggatatggtcatgcccgccaaccgcgatctggtgctgcgccgcttggtcgaatgcctggcacgcgaccgcaccaagcatcaggtggccgaagtcacctcgctcggtttggtgcagatgacccgcaagcgcatcggccagggtctggtcgaggcgttctccgaggaatgcccgacctgcaagggccgtggtttcatcctgcatgatcagccgaccgtttcggccgactacgacgatccctacgcgcttcgcggtggcgacccgttcgtcaaaaccaacaagcacggtcgcggcaccgctcccgctcccgaaccggctggttccagcgccgacgtcaaagccaaactggctcagattgccgccgctgccgtcgccgccaacaatacggcggaagagtaacaggtgtgtcgtgcttgacacgcgggcaaaaatcatttgatttagtccgcatggtggtgtagatttgaaactcggtgtctgaccgcaggctcggtgcgtgttaggcaaggtagctttccaaaacataaaaggaacgataatgtacgcgattgtgaaggccggtggccatcaggaaaaggtcgaggttggcgacgtcatcctcgtgaaccgtctcgacgccaagaagggcgataccgtggaattcccggtctccctcgttgtcgatggtgacaaggtcaccctcgccgccgccgatctggccaaggtgtccgtcaaggctgaggttgtgaacgatgaagccaagggcccgaagattgacatccagaagtacaagaacaagactggtgttgctcgccgtaagggtcatcgccagaagctgactatcgtcaagatcacggcgattgcctgagttatagaaaggaccatgaatcatggcacataagaagggtgcgtccagctctcgcaacggtcgcgattctaacccgcaatacctcggcgtgaagaagttcggcggcgaagccgtcgtggccggcaacatcatcgttcgccagcgtggcaccaacttccacccgggccacaacgtcggcatgggcaaggaccacacgctgttcgccctcaccgatggctccgtgaagttcggtgtgcgtcgcgaccgcaaggttgtcgacgtcatcgcctgagcgatatagcgtcaagctttttcaagccgcgcccgtaaggacgcggcttttttgtaaggtaatcaatatgagtgattttgtggatcgagtaaccgtccatgtcaagggcggcgatgggggcaacggttcggccggcatccgtcgtgagaaatacaagccgttggccggtccgaacggcggcaatggcggcgacggtggttccgtggtgttcgtggccgaccgtaacgccaccagcctgctcgactatcgtttcatgccgcatcgtgtcgccggcagcggcaccatgggtttgggcgacaataaggacggctccaagggcgaggacctgattctgcccgtgccctgcggcaccgtcgtctttgaggcgcgcggcgaacagggcaaatccaagcatcccggcgcacagctcgccgacttgcgtcacgagggcgaccgctgcgtcgtcgcccagggcggtgccggcggcctcggcaacatcgccctggccaacaagacccgacgcgcccccggcttcgccctgctcggcgaactcggcgaggaacgcgacgtgattctggaactgaagtccatcgccgacgtggcgttggtcggtttcccctcggccggaaagtcgtccctgattgcggcgatgagttccgccaagccgaagatcgccgactacccattcaccacgctggtgccgaatctcggcgtcgtcatcgccggcgactctcgatacaccatcgccgacgtgccgggcctgattcctggcgcctctgaaggcaagggcctgggactggagttcctgcgccacatcgaacgtaccgaaatcatcgcccacgtgattgattgcgccacgcttgaaccggaccgcgacccgatgtccgactaccacgcgctggaaaacgagttggcactctacgccgacaagctcgaactgccattgggcgccatcccgattcccgaacgcccgcgcatcgtgattctgaacaagatcgatgtgcccgaggccaaggaattggccgagttcgtgcgtccggagttcgagaaactcgggctgaaggtctttgagatctccaccgcctctcatgaggggctgaaggagctcaacttcgcgttgtctgcgctggtgcatgagatgcgtgaggaagtggccaaccgcgagcaggccgaagaggaggctcgcgtggtcatcaagccattggagaccaagggccgccgtccgcgtcgcgctgacgagggcggcagtgcgcttgagttcacggtcgagcgccgcgaactcggcaatggcgaagtgttcttcgaggtgcgtggcgtcaagccggagcgctgggtcatgcagaccaacttcgacaacgacgaggccgtgggctatctggccgaccgcttggccaagctgggcgtggaagatgagctgcgccgcaagggtgcccaccctggtgacgaggtgcgcatcggtcgcggtgcccgtatggtcgaattcgattgggatccgaccatctccgccggtgccgaaatgctcgacggctccaacctcggtgcccgaggcaaggatctgcgtctcgaagagcaggacccgcgcatgcaccgccgctccaacgccgaacgtcgtgcccaataccacgagatgatggacgcccgtgccgccgtgcgcgacgcgatgatggccgaacgcaaggccggccactgggccgacccgaccgttgacgacgatcgccatgacgaaaccagtctgttcggccacggtgagtccagcgaagatggtgaaaccgaggaataaatgagcactccgagtcaggccgaggtgcggcgagccgtcgcatccgctggaaccatcgtcgttaaggtcggttccagttcgctgacgcagccgagcggtcacctcgatccaggcaagctcgacgctctggccgccgcccttgcccaaatacgactgatgggcgggcgtgtagtactggtttcctctggtgctattgcggccggcttcggcccgctgggctttgacgaacgcccggccgacgtggctactcagcaggccaccgcagcggtcggccaaggtttgcttatggctcgctacgagactgcttttggccgtttcggtattcgcgtcggccagattctgatcactgccgaagatacgattcgtgccacccagtaccgcaatgtggaacgcacgctggaccgattgctggaccttggtgtggtccccattatcaacgaaaacgattcgctggcgtccaacgagattcgattcggcgataacgaccgtctgtccgcattggttgcgaacctagttcgcgcggaagctttggtattgcttaccgacgtggacgcgctatacacggcaccgccttcccagcccggctcccgccgtgtggaatatgtgcccaacgttatcgatgcatttggcgacatccaggtttccggctccggctccaaggtcggcaccggtggcatggtcaccaagcttgaggccgcgcgcgtggcggccgtctccggcatccccacggtgctcacttgcgcctcgaacgcgggccctgcgatgatgggcgatccggtgggcaccgtgttcgcaccggttaaggcccgcggttcgtcgcgtcgtctgtggattggcttcgccgccgacccgcgcggcactattgtggtcgatgcgggtgccggccaggcgattcgcggcgggcgtgcctcgctgctggcggccggcgcgctcgaagtgcatggcgatttttccgccggcgatccggtctggatcgatgccgaaagcggcgaacacctggcccgaggcctcgccggcttcgattccgaagaaattccgcagatgctcgggcgtaacaccgcccaactcaagcgtttcctcggcccccagtacgcccacccactggttcatcgcgacaatcttgtacttgtgtgactgatgggatctgtcacacgacagatcccatcaccatagtgcggctctggcgatttttcgtgctgtaggtttagcatggaagccatgactatggcgcaatggcagactctttccgaccgtatcaacactgtggcaccgagcgctacgctcgccgtcgattccaaggccaaggccatgaaggccgccggacttgacgttatcggcttcggcgcaggtgaaccgaatttcccgacccccgcaaacgtggtcaaggctgcggcagatgcctgccttgacccaaagaattacaagtacacgcctacgccgggcctgcccgagctgcgcgaagcgattgcggctaaggtgctgcgcgattccggctacgaggtgtccgccgaccaggttgtggtgaccaacggtggcaagcaggccgtgtatgaatccttccagatcttgctcaacgatggcgatgaggtcatcatccccgctccgtactggaccagctatcctgaagccgtcaaattggcgggtggcgtgccggtcgaagtattcgccggtgccgacgtgaacttcgagccctcgcttgaggcgctggaagcggcccgtaccgagcgtacgaaggcaatcatcgtcaactccccgaacaacccgaccggagccgtctggaagccggaaaccgtggaagcgatcggtcgttgggccgtcgagcaccacatctgggttatctccgacgagatctacgagcacctgaactacgacgacgcgcgcaccacctacattggtgccgccgtgccggaatgccgcgggcagctgctggtgctgaacggcgtggccaagacctatgcgatgcctggctggcgcgtgggctggatggtcgcgccgcttgaggtggccaaggccgccaccaagctgcaggggcatatgacctccaatgtggccaacatctcccagcgtgcggctctggccgccgtggctggcccgctggacgaggtgcatgagatgcgcaaggcgttcgatgcacgtcgccgcgcgatcgtggctgctctgaacgatattgagggcgtcaactgcccgactccgaccggtgcgttctacgcttttgcggacatcaccgctttgcttggcaagccgctggggcccaacggcactgtgtccgatacgtccgctgattttgccgccgcactgttggatgaggcccacgtggccgccgtccctggtgaggccttcggtgctcccggttacctgcgtttctcctacgcactggccgacgaagacctagccgaaggcatgcgtcgattcaaggaatgggctaactgagaagagtcgtgtgccgcgcacatgccacgcgcgcgacacgcgatttgcggtaatccaccggagccggtacaataacaacttggc

SEQ ID NO: 1692 - DNA, 5331 bp, Unknown
  MAG_14  MAG No. k141_4933
ggcggtgacggcctgattcgcctgacccgtcctgagttcgtgtccgacctaagcgatgaccaggtttcgactgtgctagccggaggcgcgaaatggttcatggactatcgcaatgcggatggatcgttggcggagatgtgcggcaacggtacgcgcgccatcaccttgttcgctcagcgcgagggcgtggccgactccaccgagccgttccgcctcggcacccgtgccggcgtcaagattctgacgccacgcggcaatatgaggccgtacggagccaacgtgttccaggtcgaaatgggggagtggaagatcggcgaaaccgacgcctacgaggtcaccatccccggcgctgagggctcggcgcgcggcacgttcgtggatatgggcaacccgcatgtggtcgcggtgatcgaggacgccttcgcgtccctgccggtggtcgaggcgctggatctggtcaccaaaccagtggtggctccggtcatcgaatccgaccagaacgtggaattcgtgcgggtcgacgacatcgatcagaacaccggcgtgggtgaagccacgatgcgcgtcaacgaacgcggctgcggcgaaaccctgtcctgtggcaccggcctgtgcgccacaggcgttgtgctgcgggccaagaccggcatcagccactgggatatcaccgtacgtggcggcaccctgcgcgtggacgtcaccgacagcgacgtgaaactgaccggagcagccacgctggtcgccgatatcgatttgttgtaaaggaatcaggcagcgaacagggccgcgccttcggtgacgatgatgagtaccacgatcgccacgatccacagtatatcgaccatgaggtcgatgttgaggcggtaatacctattgagtccggccggcaccgccgcgacctcaacctcaccgtcgccatcatcagcagccacagccttacgtgacggcaatccctgcacggccacggtcgcatggctcaacgccatgaactggatggtggtggagaacatcagggtcaggcaccacgggcacagcgcgtgaatcacgaacagcgactgcgtgctcagccagtacgagtaggccaaagcggccagtccgcccagccacgtgcaggtcgcgaaccaacgcggcaccttcacacgcgccaaaccgatcaccgcgatggtaatgaacaccgattcggcggcgatgccgaagaacgcgttcggatagctcagcccgccgaacttcacgatttccgcctgccaggactgggccaccgccgaacaggacaccaccgagttcagatcgcagccgagcgcggactccggatgccgagccaactgcaaagtctcggcggacagaatgagcgaggcccccaatgccactgccgaggcgatcagcatgatgagatatgtccaagtggcactgtggcgccatccaatcaacggtcgcgcctccgccaagccaagcggcgtggtgttcgtggtgctggatgatgtgtcggttgcggtgttacgagtcatcatgcccctttcgatagcgctgcgctccagattagcctctgcggttgtcagctgagtgccggatgtctggtcttggccgttggcagaaggtgacgacctgtctacgccttgcgtgggaatgctgagatgaggttacgatggaaggtatgactggatatgtgatgcctttggagccgcccgccgtcgggtgggacatccattgccataccgtcttctcggatggcacggaaacgccggccacattggccgaacaatccaaggcattgggactcaagggcgtggccatttccgatcatgacaccaccgccggctggccggaggccgaagccgcatcccatagggtcggtttgccgttgctccgcggcaccgaaatcaccgccacggatgagaacgtctccgtacacatgctcggctaccagtatgatcccacgaatcagcacatcacggacttgttcgccgatactcgagccgcacggttgcaacgcacgcagcgcatggtcgaattgttgtctcgtgattatccgattacctggcaatccgtgctcgcccaagtcaaggagggtgacaaaaccaccattgggcggcctcacatcgctgatgctttggtgagtgccggcgtatatcggactcgttcggaagcgtttgcgaatgcggtcagcgcctcatccaaatactatattcccacgccctcgccgacctctcatgaagtggtggccgccgtcaaaggggcaggtggtgtgattctgatcgcccatgccggtgatgtgagccgtaaccgcagactgctgtccgatgaccagatcgaagcgttgatcagcgagggattggacgggctggaggtatggcaccgaggcaattcaccggagcaacgagaacggctgctcaccatctgccgccggcaccagctactggtcaccggcggatctgactggcatggcaaaggcaaaccgaacaaactgggggagaacctcaccgacgaggccactgtcgaagagatcgttcatcgcggcgtgctcccgttatatcggtgattcgcggcaatacaaagcggccttgagatgatgcccaaggccgcttatgcgcgattcacggtcacagcgtgccgaacccgacggcgtgcttggtttcggagccgatgatcgcgtaaccgagtgccttggcgggcacgatgatgcgacggcccttgtcatcggtcatatcgatcgtcgcgttgtcggccacggcctgcgcgatggcctggctcacattatcggctgattcgtcggtgctgaagttcaccggtcgtgccacgttctgaatgcccagttcgatatccatataaggctccttgttctgccgtctttgtgacgaacatcatggtaagtggccgtcaccggccgaggttctgtactctattgtgccgcgtgtctgcgtcgtcatgtgcggtgttacgcgctcggcgtggcgcggaacaccgcacacgacattatttggatgatgtggatgattcggccagcggattgccctcgctgtcatacccgtccaacccggcacgggcatcgcgcagagcgcgttcttcccgctccaacagcggaatcaccgtggtttgggcactcgaggctccgtgctgaacgaaactgtccggagtatcgtcattcaccgcatcgtcggtcggggcggcggattgagatgcaggggaagcgtcggttgacgtcgtgccgctatgcccgttcatactgaggagctccttcagcgtgatcgtcaccgaagaatgggaagcgccatgtgagggctgcggtttggtcgatcccgtaccggttgcggtgccggagacactcgcttgcgggtgattggcggtccggtcagcatcgggttcgacttccggggtaagatccacgtcgccagcggccacgatgtcagcggaaccggtgcgatctggatcgggcgtgtcgtccgagacctcggccgccgcggtaccggtttcggactgctgcggttgtgcgggtacctgcgtggcgggtgcctgatgacggtcgtcctgcaacaatgtgccgacggtgattgtggagggggaaccgggctccgtcgacgaggcggcggccgaccctgcggctggggccggtgccggagtgtgcttgatcacgcccaactggtgtgcgagtcgttcgacctgtgccttgaactgcatgatgcgattgttgtccgcacggttcaacgcctgaatgaattcgcccacctgttccatctgcagccacaggttggccctgagcatgatgagatcgtcaagtcgagagcccatcatgcggccgtatgcggaaagcacggcgttgcgatgggattcgtcgagcttgccgaaaatccaggcaaggtctcgtgccggatcgttgacctgcatatcctgccagttggtcaccgtggtgatggtggaaccggagaacaggaagtcgccgtcggagaatccgccgtgaaccgtgcaggtggagaacgaccacaatccctcggtgtccatgatgcgcgcccagctgtcggtgatttcttggggaacatggccggcggagcgtaagcggcgaatccaggcggtcagctgcgaacgaatctgaccggtggtgactaccggatatttggcattggccagaaaagtcgaaggcagacgatgaatggctccgatggaggtgccgacggccgcgcagtcatccaatgtcaacaggtcgagaggccgcgcctgaccatcacggtggacggcgatcatcacggtcgtctcgcctgtgggaccgggcttgcgcggggtcagcggtgtggactccgcctgggcctgctgccccacggcctgtgcggtggccgtctggccgggttgggaaacgtctcccgggacgaatgcgaccacacggtccatatcgaagccgaggccaccaagctcgcgcgcggctgccagtgtctgcgccgctttcacacggcggatcagacgtgtacgcccttccttgctgtcagtggcgtatacgtcgtacaacttgcccgaggcatcttggatcacggtctgatcgatgcctttggcctcgtcggttgcgctggcctgcacgttctcgcgtacgccggccacccccagattcggcaggacggctgaggcgagtgccgccaacatataatcgctacgtttcatcacccttccacactaatacatccgtggcgattcgcaccccagaatgacacgcaaaacgcatgattctggcgatgttttgtcgtgagcccgattcagccataggcgtgagtcgtgccgtgagcgcgaatcgtgccacaatggacgcatggaacaggcgcaggggattcttgaggggctcgatgagcggcagcgtaccgccgcgactacgttgcaagggccggtgcgcatcatcgccggcgcaggtgccggtaaaacccgcacggtcacgcggcggatcgcctatgcctgcgccaccggggcatggaagccggagcgggtgcttgccgtcaccttttcggtaaaagcggcggcggaaatgcgcgcacggttgggccagctcggcgtaggggaaggtgccggacgttccggttcgggtgcgggaactgccggagtcacggccgcgaccttccactcagcggcattgcatcagctcaacagcgtctgggcggacatatgcgaggctccattcccgcatgtgatcgaagatcagcgtgacgtcgtctcccgcgcgatcatccgcgccaccgcacgtaccgatgccgatccgctgaccgttcgcgatgtgctcgccgaaatcaattgggccaaaatctcgttggtggcggtggaagattatgcacggacctgtgccatcgcccatcggcaaccgcc

SEQ ID NO: 1693 - DNA, 3105 bp, Unknown
  MAG_14  MAG No. k141_5022
acctgaacttctcgaatctcgagttcggtgatctgaagctcggcgacgacttcaacccggatgatttctactccgatcagggcggtcagcctgacatcgaggagtaagcgagagggtcctagaaaggatgtcctttctaggacccagatcttgcgttaatcgcaataagatggcccggaactatatcagttccgggccatccgtatatttgccattgtgattttcctgttgaacaagagcaggcagccgctcgttgcttgattactcaggcctgtttttcggtgaactggaagaactgatcaccaatacgcaccgttgaaggtgcactgagcttgagcgttgtgcccttggtgacttgggtctcctggccattggtgatgatgtaggtgccgttcaacgagccatagtcctcgatccacagcgcgccatcggtgtcgacgctgatggcggcatggttgcgggacgtggtgcgggtcgggtcttcgatacgctccgccttggcaccttgcggcacatccatggaaggcttgcggcccagcaacgtgctcttatcgatcacaatggtctggccggtgacatcgttatgcagcaggtacgtcttcttcggtgccttggaagtgaacgacgaggagagcacggtgctgtcccaatcctcgatgtcgttttcggcggcgtgcggtgtggtgtctaccggagcggcagtgggctcagcggcggcagtggcggcgggctctgcggtaaaagcggcattggttgccgcttccgcggtgctgggctgcccgtagtcgttctgcggttcggctgtgccaactgcggaatccggggtgccttccaccggatcgtcagaataccaacccagttcaggtgctggagggtagggaagtttggccatgatgatgccgtcctttcactgacgaaaagccagagcggcgttgattgccgggtcgccgagctggcccagccattcgatcagtgccggataggtgttgggattacgggcgatgcaggcgcgtagttcaggcgcgtattgggcaatctgggcgatttgcatctggtcggtggtggtcagggcctgttcggcggtgaagccataaggattggtggccacaggctcctcgaatgccgcctgagccgcgggctgctgggctgcgtactggtcggcagcgggctgagctgcggcgtactggtcggcggcgtaagcgtctgcaggctgctgctcggcagcctgcagggccgcctgtgacggggcttcctgatcctggaccgggccgccgaatgcctcggcggtgaacccgtattgcgccagggtctcgcgggcgcgctcatcgccgaactcggcgatccaacgcttcaagccggggtagcaacgcggatttacggcgacgtttgcgccgaattccggattctcgtaggcgatttttgccaacagaatcgggtccgcgttcggatcctgtacggcagcgaccgcagcatcataatcaaccatgggattacctccttatgttcgctcggttatgccgaacgtatggtccgtagtgtttgtagtgttgcgtcttcaatggcgccaatgtcctcgccctcgtccagtttaaaagcgctgaacgcgtgatgttcgggttcggtcagtggcatatcggccacaatcacagtgatattgtcggttccgcccgcatcgagcgcggccgccaccaaggcgtccacggcttcctgcggactggaatgcgctgcggcgatggccgcaatctgttcgtctgacacttcaccgtgcaatccatccgaacagatgatgaaacggccggtcagatcggcaacatatacgtcgggcactatgccgtccggatcgcccaggcattgggtgatgatgttgcgtggaatggtcgcctccgcctcttccggcagcatctgaccggaatcgatagcctcctggcgttgggaatgatcccgcgtgatgcgggtcagcgaggaggcgtcccacacggggatgatatccgtggcgggggcatcggcatccggcagcgggctgagatggtaggttcgggaatcgccgacattgaccacataggtctggtccgagaaatccggggagtcggcgtcgtcaaacggagctgcgctgtgggcattgatggcatctgcgtaaggctggggcaaaaccaggccggagcaggtcgtaccggccacgccgccgagacggtcacccaaatcgagaatgtcgtgctgagcctgtgccagggtgtcgtcgatgtcatggcgggtgcgcgagggcatggaagccagctgcgcgaaatgctgggcagccaactggcttgcttgctcgccgcctttgccgccgcccatgccgtcgcagaccatgaacacgccctgttgggcgaatccggtgtcttggttgttcttgcgcctaagacccgcgtcactggtcatcgcgatacggatggagcctgtggtcatgacgtcttccccttcttacgcttgtgcttgactcgcgctgtatacggctttgctgcgtgtctatttgccaatatagacacgcttttcagcgaaagccgtgtacatatcctcctgaaacgcggcaaagaagcgagcattgccttgcgcaaccggtcgactccattccaatatgtggtggcttggcccgattcaatgtcttgccccgagaacgtggcgtagtcggcttcccggccaagctggatcaaagcctggtcatctgtgccgagttgacgggcgatggcaccggcctgatctcgacgagtgcccttggctgtgatgccgctttgctcggcaagcatgcgtatggcattccaacctgctgccacacgggctttcggactgccatgccgccgcgctcgcgccagcagcatggccttgaacatcagaatcagaccgcagacgatgagtagggtccacaatgggctgccgtacagggccaccttgcgggtcactcgccagaaccgcacccagaacaggttggtcggcgaatcatcggcgtcggcgccggccaatgagctttggcccctggcttgcgtctgatcgcgcagcggatcggtcaacggcaccggtggttgccggaccagcgtctgcggattcggcggcgtcaggttctggttttca

SEQ ID NO: 1694 - DNA, 8319 bp, Unknown
  MAG_14  MAG No. k141_5037
acacggtgaagcccctcactgggaggggcttcactgatacatacgccattatgcggtctagcggccacaagcaccgctatttgccggcggcggtcgcggcgtcgttcgtctcggtcgcggtgagcatggccttggtgacctgttcgtacaggtcctggtaaccgccgggcgtggaggcgggcagcaccacggtcttggtgttcttcgattcggacaacgaacgcatcacgtcaagatactggttgaacagcaccacgttgttcacatcgttgatgtccatgcccacggcctgcaggctcttgatctgatcgacgatgccattggcgatttcacggcggtagttggcctggccctcgccctgcagtcgggtcttctcggcttcggcggcggcctgcgtctcgatctggatgcgctgggcttcggcacgctggcgggtggcttccttctcgcgctgggcggcgttgatggagtccatcgcgttcttgacctgcgggctcgggtcgatggcggtgatcagcgtcttgaccacggtgaaaccgaaccggctcatctcggcgcccacggtcttctgcacgtcgaacgccacatcgtccttgcgggcaaaggcatcgtccaaggtcagggccggaatggcggaacgcagcgcgtcctccatgtagctcctgagctgaccggccggatcgcgcagctcgtagtaggcggtggccacgtcgttcgggttcacgcggaactgggtggaggccacgacggtcacgaacacgttgtccaacgtcttggtttccagctgcacgttgagctggttgacgcgcatgttggtcttcatggcgatgcggtcgacgaacgggatacggatgtgaatgccggcgaactgaaccttcaggaacttgccgaagcgttcgatgatgtacgcctgctgctgcggaacgatgaacaatgcggcgcccagcagcacgataagaacgactaatagaattagcaccaacagcatggttccgcccaacatacttgcgatggtcatataaaactcctctcacaagggtcaagcacggcatatcgttgtgccgcgccccaacaccatccatgctaccatcgcacgcccgggaactgatagctctcacaggcaagtccaagaaagcgaacgtcagatttcatgttccgttcactccggcagccacatcttgtgcactaatgtttgaatcagccaagtcgcacgtcagaaacaacaaagtcgggcatttcaaccaaggaaacacccgacttgaatcaagcactgccgccatataaacacatcagaagtgttcgttgagcttcttctcgcagtaatcctgaagccatccaagcaacgtgcagaagagcaagtagatcaagcccacttcaatgtataggaccagcggctcgtagtaaatcgccacaatgcgctgggccgtcatgaacatttccaccacggtgatgttcgccgcgagagacgtgtccttgaccaatgcgatgaaggagttgaacaatgcagggaaggcggagcggaatgcttgcggcagaataatgcggcgcataatcgtcacatacggcatgttcgccgccaagccagcttcaagctgtcccttaggcacggcaagaatcgcaccacgcaatgtttcggcggcataggcgcccacattcagcgagaacgcgattaccgcggaaggcaatgccggaatcgtaatgccaacggacggcaatccaaagaagataacgaacaactgcaccagcaacggcgtaccacgaaacacccaaatgtagaaccacgcgatttgggaggccacaggtactttagccacacgcaccagcgccaccacaatcgccagtatcaaaccgagagcgaaggaaatcagcgtcagcggaatggtcacagtgataccgggaatcagtagcttagcaaaggaatctacgactattccccatactcgtgcgtccattggtcatcctttgttgtgtggtatatgttgcgtctgctcgtaatcttcacgaggccagctcatattttccggctcccctaattacaggagagccgggaaacatgtcactcctgagagaagtcctcgccaaagtacttttcggagatcttggtcaatgtgccatccttctgcagcttgacaatggctttgttgacttccttgaccaagtcatcgctgcccttgcggaacggcaggtaggcggccggagtcttctcggacttggcggcaatcttgatgtccgcatccggcttctgcttcaggtagtcgagcgcagcaaggccatcgttcaatgacacatctgcacgaccggacgtgatggcatcgacctgctgaccgaaatcgttaacctgaacgatagtagcgcccttctcctgagcggtcttgttccagttggaggtaccggtttcagcggcgcgaagccccttgacgtcatcgaacgaagtgacgttcttcgggttctccttggaggtaatgacgacaccgtaggagtaggtgtatggttcggagaaatcatacttggccttgcgctcgtcggtggcggaaatctgatcggcaaccgtatcgtacttcttggcatccacaccggcaagcagggagtcgaagctgccctcggcaaactcggccttgataccgacctccttggcaatggccttggccacctcgacatcgtaaccggtcagctcattggttttggagtcatggtaactgaacggagcataggtgccctcagtggcgaacacgattttgccggcctgcttgacctgctccaatgcactggagttggaagcggaagccgaaccgcatgcggcaaccgaaaccagcacggcgacaccggacagcaaagccgcagccttgcgaatcacttgattattgaacatgacaaacccttctcttgatattgtcacaattaattacaacagccgtgaaacgcctctaccgagtcaccggaatcatcagcacattgttggttgaagacaggaactcgacggtacgctcctcctgcggatgttcgaagatccgcttcggatcaccctgctcgaccacatggcctccttcgatgaacaccacatgattcgatgcctcataggcgaaccgcatctcatgggtgaccatcagcatggtcatgccttcgctaccgagttgcttgatgacccccagcaccccgttgaccatttccggatccaatgccgaagtgggctcgtcaagcaccaacagctcaggattcatagccacggcgcgggcgatgctcacacgctgctgttgcccgccggacagtgtgctcggataccgatcatgaaaatcggcaagtcccacacgatcgagttgctcaatagcgatcttgcgggcttcatcaggcttgattcccttggaatacaccaacggttcggtcacattctgcaatgccgtcttgttcaaaaacaggttgtagttctgaaacacgaacccgattttcgaacgcaccttgtgaatgtcggcagatttggtagtggtcaaatccacaagaccatcaccgaaatcgacggtaccggaatccgcgtgctcaaggaaatccagaatgcgcaacagtgtggatttaccggagcctgaggggccgatgacagtaaccacattttgtcgaggaatgtcaagatcaagcccatccagcacggtggtgtcggcaaagctcttgctcactcccctaatccgaatcatcccgatactcccttttcgctgctgttatgcacgtcaacgctcgttcgcgaagcacaatcccttaccgtagacgcgcttgctcacctgtgtttcggcgtggttatatccagtgcctatggagtgctattcacaccaatgaataacacatcggacgccgacgtattgttcgctcacagatgcagcagatcgtcaaactcgtacaactcttgtctttacttgatattcagctcgttgagcttgttcttgatatccacagccgacggttcgacctggaaagtgccatcaggatagagcaccacgggaatgtgctgctggccgctgatggccaccgcacgatcggctgccccatcctcggtttcgatgtcatgccacgtatattcggtgccaagctcctcaagcgtgttcttcgcctgcttgcaatcaccgcaccatgttgcgccatagacgtcaatagccatgtcctgttccttctttcgtaatacaacaacccaaattcacaacgccccaagaataacagcgcaggtttttctcagaacgaacaattatccgcatacgtaagcgatacacgtcagtatgcgttggcaatggcttggtcaaggtccgcaatcaaatcatcgacgttttccaatccgatggaaagtctgatgagattatcgctgactccggcggcgatacgcgcatccaaaggaacctcgcgatgcgtgatgcgcgcaggatcgacaatcagcgaacgcgcgtctccgatgttcggcacataggagaatacctcggttccgtcgatgattcgtctcacgttgttctcatcgccgtcgacgaggaacgacagtatcgtgccgattcctttggggaagtatttggcgaccagatcatactgacccgtgttgcccaaaccggaataattgaccttgagcacatgcggcgcatgcgtgagatgctcggcaatacgcgtggccgattcgacttcctgccgttctcgcacagccagtgtttccaatcccaccatcgacaggtatgtattgaacgggctgggcaccgcgccgaaagtgcgcagatatttgatgcgtacacggcgaatgaacgcctcgcgaccgaatctgctggcgaagctgcgcgctattcctttgcgttcatcgctgacgaccagttcgggagtggtgaactgtgggaatctgccgttggcccaatcgaagtttccgccgtcgataaccactccgccgatggcgttgccgtgcccggtgatgcctttcgtggtggaatgcaccacgatatcggctccgaactcgatgggccggaagaggtacggggtgggcacggtattgtcgacgataagcggaataccgttgcgatgcgcgagttccgccaatggttcaatatcggtgatttcagtggatggatttgcaacggattcagtgtagatggcgcgggtgtccggcccgattttcgaagcgacctcatcgaggtcgttgatgtcgcgcacgaaatcggcatggactccgaactgcgggaagaaggtctccatggcatcgacggaagcgccgtacaggttggtcggagagatgatgcgaccaccaccttcggcggcacacaacagcgcatacgacaccgcggccatgccggaggcgacggccaccgcgctcacgccaccttcgagttccgccaaacgacgctcgaacacatccacagtgggattcgccacacgcgagtacgagaagccctcggcttcgccggcacccagtgcgtcaccatgtgcggcgctgaccatgtcaaacgccgcactggcgtaaatcggcgggttcgccgcctcaccgtgagccgcccggtcatagccgccgtgaatagccgcggtaacgaaatccctcgccatggattatcccctcaatgtcatgccgccgtcccttaggaaacaccgacggacgcccatactgatacggcaccagtgtaggaagcgaagcaccgtaacacgtgcttgcgggtacaggcatttcttatcgttcggtatcaaccggaatgataggtggggtgcgttcatcgtaactcgttgagcgctttctgcgcgatggccgtgagaaagcgtatgccgtagccgatggcggccggattcggccggaacgtcggcccatgcgcggcaccggtctcaccggcaccgatgtgcacgaacaggccgggcttgcgatcaaggtaatatgagaaatcctctcctcccagttgaggatgatcatcatccgcgtgaagcccctgctcggcgatgacttctcgtccgatgcgggtccatccggcgtcgttgaacacggaaggcgatccgaagaaccacgagacatcggcagtggcaccgtaggcggcggccgtgttgttgatgatggcgatggcgcgcttcttggcgagaacccggtcctgcggctcggtagtgcgcaccgtgccttcgaagaaggcatcctgcggaatcacattccacgaattgccggcttctatatgggtgacggacaacacccgcggatggcgagggtcgagattgcgcccaatgaccgcctgcaacccctgcaccacgttcgtcagcacggtgatcgggtcgatgccatcctccggttcggctgcatgcgcgcccttgccgtgaatggcaacctggaatttgtcgaccgcgccggtgatgccaccctcacgtatgagtatggacccaaccggtccggctgcatcgtgcgtgccgaaaaacgcctcgacatcgtccagcacacccgtgttcagcacctgcatggaacccgtggggcgctccgcggtggcacgaccttcctctgccggctggaagatgatcttgacggtaccaggtaatgaggcacgccgttcattgagcagaatcgccgcgcccaacgccacggtgaggttgaagtcatgaccgcagccgtgcatcactccggcattatccgaagcgtagtcaagtccggtattctcggtgatgggcagcccatcgatgtcaccgcgcagggcgatgacgggcttggcgcttgcgccgcgcacgatggccaccacgccggtcctgagtcccgattcgaggatttcaacgccatgcgattccagaatctcacggatgcgcgccgtggtgccgaactcttcataggagagttcaggatgacgatggaaccagcggtaccattcctgcacatcagcgttcagagcatcgggaagtgttacgaacgccgtcggggatgcgcccgatcgggttgttgctgcggtcaccggaacctcctttgcgtgacggcgatgacggacggatgtgaggacgtctcaatcccttcggcttcgctcattgtttcactcctcccaaatacgcctcctgcacccgctcgttgccgagcaggtcgccggctttgccgtgcagccggatacgtccgttctgcagcacataaccatagtcggcgatcgagagagccagctcggcctgctgttcgaccatgagcacggaaacgcccaattcgtcacgcagtcgcgctatctgttcgagtacgtcttcgacgagtttgggagacaagcccatcgtcggctcgtccatgcagatgattttcgggcgactcatcagggctcgcgcgaacgccagcatctgctgctcgccgccggacatagtgccggcctgctgcatacgacgttccttcaaacgcgggaaacgatcgtacatggcttccagatcgccggccgcaccctccctgtcgtgtcgcgtataggcaccagacaacagattctcctccaccgtcatctgcggaaacacgcgccttgcctcgggcacggcggcgataccggcttggacccgtctgcgcgtggacagtccggtcacatcctcgccttggaaccacagcgaaccggtcttcggatgattgatgcccaaaatcgtcttcatcgtggtcgacttgccggaagcgttgcctcccagcagagagacgatggcccctttgggtacgcagatcgacacgttctgcaacgcgtggacctgcccgtaatacacattcactccatcgagcgcaagcagggcatccccaccatcatccaacgtcccggtttcatctcgtccggtaccggcaccggtgccctcgacttcgacgacggcgccaatggagttctgcatcgcaagcacatgcgactgcccggcgacccgggtatggttcatttcacgccgcttgccgagatacgcctcgaccacctgcggggcattgcgcacatcatccggggcgccttgcgcgatgacgcggccgccatccatcgcaagcacacggtcggacaatgcagtgaccagatcgatcttgtgctcgaccaataggatggtatgtccctgcgctttcagatactgcagttgacgaagcacttcggcggtctccgactggttcatgccggcggtcggctcatcgagcagcaggatcttcggttcgctgatgtgggcacgggcgatttcggtacgacgacgattcgcgtacgacaacgtgtaggtgcaatcccgtcgacgcgcgctcagtcgttcacggaaacggtcgatttcccgatccacgcggatgttcacctcatcggcttcgcgccgagtccgcggtccaggaaccagcgccacgccggtctcggcgagcaacgacagccaacgcgcgatcggatacctttgcaggct

SEQ ID NO: 1695 - DNA, 19188 bp, Unknown
  MAG_14  MAG No. k141_5276
aagttcttgatgaaggccaaatcctcctccgcaaggttggccaaccattctggtagacggtccacatcacccccttcaataaaatttattatttattaaatatattaaagccgcgatgaagcattgtcaatatgacacacatgtccgattcaccagaatcggacgatacgtgggggcggacggtcagggagctatccacggggcgtgaaaaactggacagcatggccaatacatccagaatgacgtcgtatcagcggcgcgagcagctcatcgaaatcggtcgttcgctgttcgcgtcgaagggttttgaagcagtgagcgtggaggagatcgccgccaccgcaaaagtatcgaaacccatcgtatatgagcatttcggcggcaaagagggcctgtacgccgtcattgtggaccgtgagatgcgcgcgttgaccagtgtgctcaccgccgcgcttgacgatccgaccgtgcacccacgccagatcgtggaacgcaccgcactcgcactgctcacctatatcgaagaggacgccgagggattccaggtgctggcgcgcgactcgcccagcaccgaaccgtccggctcgttcagctcactgctgggagacatcgccgtgcgcgtcgaagacatcctttccgaaacgttcaaacggcagaaactctccaccaaaggcgtgccgtactatgcgcagatgctggtgggcatgaccgtgttcaccggccagtactgggccgaccggcccaaggtgagcaaggagcagctggccgcgtacatcgtggacctggcatggcatggcctgagccggctcgattccaagccgcagctgttgtttgaaggcgtcaaggcccggaaggaggccgagcgccgggccaagcgcgggatcgatgccgaaacaccggccccggacggcaaggcatcatcgcccttagagcagacggacctcgaccacacgctcagggaagattcagggttgcagaatgtgagttcaggggcacaggttgcgcaacactctgccgagtcgggagacgaagtgctacggtttgaacaggaaactgaacataacgactaaatatgtgaggacgtaagactttcatggccaacacggcaaagatgctcacctttgtgatccccgcatacaatatggagtcctatctcgaccgttgcgtgaactcgctgctttcggcaagcgacaccagcgacctcgaggtactgattgtggacgacggttcgaaagacggcacgctggagtacgcgcgcaaactggaacgcaccaatccaggtgtcgtgcgcgcgattcaccaggagaacaaaggccacggcggcgcggtgaacaccggtatcacggcggcgaccggcatgtatgtcaaggtggtggatgcggatgattgggtcgacccgcaggccatcgacacggttctggccacgttgcgcgcgcaacgtgaggccagcgagccgatcgacatgctggtgaccaactatgtgtatgacaaagtgaccaagcgccacaagatcgtggtgaacttccgtcatgtgatggaggccggccgcgtgctcggttgggatgacctgggcaagttcggtctggcgcagtacatcatcatgcatgcgctcactttccgcacgcaggtggtgcgcgattccgggctgaagctgccggagcatacgttctacgtcgatttctattactcgtaccagccgttcccgtgggtgaagcgcatccagtatctcgacgtgccgttctaccactacttcatcgggcgcgagggtcagagcgtgcagaccgacgtgatgattaagcgtgtggatcagctgcggctcgtcaatcggctgatgaccgaggccacgcccgaacgtggtacggtgccggaggggctgtaccggtacatgattcacttcctgacgatcgaatcatgcgttacctcggcgttcctgattctctcgcgcgatccggccaactacgttaagaaaaccgagctgtgggatgcgattgacgcccattctccggccatcggcaaggatgtgcgctcgaagctgatgtcccgcgcgctcaatctgcctggtaaaaccggccgctggatcgtgcgcaacggctatctcatcgccgaacgcatcgtcggcttcaactgattcggattgcggctttgccctgctgacgcgttatcagcagggcatccctattacctccccagccgaggtcttgctactcggcccaacggtcggacattgcgaagctgttgtgcatcaggttgctggaggtgtatagcacgtcgttcagcagcttggttgtatgctcgcgcaggtagtcggccatctcgtcgttggccgcttcgagcacatccgccacgccctgcacatccttctcatcgccgtggccgccatcgagcggccatgcattcgtacccgtcgattcggcatcgcttcgagcaagcaactgctcatccgtgcgctcgatgagccggtgcccgaacgcgcgcacgccttccgcatagccctcgatgaaccggttcgtctcataccaatgcgcgtcggccacgacggcgatcaggcggttcgtccaatacaggttgccggtggagacttcgggcgtggtgtcgcgcaggtaggcaggcgtgtcgttgacgttcgcgtagaacggcgcggcggcggtgaacggaccggagccgaacgatacccacatcaccgtgcgattggccgccggcacatacgggcggacctgaatcgccaccatatggccggtgcggttcacgccgatcggacggtaacggtggcgcgattccgccgtgccggtcgtgccgtacgggtcgtacggcgtgccttcgaagtgcgaggacagcaggaaatcaacgtcttcgaggctcaccttgtcttccggcacgcggcaccacgggatgtcgtcggattcgggcgtgtagcgggcggccggcgaatcccagtcctcgctggggttgaggcggcgttgcatgtaccaggcacgcggcgtgttgtagatatggtccttcggcgtcgcggtgccgaaggccttgcgcgggttgaagcgggtgggaagggcaacggttgttccgaatccggcgctatgcacgtgacggccgttggaagagaccgacgttcccattgtgcggtcaaggtgatgcgtggccatgaactcgcgcaggtcggcgctgcataggtattcgcgctgctcgccgaacgcatcggcgaggtcgaagtcgtcgatgccgagctggttggggatcgtggcatagcagtcgtcgggcactcggcgggcgatccaatgatggccgccgatggtctcgacgtaccagatctcgtccgcatccgaaataatcacgccgttcgattcgtaggtgccgtaggtttcgagcagttcgcccaaccgcgcgacgccctcgcgcgcggtggtgacgtacggcagcacaagggtgatgatgtcttcctcaccgataccgccgggctgctcggcctgataatcggtgctgtccggcccgccgacagccggccgcaactcgaccatcgggtccgcaccgagcacgcgctcgttgacagcgatggtttcggtggcgctcatcgccacgttgtgttcgttggcaccggcttcggccagaatgccacgattattcagcacgttcggtgcgatggtgtaccggcaaggattgtccggtagttcgatttcgacatggctcagcacgctgcggtagtggcgcggctggtcgtcgggggcgacggcgacgaagcgcttgggatcgtaacggcccgagcccgaatcgtcatcgcgggcgatgatggtggaaccgtcgtaactggcatttttgccgacaagaatcgtggtgcatgacatggggcaccactctaggagccaggctggtcgaaacaaaaaatccttggaaccattgcgattccaaggatctgttgtgccccctgtgggattcgaacccacaacccacgacttaaaaggacgctgctctaaccgttgagctaaaggggcaactcttctaaaatacacaccgttttgggatatttcaactacggcgttgcgtacacgtttgcgtacgcgattggcccaacgcacggcacagcacacgcaatgtggcccaaatcgcagcccaaatcgcatatcgcctctagcgatagatagccgccggcggctacccttgtacattatgagtgaatcccccaattggagcaatcccctgcgcgattcgcgcgacctcagactgccccgtatcgccggcccgtgcagcctcgtcattttcggtgtcacgggcgatctggcacaaaagaaactgctgccggccgtctacgacctggcgaaccgtggcctactgccgccgagcttcggcctgaccggcttcgcccgccgagactggacacaggagcggttcatcgaattcgtcaaggccgccgtccgggcgcattgccgtacgccgttcaaggagtcgacttggcgcaatctggccgccggcatccgcttcgtgcagggtacgttcgacgatccggaggccttcgagcgtctgagcgccaccgtgcaggagcttgaccgcgaccgcggcacacagggtaaccatgccttctacatgtcggtgccgccgcgcgccttcccgcaggttgccaagcagttggccgcctccggcctgtcgcgctcgtccgagggcgcatggcgccgcgtgatcatcgagaagccgttcggccatgatctggccagcgccaaggaactcgacagcgtggtatccgaagtgttcgacccgagctccgtgttccgcatcgaccactacctcggcaaggaaaccgtgcagaacctgctggccctgcgtttcgccaacgccatgtacgagccgatctggaacgccaactatgtggaccacgtgcagatcacgatggccgaggacatcggcatcggcggccgcgccggctattacgacggcatcggcgccgcacgcgacgtcatccagaaccacctgcttcagctcatggctctgaccgccatggaggagccggtgagcttcaccgccaaggacctgaccgccgaaaagaccaaggtgctttccgccgtgcgcctgcccaaggacctcgccgccaacaccgcgcgcggtcagtacgccaagggctggcagggctcgcacgaagtggtcggctacttggaagaaaaaggcatcgaccccaagagcaccactgaaacgtacgccgccatccgcctcgatatcgacacccgccgctgggctggcgtgccgttctacctgcgttgcggcaagcgcctcggcaagcgtgtaaccgaaatcgccgtggcgttcaagcgcgccccgcatctgccgttcgagcagaccgccgtgcgcgaactcggcaagaacgccatcgtgattcgcgtgcagcccgacgagggcgttaccatgcgcttcggagccaaggtgccgggcggctccaccatggaggtccgtgacgtgaacatggacttcagctacggccgctccttcaccgagaactcgccggaagcctatgagcgactgattctggacgtgctgctcggtgatccgccgttgttcccgaccaccgaagaggtgaacctcagctgggagatcctcgatccgattgaacaattctggtccacgcttggccagccgcaggcctaccgcgccggtacgtggggtccggcacaggccgacgaaatgctggcgcgcgacggccgccactggaggatgccatgatcatcgatatgccgaacacccgcacccgcgagattgcgcacaaaatcgaacagctgcacgaggagcgcggcgaatcggcgaccggccgcgtgctgacgctactcatcgccaccgaggacgcggacctagagcatgcgctggaaatcgcgaactcggccagccgtgagcacccgtgccgcgtgattgccgtagtaccggataccaatcctgccgatcagtccggcgaaggcgaaccgaacgagaccgaagtggccgccgaggtgagcgcgaatcgcgataatccggccgtcgatttgaccgacggcccgaacgatccgaacgattccaacctgaacgcccaagtgcgattcggcgcggacgccggtgccggtgagattatcatcttgcgtccgcgcggtggccttatcaaccacccggatacgctggttatcccgctgcttgtgccggatgcgcctgtagtggcgtggtggccgaccacaccgccgtcgaacccggccaaggatctgatgggtgcgatggcccgcagtcgcatcaccgacgcgctgcactccaataatccggaggccacgatcgagcgtttgcgccgcaattggacaccggaagacatcgacttgtcctggacacgactgaccgtctggcgcgcaatgctcgcctcgatgctcgatcagccgccgcacctgcccatcaccgccgtgaaggtgaccggcaaggccgacttcctgcctctggaaatgctgtgcgcatggctgcgtctgaaactcggcgtaccagtcgaaactgagttcgtgcccgacgcgcaggccgtgaccggcgtgtacctgacccgtgaggacggtgtgatctcactggaacgcccgtatgaggaccaagcgctgatctcgctgcccggccagactccgcaggaagtgtccgtgccgatgcgcaccatcgaggactgtctgaccgaggaactgcgccgcatcgatcccgatgagatctacgccgaggtcatcaacgaaggctgggatctgattcgtcactgaagtcggtagaaccgttgccacagcggcgttggcatgagttcggcaattgtggtcgagccatgccaacgccgttgctcatcgtttcctacctcatgcgatgccgaagctcatgaccgcggagtaataaagtgacatatgcgatgtcgcacaatgtacattgtgttgtcaactgacaacacatttcattgctgcaaatggctggattcccggcatgccacccgtattatgcgttgtcaactgacaacacaatccacattgcaaagtacgacacataccccatataaggaccatacatggcaactcgaaaactcattgtgtatccgaataaagatctgatgattcaggctggcgcgcaacgttttgtcttggcgctactcgatttgctcgccgaacgattgcctgatggcacgcatcgcacacgtgtggatgtggcgctgtctggcggttcggccgcacagccgttgggtttggcgctgcacgatccactggctgatgcggttgattggtcgcgcgtgcatttctggtggagcgacgaacgttttgtgccggcttacgacaccgatcgcaatgctctggaggcccgtcgcctgctgcttgaccagctggtggcggatggcaagctgcctgaatcgaatattcatgagatggcggccgatacccgttcagccgatgacatcgccgatgtgatggatcaggccgatagtgatgacgcttccgttcgcgccgccgccgatgccgcgaatgatgcgctgctggacgatgccgcgagcgactatgagcgcgagttggtgaatgaattggggccggaaccggtcatcgatctgatgattctcggcatgggaccggacggtcactatgcgtcgctgttcccgggtcatgatgaggtcaaggttaccgataggctcaccgtgggtgtgaaccactcccccaagatgccgccgttgcgcgtctcgttgaccgcgccgctgattgcccgctcgcgccgtacatggttcttcgccgccggtgccggcaaagccgaatcgctggcccatgtcttcgagcggcccaacaacccggattacccgtcctcctacgccaacggagtggacgagttcacctggttctccaccgaagaaaccgtcaccgagttgtgatggcgcctcctgtgggccggaccctgaatgaggggcccggcccacagattgtcgcagacgctcaagcctgctgttcctcgggctggccttcctgcgcccagagggtgtggaacacgccgggcttgtcgacgcggccgtaggtgtgggcaccgaagaagtcacgctgggactgggtcagggcggtgggcagacgcttggagcgcagaccatcgtagtacgccagggagctggagaacaccggggtcgggataccggcctccacggcacgcacgattacacgacgccatgcatcctgcgattcgccgatgatcttctcgaagtacggatcgaacaacagggaagccggcaaattatcgcccttgaaggcctcggtgatgcggtcgagcaggaactgggcgcgaataatgcagccgccacgccaaatgcgggccacttcggacaggttgatatcccagccgtattccttagcaccgtcctgaatctcgttcaggccctgagcataggccacgaccttggaagcgaacagggccttgcgcacgtcctcgacgaacgcggccttgtcttctccggccagatcgatggtcttgttcgggccagccagaccttctttctgagcgtcttcacgcagctcaccgtgcgaagacagtgcacgagtgaacacggcttcaccgatagcagccacaggagaaccaaattccagaccagcctgcacggtccaagtaccagtacccttcatgccggcatgatccacgaccacgtccacgaacggcttgccggtctcggcatccttgtggtgcagaatctcagcggtgatctcgatcaggtaggagtcaaggtcgcccttgttccattcagcgaacacgtcgccaatctcctcggtatccatgccgagtccacggcgcagaatgtcatacgcctcaccaatcacctgcatatcggcatactcgatgccgttgtgcaccatcttgacaaagtgaccggcaccatcggtgccgatgtgggtcacgcacggttcgccgttcaccttggcggcgatggactgaagaatcgggcccaaggtcttccaggattccgcagtgccaccaggcatcagagacgggccgttgagcgcgccttcctcaccaccggacacgccgcaacccacgaagtggaagcccttggcacgtacttccttctcacgcttgatggtgtccttgaagaaggagttgccaccgtcgacgatgatgtcgcccggttcgaacacctcttccagctgcgcgatagttgcgtcggtcggagcaccggccttgaccatgatgatggcggtacgcggacgcttcagggacgcggcgaattcctcgagcgtttcggccggcacgaagttgccttcggcgccatgctcgttcatgagcttctcggtacgcgagtagtgacggttgaacaacgccaccgtgttgccatggtgcgccagattacgcgccagattggagcccatcgtggccagtccaatcacaccaatgtttgctgtagcttcggccatgtgccttgcctttcgtttgattgtcccatcgtcatcacgcgcgtcacaaaacagcgcatcagcggagggaatcattccttcaacgctcgaaagtgtatcccacttaccacccacacgcgaaggctgtcttaggttctacgcaccttctgcccgcgaagcgtaattacttgccagccattcacatacgcccggccttggaagggtcgatatgcatggtctggaagcgattggccatgtaagcgtcgctgtagcgttcgctgaaccacatcgcgaccggtgaatcctgcggctggccggccatgcgcccataccagcaatccaaggccatcagcgtgaaggcaatgtcgatcaccatcagcaccgtgcataccgcagtcagcgaataccgtactttccatggaatgcgattaatcagagccagcagtcgcggcaacagccacttgacccacaccacaccaatcagtccccagaagaacatgaattggcccgaagtacgtccgtcgatggacagccaacggccggtgtaatcccacgcggtaataccgaacgccacttccatgaaccagctggtgcagtattcgaacgcgccgccgatcaccgccgaagcgcagaagatcaagaacggattcgccttccacaggcgattcaggcacacggttaccaataccgcaccacagccgtaaatcggcgagaacgggccccacagcaaacccgcgcggtcctgaagttcaccgttatacagcgccatatggtagatcgtctccataatcaggccacccaccgaagcgatggtaaacagccagaagatattgaagaagtccagtgcaatatagcccttgccggattggtcgcggcccagcatgccggccgccaccgccgattcataatcatcgcgatcgtccatgcgtttgagcgcgcgctgcaaacggcgttcctcgctcagggagggatcggcggtcaccgaaatcacgacgagaataatcatctgaatcagcggcagcagcaggttgaagccaaggccggtcagggccagcgacagcatgccgtcggccaacgtcaacggcatcagcacgtaggtccagcgcgcggcataccggcgatgattgcgcagcagcatcacgccgaacacaatcaggcatgcggcactgactaccagcacaaccgcatgaatcgcggacaggatgaaagtcaggctcatcgcatcgacgtgcacatgaccatccagaatctcgcgcacggcatagaggatggaaatcaccataatcggcaatgtggcgagtccgtccagcagcacgaccgcgccatagatgcgcgccagaatcggtaatcgcttggcgttcgggttcaagccggcgtcgtccagttcgacggccaccagatcagccacgactgcggactcggcgtcacggttctcccgcggcttgccaggggtagtggccgtgccatcgtccttgaattcaaccatggtttcctccccacatagcgtccccttacactatcacccgattgcagttttgccgaacttgatggatagccggtacatgtctgtctacattgccggacaccgagcccgctatcgctttcaggaaacatccaaaaaccatccagaaatcttgtcaataagttccagaacgcctttcgctccagccaaggcactgatggccagtccggcaccggcagcagctccggcacaggttctgatacttccggtaactccaactccgaccagtcatccagccagaacgagcagtcggccattgatggccaatccggcaccatcgaaagctgatacaacggtttacccatggggcggtagctctctcatgaggcggtaattaccccatggggcggttagcccaaaaccgcattccgcggaataaagccattttaagccaccgccccatgggaattttaccgccccatgggccacttaccacccaatgaaggttttaccgccccagggagggcagcctcacaccaacacacacagcacacccggccacacagcaccccagccacaaaaaattaggcacactgcccagagacacacgataagccgctgggcagcggcgttattccgccaaaaccatcatcaatcaccccaataatctccggcagccgtattacgctactacaaccgtagcgctacgattaacgtatcgctacggaaaacgtagcaaccaagcaacaccaagctccggaggtatcagtgggcaatatcttcaaggtcctcaaacgcgacttcctgcgcctgttcaaggtgccggccgcatgggtgatcctgttcggcatggtgtttatcccgccactgtattcgtggtacaacatcgtcggcttctgggacccgtacggcaataccaaaggcatcaccgtcgccatcgccaacaatgacgacggcaccgacaacgcgctcatcggcaagcaaaacctcggcgatcaaatcgtcaagcagctgaaaagcaacgaccagctcggctggaccttcgtcaccgaagccgaggccatggaccaggtggaatccggcaaggcatacgcagccatcatcatccccaaagacttttccgacgatctcgccggcgtggtgaccggcggcaagagtcggcccactctggagtattacgtcaacgaaaaagccagcgccatcgcccccaaagtcaccgacgtaggcgcgtccactgtggaccgcacggtcaattccacattcgtctccaccgtatccgaagtacttaccgaagtcatcaatacggttggcggcaaagccatcagcaccgaagacaccaccaaagccaaggccctcacggcccttgccgaggcctccggcgacgtgcagcacacacgcagcaccatcgccaagctcaccaccaaactcaccgataccccggagcagacacgcaccgcacgtcaggcgctggacgacgcgcgcgcacttggcatcgacaccgcggaaggtctggccggcgtctccaccctgatcggcactacccaagccagtctgaacggcttcgtcacctccacgtccgaagcgcttgaccaaggctcaagcctgctgagccaggccgcagcacaggccaaccaaagcgtgggcacggtagccggaaccatcagcgccgccaatcagcaggtaggcggactgatcaatacggcggaagacatcaaccaagcgaacgccgacatcatcgaccaactcaaagggctgccgaacgccgatcgagaaccgctgcaatccgccattgccacactggaaagccacaatagcgagcttgccggcgcactgggcaacctcgatagcctgaacaccactatcggcaacgcctccacagacaccgccggattggcgcagcatctcaataccgccacccaaaccacggtgcgcgaggccaataccgctcgcggcaccatcatctccggcgccattcctcagctcaacaccggcctcaacaccctcagctcgaccgccaacactctgtcgaccggcatcacgtcgcaaggctcactcatcgatcagtcgaagagcaccctcgatcaactcgacaaagccgcctccaccacggtgaccgccctgcacgacaccgataaggcgctggccggcatgcaaaccaagctcgaaacgctgaccaccgacatcaaagccctgagcatctccagttcactcagttccctgatcggcaccgacggcaaactggatgccgccacaatcgccgacttcatgctctcccccactgttatcagcgaacgggccgtctacccggtcgcctcctatggttccggcatggcaccgctgttcaccaccctgtctttgtgggtgggcgcgttcgtgctcgtggtcattcccaaactcgaaaccgacgacgagggcatcgacgatctcacgccaacccaaggctatctcggccgtttcctgctgctggccacgctggccgccgtccaaggcctggtcacggccatcggcgatcttgtcatcggcattcaatgcgcgagcgccccggtgtttctgctcacctgcgtcatcacctcactggtgtatatgtcggtgattttcgccctctccaccacgttcatgcacgtgggcaaaggcgtgtgcgtggcgctggtcattctgcaggtgccgggcgcctccggcctgtacccgattgaaatgatgcccgcgttcttccgcgccatctatccgctgctgccgttcacctattcgattgacgcaatgcgtgaaaccatcggcggcttctacgacggcctctggttcgcctatatcggcaaattgctggttttcgcggttctggcctttgtgcttggcctcggcgcccggccgaaactggccaatctcaaccgcctgttcgcgcgggaaatcaaggaaagcgacatgattatcggcgagccggtgcacctgcctggcagcgaataccgtgtcactcaggccattgcggcactggccgaccgcgacgaataccgtcatgccatcgaacgtcgggccgccaaattcgcctaccagtatccccggctgctgctgggtgcgcttatcgccggattcatggtgccggccgcgctcattatcgtgtttgtgctgaccaccagcgagaaaatcgtggtcatgggcacatggctggcatgggtgctcatcatcatgggcttcctgatggtcgtggaattcatgcgcgattccatccgccgccaaaccgagctcggcaacctctccgacgagtcgatccgcgccatgctgtacgggcataaggccaagcgtcgcgacacctccgccgaacgccacgaagaagcggacccgagcgccgccgttaccgcaatcatccccactattccgccgaccaaggaaggcaggcacgcacgatgaacaccatgtggaaactatttaccggcgacatcaaacgcctgaccagcaacgtggtctccatcatcatcgtgatcggcttggtgatgattcccggcctgttcacctggttcaacgtggccgcatgctgggacccgttctcgaatatgaagaacctgaaattcgcggtggcgaatgtggatgaggggtatcgttccgacctgatcccggtgaaagtcacggtcggtgatcaggtggtgaacgcgctgcgcgccaacagtcagctcgattggacgatcacgtccaaagccgatgccgtcgagggcgcacgatccggcaaatactacgcggccatcgtaattccgaagtcgttcagcaaagacatgatgaccttcttctccgacgatgtgcagcatgccgaactgacctattaccgcaacgagaagaagaacgcgctggcaccgaatctgctcaacgagggcacggacgaggtggcggcggaaatcaacaccacgttcgccaagaccatcacttcggcagggctggaaatcgcgtcttcgctggccgatcagctgtccaagcccgaagccaaagagcaactgaataccttcaacgccaatatcgccgatttcgccacacggcttgacgatacggcggatttgcttggcacatacagcgcattgaccgatacggccggcgccttgctcgacacctcgaactcgctgatcacgcaggtttcctctgccgccaaacaaggaggcaaggatctcgccagcgccaagcagggagtcaccgacgtggtcggagccctgggcaccaccgctgacgcgatgagcagcgcactggacgcgagcgcctccagtttcggcgcggtgtccgattccatagacaagctgtattccgacgcgaatgatggtgccaccacggccgccgacgaattggaccgtcaagccacggccattggcaagcagacggagaaatacactgaaattcgcaacacgttggccggcatactgggcaacgactcatccatcatcacggcgattgaccgttcaatcgcacggcagaacaggctgcggcaagcgctgaatacggcggcgaccgatattcgccaaggtaatcaggacgcgcaggatcagcatgcgcaggtcaaggatctggccgatcaagcgcagaacagtatcgccaatatcaagtcggatttcacggccacggtgaaaccgcaaatcgactccctgtcgtccaccgtctctgacgcctccggcatactgagttccggcgccacccagttggactccacgctcggcgacctgaaaaggacttccgacgacgccagcgatatgctcggcgacgctcgcaccaccttgggcaaggtgtccggcaaactgcgttccgccggtgccgaactggcttcgttcaacagcacactgagcgacgcactaaacagtggcgatatgagcatggtcaaagaggtgctgggcaatgatcccgaaacgctggccagtacgttggccgcgccggtgcagctcaggcgcaaggccgtattcccggtggcgaatttcggttcgtcgatggcgccgttctacacgctgctgccgctgtgggtgggcgcgctgctgatggtggtgacgctgaaaaccaccgtgtctcgccggacacgcaaagcattgggcgatccacggccgcatcggctcttccttgggcattacggggtgttcgcgctgattgcgctgctgcaatccacggtgtcgctcggcggcgatctgctgttcctgcgcgtgcaggccgtgcatccgctgctgtttatgttgtccggatggctggcctcgctggtgttctcgttcttcacctatacgatggtggtgagtttcggcaatgtgggtaaggcaatcggcgtgcttatgctcatcgtgcagatttcgggtgcgaacgccgcctacccggtgcagatgttgcccgacttcatcgccaaagtcagtccgttcttgccgctcacccatgcggtgacgatgatgcgtgcggccatcgccggcatctacgacatggattactggcgggccgccggaatgctgctggcattcgtgccgccgctgctgttgcttggactgttgctcaggaagccactggtgcggttcaaccagtggtatgtggccaaagtcgagagcactaaagtgctgggctagtaggtattatccgggggttgcctacaaacggcatggacttaccaccctcagtctggctttgccagccagctcccgccagcgggagcgtacgggagcatatttcgaagagaagagatgacggagatgacaggtacgacggcgacaccgcgcggtgagcgcacgcgcgaggcgacggatcgcaagctcatgcgagccacgctgcagattgcggtggaccgcggcatcagcggcgtgaccatcgaggaggtggcccggcgctccggtgtggccaaaaccacgatttaccgtcgataccataatgccgacgagctgctgcgcgagatcagcgcgatgtatctggccatcccggattccgacccagtgcccagccccacgcgtgagcatttcacgcaactattgcagcgattggtcgattgggtgcgcgacaacgacatcgacgtcaagcgcgtgggcattgtattgtccagcgaggccgagttcttccagcacatcgtcgaccaggtggtgaccccgtggctggagcatgtgggggcgttcctcaagcagggagtcgcgcagggcgtgtttcgcgaggacgttgacgagaagttgctgttgtccacgattatcggatctttggtggcgtatgaggccatcgagggcaaagcgatggacgacgacaccgcctgggcctcgcgcatggccgatctgctgtggccagcattgctgaagtagcggtcttactcctgaatcgaagcctcctggcgggcgacttcgagggctttgttgaaggcgtcggaggtccagctggcaccggcgaccttgtccactttgagtcccttcaggggcttgccgtccactacgccgttgatggctttggcgaagtcgtcctgatggttcttggaaatcgtggtgaacgggtgcccaatgattttgacggtctcgacgttgccgtccttgatggtcagatggacgtcgatggaatcctcgccgaccgggccgtactggccgttgatcgagtagttgccgtccttgtagttgccggtgtccttcttgtcggacgtggtggtggacgggtcgttgtgcgatgagccggaatcggagccgtcggagctatcggagctatcggagccgttcgactgggattgcgactgctcttcctgcgacttctcggtctcgcccgagttgccggcgtacgcatcgtccatcggcgtggccttggattcgccgcacccggccagcagcgcgccagccacgaccagtccggccgccgccaatgtcgcggatttcttcaacgtattcttttcggtcatattcacgctccttaagccccctctgacgagggggctgtcagcgaagctgactgggggagagaccatcagcttgccatgtattcctcacatactgctcgatgcccctgacggccctactcctcgccgccggttttcgcggccttggtggggtcagcgaaaccaatggcggtctcgccgttctgcgcgccctcgacctgtgcacccgtggaggcgggcttgccgccggccgcctcgtaggccttgcgcgcatcctcgtcattccacttctcaccgacgagcacgccatggttgagcatgatctcgcgctgcgcgcagctggcgacaagcgcatcgtgggtgaccacgataatcgtggtgccctgctcgtgcagcttgcggaacaggtcgagcacgattttctcgttcttctcgtcgaggttgccggtgggctcatcggccagaatcagcttcgggtcgttgatcagcgcgcgggccacgcacacgcgctgctgctcgccgccggagagctggccgggcaggtggtgggcgcggtccttcaggccgaccttttccagcgcctccatggcctgcttctcatcgaccaccgaatggtagtactgggccaccatcacgttttccacggcggtcaggtgcggcaccagatagaacttctggaacaccagtccgatgaggttcttgcgcacgtcggccagctgcgtggcgttcaggtcctccagcttgcggccttccagcttcacggagcccttggagggcgtgtccaggcagccgatcatgttcatcagcgtggtcttgcctgagccggaggagccgacgatggcgagccattcgccttccggcacggtcaaattgaggtcgtccacggcatgcaggtcgccgtagatcttcgagatgtggtcgagttcaagtagcatgacgtttctctttctttattcttcgcgaagcacgacggcggggtcgatgcgggtggcgcggtggacgggcgggatggaggcgacgatggcgaccagcgcgctgaacagcacggagatcagcgccagccaccagttgaatccgatggagcgttcgaacaccgccacgcacagccaactggcgagtccgtagccgattgcggtgccgatgaggccgccgatcaggccgtagagcgatgattcgatgtagaactcggtgccgatggcacgcgagctggcaccgagggccttgcgcaggccgatctcgttgcgtcgctgcgagacgatcgagctgattgtggtgccgacgccgacgagcgtcagcaccagcaccaccaacgagacgatccagaacagcgtctgcagcatggtgatgatgcgggtgtcggaggcggtgatcttggtgacctgctgcgccttgacgtgcatggaggtcatgtcgttgatgctggacatcaggcctgcgaggtcgctggagccggccgaatactcgatgacgtccacgccgcgcgtgatgccggtgagcttgttgacgtcggcgttggtggcgtagatgatcgagtcttcgctgccgcc

SEQ ID NO: 1696 - DNA, 7981 bp, Unknown
  MAG_14  MAG No. k141_6012
caccaccgcgccgcccaccgcagcgatcagcgtgatacgaaccttctgcaatcctcggaaaatgccgttcgccgcatataccatcagcatgcctggcgcacccagcacgattgcgcgcgtataggtcacggcttgttccaatacttcgccctgaccgcccagtgcccggcataatggctcggcagccgcgaacaatcccaatcccagtacggtgccgatgctcaaggccagccacaggccgtcaatgcctgcctgcagtccctcgcgacgacgacccgctcccagcagatgcgccacctgcgcagtggtcgagtaggccaggaatatgcatagtccgactgccgtgaggatgatggtcgatccgatggacagtccggccaaagcggcatcgccaatgtgaccgacgatggcggtgtcaataaggataaaagtcggttctgcgatgagctgcccaaaagtcggtagcgccaacgcaatgatttggcgatgaatgctggtggagttgctatgcacgctcacacgcatatcatgcttagctacgttgcgcaagcacctagtgcagccgtacaaagttatcctcagcttgtccaccaagttatccccaatatgtggataaatgagtggattatccccagacttatccccaaaatgtggataactattttttctatccacatttgacgcttcagcgtgtcgccgcgctgaccgcaaggtgaaccaacgatgaaattggtgcgcgatgattcggcacgacttgcactttcatgcgttcattaggtcgattgtgcattcattaggtcggtggactttgagagatattgatcgagcgcctcagaatgccgccattccaagcgcatggtttgtggtgttaccaagcacagtgacctaatgagtgaggaatcgacctaatgaacgtagtcgtgcgatatcttccgctcgccacgccacctcctatacttgaaggctatggcagaaggaagtgaacactcgtatcagaatgggttcggcagtggctcggatcgtggcgatcgtggcgaccgcgcgggccggggcggcgcgcagacgtcggcggcggtcggcgacccgattttcgaccgagtgcccccgcacgatgacgacgcggaaatggccgtgctcggcggcatgctgatgagtaaggatgccatcggcgaagtttcgcagaccattgacgtcaccgatttctaccagcccaagcatcagacgatctataacgcgatcatcgatctgttttccgccagtcagccggtggacgtggtgctcgtggccaaccagctgttggcggatggcaacctcgacaaggtcggcggcgcggactatctgcacagcctcgtcgcatccgtaccgaccgccgccaatgccatgtactacgcggagatcgtccatcagcgggccattttgcgcaatgtgatcgccgccggcaccaaaatcgcccagctcggttattccgccgagggatcgcaggctgaggatgtggttaacctcgcccagtccgagatctacgagatgtcgatgggcaaggtgcgtcaggactatgccgccatcggcccggtggtccacgacgcgctcgaccagctggacaaactgcagcagggtctcgtcaacaagggcgtgccgaccggattccgcgacatcgacgacgtgacccagggcctgcagcccggacagatggtcgtcgtcgcaggacgtccggccatgggtaagtccacgctcggcatcgacttcgcccgcgccgccgcgttgcaccacaacatgacttccgtggtcttcagcttggagatgagcaaggtggaactcgcccagcgcatcatttccgccgaaaccaatattccgatggccgccctgcgccgcgccgacgacatcacccccgaacgctggaacaccctgaaccagttctggaccaagatgcagaatgcgccactgttcattgacgacagcccgaacatgagcctcatggagatccgtgcgaaatgccgtcgtctgaagcagaccaacgatctgaaactcgtagtcatcgactacctgcagctgatgacctcgggcaaggccgtggaatcccgtcagcaagaggtgtccgaattctcccgtgccctgaagctcttggccaaggaactcgaagtgccggtcgtggccctttcccagctgaaccgtggcccggaaatgcgtaacgacaagaagccgcagctctccgacctgcgtgaatccggctcaatcgaacaggacgccgacgtggtgttcctggtccaccgccctgacttctacgacaaggaagaccgccccggcgaggccgatatcatcatggccaagcaccgtaacggcccgaccgaaaccttccacctcgccttcctcggtgccacgtccaaattcaaggacatgccgcaggactacaacagcaatcagggggtgtgatgatggcaagcaacgtttcacgcgatgtttcgcaagaccaatcgtccgtggtgcagacccgcaaaccgtggtatgcgttcgccaccgtggccgcaggccgcttcgtgcggtttgcatcccgcgtcaccaaacatggcggttcggctttgcccggcaaagtcgtagaaaagattgaccccggcttcctgacccgtacgctcgggcagttgccgcttggcgtggtattggtgtccggcacgaacggcaagaccaccaccacccgcatggtcgcctcgatgctctccgatctgggattgaaggtgttcaccaatccgaccggctcgaacttcgtgcgcggcgtggtctccgcactgctcaccgaagtcactttcggcggcaaattggacgcggacatcgccgtactcgagctcgatgaggcgtacgccgtccacttcgtcaagcaggtcaagccccgttatgcgttgctgctgaacgtgatgcgcgatcagcttgaccgattcggtgaaatcgacaccacggccaaactgctcagccatgtggctgcggcgactaccggcactgtggtactgaaccgcgaggacccgcgtatcgccgcgctcgccgcgaaggtcctggctggcaccacagtgcgatacttcggcctcgccgacgatttgcgccactatttcccgtccgatgacgacatggccacgaccgtgtcggtggaaggtatggccgggccgctcccttcagtcagtactcccctcagtccgcttcgcggacagctcccctcggagaggggagcttccgcaggcacggcagaactccccgccgacgtgacacttaccgccgtgggcgaccacaaggccaccttccagatggacagccaggactacgccaccgacgtcaaacttgaaggcgtctacaacctgtacaacgcggccgccgcgctcgccgtggtacgtgcggtgatgcaagacaatgccgccgcatccaaggccactgccgcagccaacgcctgcgccgtgtccgccgacgagctcatcgccgccgtttcccgcgtcacgccggctttcggccgtggcgaggtcatcgacgtcaacggttccccggtcgaactgctgctggtcaagaacccgatgggcttccgcctctcgctcgccagcttcgacccggccaacgcggacaccatgatcgccatcaacgacgaatatgccgacggccgcgacatgagctggctatgggacgtggacttcacctctttacgcgcgtccggtgtcgccatggtctccggcgtgcgtgcctgggacatggcattgcgcttggggtatgaccaagtgccagtcgccgatacgaacaccgacctcgaacaggcggtcaccgcattcgtcaacgccaatcccggcacacgcaagcacatctactgcacctacaccgccatgctcaaaacccgtgccgtactgggccgcatcaccgaagtacgggatgcgggcgtgggcaagtaaccaccctctagcgcccgcgcgccacctctcgcctgcgggaggacatggtgaggaataagacttccccttagcgggaagacatcgacaaggagaacgcgacatggccagaacaatcgatgtggtgtccctgtatcccaaagacatgaacatctacggcgattccggcaacgtgctgactatccgccgccggctggaactgtacggttacgaaccggtcgtccaccagtacaatcaaggcgatgactggcccgaccaggtggaccttattctgggaggcggcggccaagacaccggccagaagaaaatcatcgacgacttctaccatcgcgccgacctgctgcgctcgcttgccgcagacggtacgccgatgctgatgatctgcggcctgtaccagctgttcggcgagtactttgaaaccgtggacggcacccgtctggatggtatcggcgttatcggtgcttataccgtgggccagaacgtgcgtatgatcggcaatcttgttgagcattccgaccagttcggcgatgtgatgggctatgagaaccactccggccagaccttcctgcgcgaaggcgttcagccactcggcaccgtcgatcaggacggccgaggcaacaatggcgaagaccataccgagggcgcgcgcgtgcacaacgtgatcggcacctacatgcacggctcgttgctgcctaaaaaccccgccatcagcgatttccttatcgaaaccgccgtgactcgtcgttacggtacgttcgatacgtccgatcagacccccgaacaagccaaggagctcgcccggcttgatcaagtagccaccaacgcgcgcaaggctgccgccgaacgtcctcggtgaattctcggtgagtcctcggtaagtaccaatcagcgaaaaatcagtcgaaatcagtctgagggtctagtacattgccctgttgtttgcgctaggcttggtggtacgagacatggcaccaggccatgtcggacctcgaaggaggggtatcatggctgattttgatcttctgggtgatggcctgcgcaaggtcctgctggcgggcatcggagcccttgccaccggatatgagaagagcagcgagctcgtcgacgaactcgtcaagaagggtgagattacggtcgagcagggcaaggcgctgaacaccgagctcaagcgcaaggtgagcgagacggtggatgacgccaagaaggccgccgccgaagccggcgacaaagctgctgccgcagccgacaccagcgccgccgacaagcccgccgacgagggcaaggccgagtgaccaagcccacacgcactacgccggaatcagagtcgaccccgctttccagcagggtcgaccctattctgacgcctgcgaaagccgaacgtgaggcggcggcgaaccggtccgtcgacacgtcggacacgctcaagcgggccgttaccaaggcgactccgagcgtatccgacgaaacgctggcactgttcggacgcaggaacgatttcgccacgcgctaccatctgacgcgccgtggcaagatcaaacgactggggcagatcaccagaatcgtcgagcaattcgacgtgctgcacggcctgactccggtcaagatgcgcctcatgttcgaggcgctcggccccacgttcgtcaaagtgggccagattctgtcgatgcgctccgagattctgccgcaaagcttctgcgacgaactcgccaaactgcgcgccgacgccgacccgatgccgtattccacggtgttggatgtgcttgccgccgaatacgggcgtcccgccgacgaggtgttcgcgcatatcgaccccaagccgttgggctctgcttcactggcgcaagtgcatcgcgccacgctgaaaaccggcgaagatgtggccattaaagtgcagcgcccgggtgtgcgcgaaatcatggcccaggacgtctccatcatgcgctccatagccaaggccgccactaaggtgattcgcacctcacagatcgtggatctgaagggcgtggtcgaggagctgtgggacaccttcgaatcggagactgactttctgatcgaggcccgcaatctcgccgaattcaagcgtttcgccgcccgattcaaatacatggactgcccgacggtgtacgccgaactgtgcaccgagcatgtggtggtcatggagtacatcgacggcatctccgtctcccacccgggccagctcatcgacgccggttatgacttgaaggagatcggcaccaagctcgtcgacaattacgccacacagattctcgacgacggcttcttccacgccgacccacatcccggcaatatcctcatccggggcggccagatcgtacttatcgacctcggtatgaccggtcggctcgaccagcgcacccgtgcagtcctcaaagaaatgattttcgccgtcgccaaacaggattcgcccgctctggccgaggggctgctgcgatttgccggcaccgaggccgatccggaggactatcccgcgctattggccgatctggacgtgatcgtcaaggaattcggcaccgtggatctggccgaactggacattgccgctttcctgaccgcactgacgcagatggccggccgccacaacatcgaggtgcccagtacggtgaccaccgtcggccgcgcgttggttacgctcgaaggcttgctggacgagttcattcctgatgtgaatatgatcgaaatcatttccgaccatatcgccacgtcgaaatcgctgaagaacgccaccaaagacgagatcaagtcgctgggcgttgaggggcatcaggctttgcatgccacgctcggcaccatgaccgaactcaagaccgtggcccgtatgctgacccgtggtcagttgcgcgtcaacatggaactggtcggctccgaagagccgttccagctgctttcggatatggcgaatcgtctgacgatggccctgattgtggtcggtttgttcgttggctcgtcgattgtctactacgccggcatgaagccgattatctttggcattccggtcatcggcttcatgggctacgtcgtggccttcgccctcggcgtatggatcgtcatcgacatctacttaaagggccgcaaaaccaagaagcggtagggtatcgattgatatcagtccagcgggagggtggattcgcgctggataaggcggcagggtacgtagtcgacaccgtgatgggggttgccttcgatggcatcgaccaagtatcgtgccgcgcggcggccgatggtctcggtttcattgtcgatcgacgtcagtgcgggcctcgagctggaggtcagcacagaccagttgtcatggccgataacagcgacatcatccggaatgcgcaggccctgctgcttgagcgcatcaatgcagcctctggccagctggtcgttttgacagaccacggcgtcgaacgtgacgccctgatcgagcagcagacgggtggcggcgcggccccaaccttcgtcccacttgccgtaccggattggcccggccggttcgatgcccagctcggccagtgcctcgaccgcacccttggtgcggtcggtggcggcggtataggtttcgtcgccaccgataatggcaatgtgccggcgaccacaagagatgagatggttgatggccatgcgcccggcgtccacattgtcacaggtgaccgaacaatcttcggtatcggtggaggggccgtagacgtagaccagtggcacgccccagtcatggccaagcgtgggccgggggttggtttcgcgctgcacgatgagtggaccgtcgaccttgagggaccgcagtttctcgacatgctgacgttccagcgcggcgtcgcgaccagatcgtcgaatccgtcatcccctaccagtggtgagtgatgaacgacgaaatcgacaccacagtgcctgacgacccggctggcaaccagctggctgacaacaaaagccacgcggtcgccaatctgaaggttgtcgccggcgaattggacgacgaattccacggcatggtgttccaggattccgacgtctacaagtggcttgaggaagccgcttatgcgctggcctaccatccggatcccgaactc

SEQ ID NO: 1697 - DNA, 17538 bp, Unknown
  MAG_14  MAG No. k141_6463
atgtggcccgttgtctatttgaaagtgcgacaccctttagattggagattgtccagataaccagtgaaagggtgttgcactttcatttagacagcggggggacgattgagaagtcataattccgttacactggcaaggacaaggaactaaggtatgcgaggattatcggtattgagcagggcgttgcgatgggcgttggtgggtatgacgttttcgatgctgtccaacgcgattttcgaggggtcggtgattccttcgattctgatcgtcggactgccggcatgggtgatcgcgttccgcaagacgttcaatctggtcatcgacttcgcttctccgatatccgcatggatcgtgcagcggttcggctcgttccgttcgcttgcgaccacggagggcgtggaaggcgtactgtgcctggcggtcgcgctggtgcccaacggttggacgtattggaagtggctgctgctggccctgtcatgcctgctgctgatgaccgggcaggtcatcgacgtggcctccgaagtgttcgaggtggatgcggccggcgacgacgatgacatgctcgtcaagtacagcggctacgtcgccgtgattgccagcgtggccggtacgttgctgggccaggttgccggatcggccttggccaacgcctccatcatggccatgctgctcacctcgtcggcactgtcatttgcctgcgcgctgacgcgattccgcacccgcgagttcatgccgggattcggcaacgatggtgcgggcggcgatgacggcgacggctccgccgacgaatccacggcggccgacacgtcacacgcgccgcagcgcactccggtcacccgctcgacccgggtcagactgctgatcgcatcgctgctgcttgcgctgattccgtcgctgtgggcaagctatgcgttgctgggcatcggctcccggtacggcagcgatatgctgaccgtggtctacgcattcggcggcgtgggcagcatcgtcggatcgtttgtctacatgcggctctccgcaaaactcggcatgcgcgccgtgtccgccatcggggcaatcgccacggcgatttcccttgccgccgtactggtccccgcgtttgccgcggcgtgcgtcggatggctcatcaacaacctcggctatggcctgctggcgcatggcgtgatcgtatcgcgacaactgctgctgagcggtggtgacctggccaaattcagcggccgtgccaggttcgcgtatgcgatcggcggtgccgtcggcacgtggggcggctggctcggctccgcccactggcagatactcgccgtcgtggccctggtactgtgcgccggattcatcccgttgctcaaggccatgcctggcccggtacggcactgaggtgacggatggggccggctggcatctcgtgcgccgggcgatttcggcagattttgccgtgctgatgtatgcaggtgttgacgttcggcgaggttcccagccacattgctgtgtgattgatgccgctcgataggcatgtcaggccggacacaccacggcgatgccgaatgggcgacgggccgacgacccgcatcatcgcagcagccgggttttgccatccttgacaagcagggcctgccggttggtgaggggcttgagactgagatcggcaccataccggtcgagaatgcgttgtgcggcgtggcccatggccgttgcatgatggtgggggaccacgcggaaatcagccaagcccaatcctgcgtaatcggtgagatcgggggctttgtccgtgcggtccatgagcttgatatagccgatgtcaggtgccgtgatgaccgagcccgcggactcgccgatgtacggcgtgccggcgcgcacctgctcgatgatggcccggtcggcaccggtgcggcgcaactcctgcaggagaaagaacgtgttgccgccgcccacatagatgcagtcggcctcggcgatgctacgcgtgacgcgttcggcggacccgctcggcacatcttccacatccagttgctccacctcgaaaccgaggcgttgcagcgcgtgtttgctcaacgccgagtgaaccggcccccacggttccacggcgctcgccgtcgggatgaacgcgacccgcttgccttgcggatgcggttcgacttcatgcacggcggacgaggcgttgcggaatatcgaagtcagcagcatcgtaaccataaaagccttcttcacatatcgactaggcgactatgcggcagtgtcggccttgaatatacggaagtgttcgtgcgttcgctctgggtatatccggcctgatcagcgggactcggccaatgtgatgccggccgccgtcatctgtttgcgggccgcgacaccgagctcctcgctgaccggtacggtcaggtcctcgaacacggtgacctcgaaaccgagcttcccggcatcgagcgcggtgtccttgacgcaatgcgattcggcgatgcccaccacatccacgtgactcacgccggcggccttcagcgcattggccagcgtcttgccggcggattgctcggccgcaacctcctcacgggtctggatacggtcggtattgtcctcgatgccctcaaaaccggaatatgccgccgaatactggcccttcttgaaatgatgatggataatcagcgccttgatcgccggatgcaattcggcgttcggcgtgccggccgcaccatgcttcggccacgtgtccacgaaatccggttccgccgaccagtgcgcgcccggctcgatatgccagtcctgcgtggttgcgatatacgcgtactcgctgcgatgcgcgttcacataatcggcgatccgctcggcgaccgcgttgccgccttcgactcccagttcgccgccttcacagaacgtcggctgcatatccaccacaatcagtgccttggtcatcatcattccccctattgccttggattcgttttgaatattgtctcgaactcgacgtgcgattgctctcatcatagccatgcgcggccctgtgggaaacgttcgggcttacactgcaagcagcaatcgaatacaagaaccaggggagggtgaccaagaccatgctggaccatctgacgttgcacgtgaaagacatcgaccgtagcatcacattctacaaacaggcactcgcgccgctcggctatatcgtcaaggcgcatcatgagcccacgctcggattcggcgtggatgacggaaccctgcactccgatttctacgtgtcgccgattgacgggccggaggcggaggcttcgccggtcacgccggtcacacacatcgcgttcctggctgacagtcagcaagccgtgcaggcgttccatgcagccgcgctcgccgccggcggccgagacaacggcgctcccggtccgcgcccgtaccatcccggctattactccgcattcgtgctggacccggatggcaataacatcgaagccgtcgtggattgggctcattcgaacgagtaaaaaacatatccgtgtcgtgcctcaggcagcatcgacggcgtaggctccagccagtcggatttgtggtcgcaacggcggtataggtcacatcacgcaagcgtgacggtgacggtctgctcggcggtttcggtgccggtccatgtgccggctctgcggttccaatccatgccgtccgcgtgcagtgcatcaatgccgtattgatgcgcctgtgtgaccagccaccctgccgtctgccagcaaagtcgagtgcggttgtcggcggacaggccgtccggcagcgtgatcgtcaacgttgtgctggccgtattggtcgcagcgccgttgttcgtgccggttttgccatttaggggcataaccgagaccttgacattcggcagtgtagcgcctatggcggcaaccaacccgtccgcgtccgaggaggttgctggctccaacgcgcacgtgacgcccgccgaccgttcgccggtcagccccgaggcccaagcgcgtgccatcgcatcccatgtggcatatagttccgggtagcctgagcgctgcacctcctgcgcggcgtcctccaccggaatcgtctcccaatccggcacctgcagcagatggtcgtagaagatgtttgtcgcataggtcatgtcggacacctgctccgccgtgccccagccttggctgggccgctgttggaacaggccgagcgaatccaagtcgccgtagtccagattcgtcagcctcgactcctgcatggccgtggcgatggccaccgtcgccgcgtgatccggcagtccgcgcgtgacggcgatgttcgcaatcagcgccgcgttctgcgcctgatcaggcgtcaaggtgcggcgggctccgtcgggcgacaccgccgcgcaatatgcttcctcggccgtgcgcgcggtctcgtgaggcgtgaatagccgtggcagcagcgtccatgccgcgatcagcgccgcaacaacaagtatgacggctgcaatcagcgcgcccgcgccatgggagcggcgtctgccgcaccgcacctgttgtcccattgcgcctccaatatttcggtgtcatggctgaccgtgaccggctggcctatgcagcatgcgggatttgccgtgttccagctcggccgtcatcatgacagcgtggcatatccacctgaacggcggctgcgccatcacgcgactttgtgacaattcttcacgcttcctgacatccgcgcaatcagaccggggaatgatacaccgacatctctattgcaagttcgacgcggctgataagtcgattcgcaatcgtctatttgcgtttcaaggggctgatttgctcgttccgagacatccacttccgtttcgaggggctgatggccgagtagcgacagctccaaaacggcgaaatgacgttggcatgaagccattcgtacttgggttttggccaatgaccagccccttgaaacggaagtggatgtccccaaaccacgaaatcagcccctcgaaaccgagaatggcggtcgggattgctccgacaccaggggagctgctgccgctattgtgtgaaagacgatttgtaccgggttgaaggagaggaacacatggcacaattgcagccgtactgcgcgattgagggcaatgatgatggattgcccgtcgtgttcgtgcatggcatgggtgtggaccatcgttcgctgatgatgctcgacaaggcgtttgacggcaatgattcaattcgccgtatatatctggatctgcccggtttcggccgtacgccggcattgcccgagcatgcctgcgggctgccggaaatggcggattggctgcaaacggccattgacggccttgtcggtaaaacggctccattcgccatggtcggcaactcgatgggcggtgcgcttgtccgcgaagtattggcgcgcgaacctcgccgagtggccggtatggcattgatcgcgccggtcgtggacccgcagcatgccggccggcatgtggccgaacatgtggttgcacagcccaatcccaagctgacgcactccttgccacaggaacaggtgttcgatttcattaccatgggcgtcaaccagtcattcgacgcgtggcggcgctaccaacggttcatcctgcccggcgtggcgttgtgcgaccgtgcggcatgcgaacgactggatcagcgttattggctggccgataatcccgaggaaatgctcggcacatatgctggtccggtgctcatcgtcaccggcaagcaagaccagatcgtcggatacgaagaccagcaagccctgttgccgcactatcccaacgccaccttcgtgactctggataatgccggtcacaacgcgcacatcgaccaacccgaagccgtcatcacgctcgtgcgcgaatgggtggctcatatggcgttcgttccgttgagctgacggtctgctgacagtctgccgaagcctatatgcatatgagcgaccaatgccggttgacgcaatacgccttgcaaggtatatcgtttttcgatatagtcatatcgatgttcgcggtgtcgccaaaaacgtcggcacctgaaaggaccgggctatgaaaaactacataaaccgatgggtgttgctcgcgttgaaagccatcgtgattctggtctggctggcctgcctatggggccaactattcgccgtaccgggattgagcggcgcgctggccggcctctgcccgagacagacgtcgatgcactggtcatatctcattatgggcgtgctgttcctgctctgcatcgaagcggcgttcgtggccgtatggaaactgttctccttgtccggatcgggcgcgaacttgagcaggtgatttgagatgacgattcgcatcaatctcgacgtcatgatggccaaacgcaagattggcgtcggcgagctcgccgaacaaattggcatcacgcccgccaacgtgtccattctgaagaacggacgtgccaaagccgtccgcttcaccacattggacgccatctgcaaggcactcgactgccaacccggagacatcctcgaatgggaagatgtcgattgatcgacacgccaccggctcgaactcatggttcaacttgtagtctctctcaaaatcaatgatgccctatcatcctgcaagacgatagggcatcagcatgtgattatgcgcagctgatatgtcgcgttgttatcactcggcgtccgcggccggtgcctccttgggcgcggagaggaagtgctcctcgctgggcagcacggcgttcaggattacggccaccacgaacgacacggcgatgcagttcgaggcgaagatttgttggaacagtgccgggaactgcgcgaagatgtcgctcacctgggtgaagccgatgccgatggtcagcgaaagcgccgcaatcgtgatgttgcgctgcgtgaagcccgcttcggcgatcatctggaagcccgaaagaatgatgttgccgaacatcatgatcgtgcagccgccgagcaccgcctgcggcagcgagttgaacacctcggcgatggccggcacgaagctcgccagcaccagaatcagtccgccggagagaatcaccttgcggttgacgaccttggtcatggccaccaatccgatgttctgtgcgaacgaggtcagcggcaggcatccgaacaggccggatacggtggagatcaggccgtcgccggcgatggcgcccgcggtctcgcgttcggtgggcgtacggttcaggcccaccttggtcagcgcggcggtgtcacccagcacctcgaccgaggagacgacgtagagcaggccgatggagatgatcgaaccccagtcgaactcaggcttgaacggcatgaactgcggcacggacacgatggcgaggttctggaaaccggagaaatcgaccttgcccatgcagatggccgccacatagccgaccaccaggccgaacagcacggacagctgcttggccgtgcccttcatcaacagctggaacgccaggcaggcgaccaaagatataagcccgagcgtcaggttctgccagcttccgaagtccttggctccgctgccgccgccgaagctcgtggcacccacgttgagcagcgagaagccaatcgacgtgaccacgatggcggagacgatgggcggcacgaaccgacgccaatacttggccgtcaaacccagcacgagttccagcaggccaccgaccattaccgcgccggccactgcgccatagcccttgtctgcgcagatcgccacggcggccgccacgtaggtgaaggagatgccggtgaccatcggcagacgcgagccgatgagccacgcgccgtacagttgcaggcaggtgcccaggcccgccaccagaaggccggcctggatgatggtggccgattgggccggggtcattttcgcggccgaggcgacgatgaagatcggggcgaggttcgccacgaacatggccatcacatgctgcaggccgaacggaatgcccttccagaaggatactggcgcgttcagcgaagacagcgcctcaaaggatacggaattcttggttttcttctctgacatgattcttttcttctctctgttgctcccgctggcgggagcagtcaatgtgctcagtgcctaaatgtgatttcgccggtctcgggattcatggactcgacgatggccagcgaatccacatcgtagccttcggcacgcagcgcgtcaccgccgccctggaagcccttctccacggcgatgccaatgccctcgaccgtgacaccggccgcctcgcacaggtcaatcagaccgcgcaacgccttgccgttggccagaaaatcgtcaataagcagcacatggtcgccggcgttcagatacttcttggccacgatcaccgggaactccttctgcttggtgaaggaatagaccgtggtggtgtactggtcgccgtcaaggttgatggactgcgccttcttggcgaacaccaccggcacattgccgaaatgctgggccgccacacacgcaatgccgatgccggacgcctcgatggtcagaatcttggtgatgtgcttgccggcgaaatgagcggcccatgccgaacccatgcggtcgaacaggcgcacgtcgcactggtggttcagaaacgcgtccaccttgagcacatcacccgccttcaccgttccctcgctctggattcgctcctcaagttcctgcattagacctcccattgctgtatgtcagtgaatgatatggatacttgtaagtgtacgttgtcctgcgctgacccgtgcatgtggtaaacatgaatgtcgcgattcaaagggaggcaacagtgtacgacgagccggaagtcatcgcacgcagcgcgcaggaactcgtaggcgatctgaacccgcagcaggcggaagccgtgcaataccgcggtcaggcgctactgatcggcgccggtgccggctccggcaaaacccgtgtgctgacccgccgcatcgcctggatcttgagccagttcggcgcatggccgagccagattctggccatcaccttcaccaacaaggccgccgccgaaatgcgcgaacgactcggctcgctgatcggcccggtggcccagcgcatgtgggtctccaccttccattccgcctgcgtgcgcattctgaggcgcgacggcaagtccatcgggctcaagtccggcttctccatttatgattccgccgactccgagcgactcgtcaaaatcatcgccaccgaattcaacctcgacatcaagcgctacactccacgctcgatcctcggccatatctccgacctcaagaacaatctgaccggttggaaggaaaacctcgccgttcacgcgcccgacttcacgcctggccagcgcggctaccagttcggcacggtgggcgaccttgaagccatctatgcggtgatctacgccgaatacgagcatcgcttggccctggccaacgccgtcgacttcgacgatctgatcggccgcacggtcgagttgctgcgcaccgacccggccgtcgccgagtactaccatcaccgcttccgttacattctcgtcgacgagtatcaggacaccaaccacgcccagtacgtgcttgtgcgcgagctggccggcgtggacacgggggagaaggccatcccgggcgcgccgaacgccggcaagtccggccccgcctggatcaccgtggtgggcgattccgaccagtccatctacgcgttccgtggcgccgacatccgcaacatccaggacttcgagcaggacttcccgaacgccaagaccatcatgctcgaacagaactatcgttcgacgcagaccattctggacgcggccaacgcggtgatcagcaacaacgagggccgcaagcccaagaaactgtggaccgcgctcggcaagggcgagccgatcgtcggctacgcggcggacaacgcccagcaggaggcccagtgggtggccaccgaaatcgcgcgcctgcacgccgaagagggcatctcctactccgacatggcgatcatgtaccgcgccaacgcccaatcccgctcgctcgaagaggcgctgatcaacacgaatcagccgtatcagctcgtcggcggcaccaagttctacgaacgtcgcgaaatcaaggatgcgctggcctatttgcaggcgctcgtcaatccggacgacgatgtgaatctacgtcgtattctcaacgtgcccaagcgcgggcttggcgaccgcgccgaaggcgtgctgctcgcctacgcgcgcgagcatggcaccagcttcttctacgcactcatgcacttggatgagatcgaggtgccgacccgcaccgccacctcgctacgagcattccgcgatctgatgggcgcgctctcgcagttcacgcacgcgcacgactccaagcccagcgagatcgtggccgaagtattggagaagtcgggcttaagggccgaacttgagaaatccgtggatccgcaggacgcctcccgtctggagaacctctcccagctgcagtccaccgcagccgaattcgaacagaacacgcctgacgccacgttgtccgcattcctggagaccactgcgctcgtggccgactccgaccagctgcccggtgaggcggaggactccggcaaggtgacgctcatgaccttgcacaccgccaagggcctcgaatacccggtggtgttcctgaccggcatggaacagggcaccttcccgcattcgcgttcgatggaagacaccactgaactgcaggaggaacgccgactcgcctatgtgggcatcacgcgtgccaagcagagactgtatgtcacgcgcgccgccgtccgctcccagtggggccaggccgccgatatgatgcccagccaattcctcgacgaaattccggattcgctgattgattggaaacgccgtgaagccggcgtggagcgtatgcgcgccaactgggagaccgatggattcgccgacgatttgggcggctgggatgatgacgatttcggcggtgccacgtttggcgggtcgtcgacgttcggctcgcgtggttcgtccggttcgggttcgtcctatgggtcgcggtcgcggtatgggtcgtcgtatggctcgggttccggctcctcgtcgtatggttcccgttcaggttcttcgtacggttcccgttcatcatcatatgattcccgctccggctcgtcctcctacgggtctcgctcccgttcggggtcgtcttacgggtcgcgttcccgttccggttcttcatccggttcatatggcggcacccgtggcggcaaggtcaccacgcgccgcaccacaccgaaatccggttcgaccggctctgccgtgcccagctcgaagctcaccaaggacaatggcctgaatatcgccgacttcgccgtgggcgacatgatcagccacgaccagtacggtctcggcaaggtcaccgacgcgcaagacaagggccgcaattcggtaatcaccgtggacttcggctccgccggcgtcaaacgcctcatgctccgcgtagcacctattgagaagttgtagatagattggcccctctgacgaggggctgagttatataccaaataaattcacaaaaaacaagacttgtgttcttcatcactatctgggcataatgcggaggttgcgcctacgagccctgggaacaggggagaggaaaaagtagttatgaagaacaagctgtttgcatccgtgcccaatattctgttcggcgcgctgatcaccatcgcgccccagacctttgcgcacgcctgcaccggccatgacatgccgggtgcctgccactactcgcagcaggcggccaccggcatcggcgtcgtcatcctcgtgtttggcgtcgtggctttgttcgtcgccccgcagattcgcatcggcctcaatatcgccgccgcagccaacgccctgctactactcgccgtacccaccttcctgatcggcatctgcaagggcgcgatgatgcactgccgcatggttatgctgcccacgctcatcgtgctcggcgtgctcaccatcgtgttcgcggccatcgccatctggctcgactctcacgccgccaagcgcaactgatcgagcagacggccggagcccagccattccgaacgctggactccggtctcgcttattgcaaccgcactataagcaacataaggactcatcgtgccatcccatatcgcattgcgcggccttccgattgaaaacctcaaacgcaagccgttccgcgccggcgcactgctcgccgtcgtcaccatcctcgcgctgacgttcttcggcggcaccatgctgaccatgaacctcaacaccggcatgaccagtatggagaagcgcctgggcgccgaccttatggtcgtgccgcaaaacaccgcgcagaaggctgaagcgctgctcaccagcggcaatcccagcactttctatttcaccaaagacatcgccgacgaggtcatgcaggccgacggcatcgcacaggccaccgaacagacctatatatcatcgctggccgccgcctgctgtgccgaaaagctgcagatcatcggttacgacccggacactgacttcgtcatcgaaccatgggtcgcatcccagttcgaaggcccccttgaagacggtcagatgattgccggcgcaaacgtcaacgtgtccaccgacggcaccatcgaactctacggccataagtggccggtcgtcgcccagctcgccaacaccggcaccagcctcgacaattcggtgttcatcaaccaaaacaccgtgcctgatatggtcgccgcctcggccaaggtctccaagcaggtcatgcccgccgaatatgcaggcgaagccgtctccaccgtgatgatcaagacgcagcggggttacgaagcgcagaccgtggctgaaaacatcaagcgtcttgactcccggttcgccgatttggggtacgtataccccggcggcatcaccgccaacaccagaacttcgctgaccgcgcttgtcacctacctcaagattttcgtggcggtgatctgggtaatgggcgtgattgtgctgctcgccgtattcgcctcgtcggtgaacgaacgcaaacgcgaattcgcgtccctgcgcatcatgggcgccacgcgcggcatgttgaatgccatcattctgaaggaatccgccatcatcggtctgatcggtggcgtaatcggcgtcggcgcggccagcctggtgattttcccattcagttcgctgatcggcaaacaacttcaattgccgtatctgcaagccagcccggttgcggtgatcggattcattgccgtgaccattgtgtgctctacggtcatcggcatcatcggttcgctggccaccatgtggcgtctcggccggcccgaagcctacctgaccctgcgagagggggagtgatatgactgagacaactacgccgactcagctgaccacggttgagccgaccaagctccagccgaccacgccagctcagccgaacgcgccgactgcgccggattcgccgcacgtaaccgagacgccctccccggaccatctgctgaccttgacggacctgacccgccagttcgtccgccgcggcacgccgttcgacgccgtcagccacgtgaacctcaccgtcgatgccggcgaattcatcgccatcgtcggccggtcgggcaacggcaaaagcacgctgatcaacatggtcgccgggctgattcgcccgacctcgggaaccgtgagcgtggctggacgcaatgtggccgacttgggcgataaagcactgtccgtgctgaggaatcgcaccatcggattcgtgacccaaagccagaccctgctcggcaacctgaccgtgctcgacaacgtgattctgcccgcaacgatgtttccggagccgctgccgttcgcccaaaacgcagaagcaacggatgccgttgctcaggtggacgctgttgcgtcgaccgatgccgtggcacaagccgctgccaccaatgatgaagcagccgccgacctgttcatgccggatgtcattgcgccaatcacagaccgggaaaacacgccgtcaaacacggctgcgagccgtccggacctgttcgccacccgagctcgcatgctgctcacccagcttggtgtcgccgatctggcagacagctacccgcgcgagctgtccggcggtgaaatgcggcgcgtctccatcgcccgcgcgctgatgaaccagccgagcctgctcatcgccgacgagccgaccggcgacctcgaccaggagagcaccgacatcgtaatgcgtctgctcagagaccaagccaacaacggcacggcgattctcatggtcacccatgatcccgatgcactcgaatacgcagaccgggtgtatcgcatggacgccggagtgctgtccatagcctcggtgtaatatggtctgctggtgtctgccaacaggtagataccgtctggagtcatagcccatcagcgggtcggcggtaggtgatcgcaagaaaaccaacccgttcgtgttcgttcacgacgaagcgctggggaggcccggctcagcgcttgccaggcatatgcaaggcaagcgttccgttcagataacgacagaaggattaatccaatgacgaacgttcagcgttctcgccgtcaggtgcgtctgtctcgcgccctcggcatcgcactgacccccaaggctcagcgcatcttcgaaaagcgtccgtacgctcctggcgagcacggccgtgaccgccgccgcaccgagtccgattacgcggtgcgtatgcgcgaaaagcagcgtctgcgcgctcagtacggcatctccgagaagcagcttcgcgccgcttacgagaaggccacccgtactgccggccagaccggtaacgccatgctgaccgacctcgagacccgtctcgacaacctggtgctgcgtgccggcttcgcccgcaccaccgcccaggcccgtcagttcgtggtgcaccgtcacatcctcgttgacggcaacatcgtggaccgcccgtcctaccgcgtcaagcccggccagaccattcaggtgaaggccaagagccagaccatggttccgttccagatcgccgccgaaggcgtgcaccgtgacgtgctgcctgcggtccccggctacctcgacgtgaacctgccgtccctgaaggccactgtgacccgtaagccggaggtcgaggagatcccggtgcaggtcaacatccagtacgtggtcgaattctacgcccgctgatccgggccctctggtcaacaaatccaggacataccgctcgaaccccgcgcttctttcgagaagccgcggggttcctgcgttgtagggcgattactggccgcacaccgcctgacgaatcatcgtcgcgtacgcataggcaccggtcatattcggatgaatgccgtcatcgttgaggtattcgctatgaccttcgctatacccatgccaatcgatgatgcccacgttcttgttcttcttggcggcctcacgcagcatcgtattgttgttgttctcctgccacgggtatggcatacggatggtgatgaagtatgtcggcttgccgccggtcaggtcaatgagctgttgcacttcctgctcattcgaaatcacgccgttcgtgccgaggccaaacaccaccacactgccactgtggccggcagcggtgtcctgctgatacacatccaccgcctgcggcatctgacggttcggcaggccatcgataaaagcgttcgggaatgcggcctggatggcgtccgaagtacccgacgtcactgaatcgccgaccatcatcatatccgcgttgcagctttccgttgccggatcataggcgtacttcgaaatgtcaagattgtttggcaccttttccgcaatcggtttgatggtgggcggctgagaatccgaaccgttcttattcgcgtcagcggtattggtttcgccgttcgcggcattcgtggcagaagactcgggctcgggcttcgccggtttcttgaccggcttggcgggtgccgcgagttcggggcgcagctgaatggctcgcgcttgagcgatgccattccaatccaccggtgcccacgtcagcaccacaacggtcaccaatccgataaccgacatgacccacgcgcccgggcgcagctggtagccggctttcggcagcggcttggcatgttggctgcgaggcatctgcaccgatttacgggccgcctcgaccagctggtagaaggcttccgacgccgccaacaccacgatggcctcaagaacccaaccccaccacggcaacgcctgcgttcgtgtcgccgggttcatgaactgcagcagcggataatgcatgacgtacagcgagaacgatcgcgacccgatatagcgtaggggagcgcaacccagcacgcgcgaccagattgagtcattgttcacggcacaggccaaggcgcacaacgatatgaacgcggtaatcaggtacccgccttggtacatgtacgacagatacccgttggcgaaccagaatccggccagcagtgccgccaaagccgcggtgccaagaacattgcagacgatagtgagacgggcgcccgtcttgtcgccggcctgacgtccgatctgcactgtttgcgaagccgctccagcttccgcaacttccgtacctcgcgaggaaggcgcaatccagatagccaacagcgcgccggcggccagctcggcgagacgagtatcggtaccgtaatacacgcgggaggtattggccgggtcaaacagcagcaccatggcggcggtggaagcagccatgatgacaagaatcgccatggagcgcacccatttggacttggtgattttgccgagcaccaccatcagcaacggccaaatcagatagaactgcatcgtcacgcccaagaaccacagatgggtcagaggagaaggcaatccggccgcctcgaaatacggcaccttgcggaagatgtacacccaattgctggcgaacaaggcgctcggcagcgaatcggaaaccactttctgcaacaggctgggagcgaacatccaagtgagccaaggcaccacggcaatggtcgccagcatcaccggccataaacgagtaatgcggcggatcagatatcggccatatccaaaggacccggtgcggtccaccatgttcagtactgaacgtgtggcaagaaaaccggtgataacgaaaaacatcgtcacgccaatgaatccgccctgcaatagcgacgggcgggtgtggaatgctatgactccaagaatcgccagagcgcgcagtccatcgatacccctgaaatgggcaggctcagacgattgagatggtgcaggtttcgaggttatgctcatagtaccctaagtgtactctcaggaatcgtcaggtatactacccggattacgcatatctcaggtagtgacctatgccgttatgacttatgacttccggcagcccgcaccgaaaccgccggaatggtgacataatcggaaccatgattcttcatctgcatttggtccgtcacggacagacctatttcaaccgatacaaccgtctgcagggatggtcgaattcgccgctgaccgagtcgggcgtcgctgatgccgtcaaggccggtgagcgactgaaaggattgacgttcaccgccgcctactgttcggacaccacgcgtgcccggcagacggccgagaaaattctcgacatcaacg

SEQ ID NO: 1698 - DNA, 3329 bp, Unknown
  MAG_14  MAG No. k141_6696
tcggctttgcgtttgagatacatgaggagcccctttccgaattactgctatatcaatgattttacactttcatgagcgagttttctaccgtctggcacatttcatgagcgagttttcggcggtttttcacatttcatgagcgagatggcgggagatgccagctgccagtccgccggtcatccatcaatcgtccgcagattgtccgtctgttgacgcgggaaacatgcctgcgctataactgtgcgcggtatgaagggaacaggtacaaacaatatggcagtaacacacaccgtggcagataccactgcggcaaccgctatgacgaacgctgtggcagacatcgaacaggaaacaccggaaatcgagaaggaacgccagcttgccggagtcggaaccggggccggagcagggacgaacaacaataagaagccgcatgaccatgcgctggccagcatccttggccccgcgttcgtggcggccgtggcctacgtcgatcctggtaatgtggcggccaacatcacctccggcgcacgatacggctacctgttggtgtgggtgctggtgctcgccaacgccatgagcgtgctcatccagtatcagtccgccaaactcggcatcgtgaccaacaaatccctgccggaactgctgggcgagcgtatgagcgatgccggccgcttcatgttcttcatgcaggccgaggtcatcgccatcgccaccgatctggccgaggtgatcggcggcgccatcgccctgaacctgctgttcggatttccactgttcatcggcggtttggcgattggcgtaatctccacggtgatgctgtggttccaaggcggcaagacacagaccacattcgagcgcatcatcatcgtgatgctgctgattatcacattcggcttcatcgcgggtctgttcgtagccccgccgaaccccggcgaagtggtcaaaggcatgattccacgcttccaaggcgccgactcggtgttgatggccgcctcgattctgggcgccaccgtgatgccgcacgccatctacctgcactccacgctggtgaacgaccattacgcaggcggcgaaaagccgtcaatcaaaacgcagctgagaggctcgaaaatcgatgtggcctgggcgctgttgctggccggcaccgtgaatctggcgatgctggtgctcgccgccaactcgctgcatggcatgtctggcacggactccatcgacggcgcacagcgggcgatcacgcaggtgctcggcccggtgatcggcacgatcttttccatcggcctgctggcttcgtcgctgagctccacatcggtcggcacgtacgccggctcggagatcatgcacggtctgctgcacgtcaacgccccgatgtgggcctgccgcgtggtcacgctggtgccggcactgattgtgctgtggttcgccaaggacccgactcaggcgctggtcatcggccaggtggtgctttccatcggcatcccgttcgccgtgattccgctgatgcggtacacgcataacaaggaactcatgggcaagtgggctgatggaaccgtcaagcacgtgatctttatgatcgtcgtggcgctgattgtggcgctcaacgtgctgctgattgtcctgacgctgatgggcagggcgtaatagactccagctgaaatcctgcgatagcacaacataataagaagccccggtgttggaaaccggggcttcttattatgttaagaatggttgaatctgccgtcagttcgcagccatacgccgcgcacgccgttcgcgcagcgcgcgcaaggaaataatgtctcgcgtacgaccggcaccgtcgcccttgacgccgaagaacaccatcaacaccattgccagacagatcattgcggagatgcgcagcgcccattgaatgccaaaaatcgaagcggcgacggcggaggcgccgccctgcttatgcaaagcggcaaacgtttccatcagaatcaccaacacgggtgcgcccacagcgcccgcaatctgacgcgcggtattcgtcaccgatgatccggcggacacttcgctcggcccgttcaggcaattcagggaccacgtggtaatcggcatcagcaggaaacccatgccgatctgacggatgaactggcagatcgatacccaccagatccacgtatccatcgccaccagcgacatgcccaaggtgccaagggtcaacacaatcgaaccgaacaaagccacgggtcgtgcgccgaatcgatccatcgcacggccgccgaagaactgggagatgcactgaccgatagcgcccggcagcatgatcagaccgctcatcgtggccgaatagccgcggtcagtctggatgtagagcggcatgatgaccagaatcgaactgaaggcgaaaaatgccagcgacgcggtaatggtgccgacggtgaacgaagggttcttcagcacttccaagtccagcagcggcggctgggggagtgccgactcgtccttggctacggcctcgcgataccgcttgccagcgcgcaggttgcgcatcacaaaccacacgatgccgaccagtcccacaaccatcggcccccacgtgaccggtgccgcgaatccataggtctctgaattggtgaagccgaacataagcccgccaaagccgatcaccgacaggcatgccgagaagaagtccgcgcgggccgaagggtcgtgtgaaccgaaattatgcagtccgaacatggccgccagcagcgagattacgccaatgatggtcatggtcaggaagatcgagcgccagccgttggcatcggtctgccagccgcccaaggtggggccgattgccggagccacgctcatggccatgcccaccgtgcccatggcaaagccgcgtcgggacagcgggtagatggagaacacggtgatttgcagcaccggccacatcacgcctgtgccggcagcttcgagcacgcgcccgaccaacacccatacgaagtttggccccaaccatgccagcacggagccgattgtgaacaccgccatcgagcagatgacgatctggcgggtggagaagcgtcgggtcagaaacgcggtcagcggcaccatcacgcccatgaccagctggaacacggaggtgagccactgcccggtggttacggagatgtggaattcggaaacgataatcggcagcgcggaactcagctgcaactgcgtgaagttgcccacgaaggtaataaaggtcaatatcgcgatggagatgaacgccgcccggctgagtttgccgtctacatatgattcctcgcggctcagcacccgctgcagttcgccgcgacgatttttgattccccgagctccgttca

SEQ ID NO: 1699 - DNA, 3596 bp, Unknown
  MAG_14  MAG No. k141_8329
gtctcccacgccaaccgcatcatgcacaacctgtgtgtggacgtgtggatgtacatctcccgtggagtgttcgcccaggtgccggtcaagggtgccactggttcctccaccatgccgcacaaggtcaacccgattcgtttcgagaacgccgaagccaacttcgaaatcagctgctcgctgctcgacaccctctccgccacgctggtggaatcccgttggcagcgcgatctgaccgattcgaccacccagcgcaacatcggttccgcgctcggctactccttgctcgccctgaccaacctcatgggcggccttgagtccatccacccgaacacccacgtcatcgagcgtgagcttgatgagaactgggaggtgcttggcgagccgatccaaaccgccatgcgcgcctgcgagctcaagggcctgccgggcatggacaagccgtacgagaaggtcaaggagcttatgcgcggccacaccatcaacaaggaacaggtcgagcagttcatcgaccagcagtccttcgacccggaaaccgccgctcgcttgaaggctctgacccccgccacctacaccggtgtggccagccagctcgtcgctttcgaccgctgaaataggtgcgatgcgagtccctcgagcccatcgcatccaccacactactgcgctgagtcacaaaccaaaccgcaaactgaaccgaacaaggacaggcgtcaggtaaccatttcatgactactgaacaggagcagtccactacggaagatcgcccggacaaggcgacctcctccactaccgaccggccgatcgcctctggtgacggccggtcggccagttttgctgtcagcggaccggacagcccggcaaccgacgacagcaacgattccggaccgtacatcgacgacatcgctccgcgccgcacgcgcgacttcggcgatctgacccgggccggtctgtcgctgttgatggccgccgtggtcatggtgttcgccgtgtatctgggcggcatgacgcgcggcgtcgaatccgacgcacacaccgcagcccaggtcatcaactggttggctgacttcccctccaccgtgctgacgcagctggccaccatcgtcatcgtgatcatcgtgctcgctcaattgctactggcccgggaatggctgcaggccgcggtgtccgcgctggccatgttcgccggctacggcatggtgtgggtcgtatcgacggcaatcagcagtctgaacgatttcaccctgccaatggcactagtctcagccgccacctcatacggctccgggctgttgcccgacatctacgccggcatggcgtccttcctgaccgccgccgggccacgccgcacccgctccacggtcaaatggagctggaatatcctgtatgccatcgctgcggtgatggtggtgctgtcgtggcattcggtcaccggcatgctggtgtcgatggccgccggccgcacagtgggcatgctgatccgattcgtggtcggcacgcagaacaagggcgtgtggggccaagatctggtcgccgccctgaaaggcatcggactggacaccgcctcgctgattcggcatcaggagcccggcgtcggccacggttcactggccgtcacgctggacgacgatctggccgaaggctcgcgcatctacgatctggataccacggacaaccgtcgtttcatcgtttccgtcatcgacgcgcagacccataccgtcggctatctgaagcagttgtgggactgggtgcgtttcaccagtgtgtccatccgacgtgaccgttccgtgcgtgacgccgtccagcatcatttcgccatgctgctgggtctgcacaatatcaaactgcccgcgcccgcaccctacggcatcgccgataccgacgaatccgcgattctggtgctggatgcacacaccatcgaactgcccgccaacctgaacacgcttaccaaggcggatgccgtggcctacatgcgctacctgtccgtggcgagccggcgcggctatacgcaccggcgcatcacgccggacacgctcgcccggcttgaagacggcaccgccgtgattgccggctggctcaacggcgacaacgcttccggtccggccaacaccgcgctcgacaaagttcagctgctagtgctgttcgccgcgctgatcggcgtggaaccggcggtggaggccgcccgcgaggcgtggggagacacgactctgacggccttggccccgttcattcagaaggtcgcggtcccctcccccacgcgcgcgctggaatcctgggacaagcagctgctcaagggcctgaggagtcgtatcaccgcgctggctgacgaggagacggtggaatccgccgaaccggtgacgctggcccgattctcctggcgttcgatgatcaccatgctgctggtcatcgtggccgtggtcgtggtcttcacccaactgaagcccgaggagatcatcaccgcgctgaccaacgccaacccgttgatggcggtggtgacgctcgcgttcggtgtctgcggctggatcggctcgtcgatttcgctcggttccctgatggcgcggcacaagcgtgacaatatgggcgtcttcatgagccaggtggcaggcggcttcgccaccgtatccatgccagccggcgtgggcccctcgttcgtcaacctgcagttcctgcgcaaatccggctatcgcaacacccaggcgaccgcaattatgagcgccgtgctcgtggtgtattacgccgtgtacttctccatgctggtcatcatcggcctgttcaccggccgcaacatgttctccggcgcaatcccgacaaacacgttggttatcgtgctgggcgttgtggtcgtggtgctgtccattgcgatgatgattccaccgttgcgccactgggtgacccgtcgtcttatgccgctggccaagacgtatatcaaccagctgctggacgtgctttcccagccccgacagctcacagtcagctgcctgggcgcgctgttccagaacgcgaccactgggctcgctttctgggcggccctgcaagcgttcggccattcatcgaatccgatcgaaacgacgttcgtcttcctgctggcctatgcattgggttccgcagtgcccactccaggcggtctgggcggtgtggaagcggcgctgacattcgcgttcgtggcggtcggagtgccgcagggcgtggcgctttccgccactttgctgcaccgcgtggtgttctactggctgcgcattccgctgggcgcggcggccatgaagtggcttgacaagcataatcttgtctgattcgtctattttcatacccccttcggggaaatagatgtgaaaacccttataaaacgcgggttttcgctgaaacatgcgctagtatcattgatgacaacatggactaagcaaaagtgcttgtcccctgacccaagaaggatgctttatggcatacaacaagtctgacctcgtttcgaagatcgcccagaagtccaacctgaccaaggctcaggccgaggctgctgttaacgccttccaggatgtgttcgtcgaggccatgaagtccggcgaaggcctgaagctcaccggcctgttctccgctgagcgcgtcaa

SEQ ID NO: 1700 - DNA, 3060 bp, Unknown
  MAG_14  MAG No. k141_9214
gcgcgggcgatggaaatcagctggcgctgaccttgggacaggccggatccatcaccctcaagcaccgtgttgtatccctcgggcagcatacggatgaagctgtccgcattgaccagacgcgcggcctcaatgcattcctcatcagtggcgttcagacggccataacgaatgttgtccatcacggtaccggtgaacaggttcacgtcctgcaacacaatgcccaaagacctgcgcaaatcaggcttcttgatgccggccacggagatgccatcatacagaatctgaccttgctggatatcgtagaaccggttgatgaggttggtcacggtggtcttgccggcaccggtggcgccgacgagcgcgatcttctggccgggcttggcgaaccaggtgatgtcgtgcagcaccggcttgtccgggttgtagccgaaggtcacgttggtgaagcgcacgtcgccgcgcagcagcgtataacgcccatcaggcgaggtgatcgcctgctccttggccttcatcgccacctcgcaggcggaaccgcgcagcttttcggcggccttcagagacctcgtaccatcgtcgccgatctcacgcttccacgcccagtggccggtctcatggtcgacttcggtcatggtgcggccgtccggcccaagttccacgttcacgagcgtcacggtgcccttgtcttcctcgatgggttcgtccatcaacttgaagatgcgggaggcgccggcgagcgccatcatcaccatggtcagctgctgggagacctggccgatcgggttgatgaacgagcgggatagggtcagcagggagacgagcgtgccgagggtgagcggcttgacaccggtcagaccgatgtcattgacgccggccagcgaaacggcggcaccgacgatggcgagcaggatgtagagcagatagcccatattgccgacgaccggcatggtcacattgccccaagtgttcgcctcggcggacgcctcaaagagttcctcgttcttctcatcgaaggtcttctgagtggcgtcctcatggttgaagaccttgatgaccttctgaccattgacggactcctccacgaaggcgttcacgtcgccgatccactgctgctgcttgacgaagtagcggccggaacggctcacgatcttgcgcacgatgaaatacagcagaacggtgaacacaatcacgaacgcagtgaacgggattgacagccacagcatggacagcaatgccgcaatcgcggagataatcgaggagaacatctgcgggaacgactgcgagatggcctggcgcagcgtatcggtgtcgttggtgtagtggctcatgatgtcgccgtgctcgtggctgtcgaagtagcggatcggcagcttctgttggtgggcgaacatatcgtcacgaatcttcttgagcgtgccctgttcaacggtgatgatcagccactgccaagcccaggatgtcacgataccagccacatacaggcagcccatcagactgatggcgcgtagcaacggagcccagtcggggttcgattcccccaccatcggcaggatgtaggtgtcaatcagcgattggaggaacagcgcggatccggcctgcgcggcggcaccgatcaggatgcacaccacgatggcgataacgcgcaatttgtattggaagatgtagctgaagatgcgcttgatggttccggggtcggctttgcccatgtcaggctcgcgattcttgaaactctggtcgttgctcatcgtgcttctccttccttggtatcggctgcattggtatcagctgcgctggtatcggccgtgggcatggtcactgtcaccgtcacggtttcggacggctcagcggtagatgactcagcagcctgtccggcagcggccagttctccggtcttagcctggttcttggtctgggattcgtaaatggaacggtattcatcacaagtggtgagcagttcctcgtgcgcaccggaggccatgatacggccggaatccatcaccagaatcatgtcggattcctgcacggaggccacgcgctgggcaatgatgattttcgtggtgtccgggatctcgttgtggaatgcggcgcggatcagcttgtccgtcttggtatcgacggcgctggtcgaatcgtcgaggatcagaatcttcggcttcttcagcagcgcacgggcgatgcacaggcgctggcgctgtccgccggacacattggtaccgccctgctcgatgtacgtgtcgtacttgtcggggaattcctgaacgaatccatcggcctgcgcgagctgcgcggcatggcgaatctcctcatcggtggcgttcgggttgccccacctgaggttttcggcaatagtgccggagaacagcacgttcttctgcaacaccatggccacctgatcgcgcagcgcctcgatgtcatagtcgcgcacgtccacgccgccgaccttgagcgagccagagctcacgtcgtacagtcgcggcaccagctgtaccagagacgactttgccgaaccagtaccgccgacgatgccgatggtcatgccggagcgaatcttcaggttgatgtcgtccaacacgggcttttcggaactgtcggagtagcggaaggtgacgtggtcgaattcgatggagccgtcggccatgtcagtcaccgggtgagccgggttctgcaccgtgctttcctcctgcagcacctggcagatacgctcggcagaagcctgagaaataatcaccatgacgaaaatcatggacagcatcatcatggccataagaatctgcatggcataggtgaccagcgaagtcagctcgccggtggacaggcccaacgccgcattattgccggaagcgacgatctgctgcgcgcccatccatgagatgagaatcatcgaggcgtagacgcacaccatcatgatcggcatgttgaagctcatgatgcgttcggccttggtgaagtccttgaagatgcgctgggagatgcggccgaacttggagacctcgaaggattcgcggttgtaggacttaaccacgcggatgccctgcaggttctcgtcgaccacgttgttca

SEQ ID NO: 1701 - DNA, 2967 bp, Unknown
  MAG_14  MAG No. k141_9411
catcgatcccaaaatcaaagcccgggactcaccatcccacaccggcccaaacccatgctccacatgttcgctcatggtttccattctaagtcgggcgattgagcgcacgaggcaatcaggccgagaactgtttgccgaattccgagaagagctgacggcgggcgaagacgagcaggccgagcagcaccagcagggagaccagcccgctgaccatcaccagcacatcccacggagcccagccgagcggaatgaacgtcagaggcagcagaccggcgacgatgtcgaacgccagatacttggcgtactggtcaatggccttggcccgcagcacgataagcagcaccacgtcaaagaccagcgaaaccagacacgtgatcggtatgacgaacatggtgacgacatgattcatcgtcgccacaaaccagaccagcgcaatcgccagcatgatatagaaatatcgaaacatgaggcgaagcggccgcggcgcgtgcagaatcgcactgttgatgaacagcacgctgatgatcagcgcggccgccgatgcactggcaatcggtatcggccacgaaaacagatagctgaagaagccatgcagcagcagaatcgcgccggttacaaacgtgatgatctccaccgccaaacgcctcggacgcagatagatctgctgcgcggggaatgcggcgggagaggcctcgccgtgcaattcgttctgacagagtgggcaacgggccatatcgccggtgaaatcgacgttgcaggcatcgcaatgcttcatgccgacgctcctttctccacatgcgcgccggcgatgttcatacggccgctgatgccctgcgcggcgagaatccgacacaggttcttgatgacgttcagatcatggtagacggtggagatgccgatgctcaggtcgtcgccaaacgagcagaccgtgaaattcaggctggccggtgtggtgaggaagctcaccgaacgcacatggcgcgcgagtcgttcgtccaaggtgactcggccaaggttcgagacggtggtcgtggtctcgcggtcggcgatgaaccgggccagctccagcacccagtccttggcaggggagggcgcgagacgcagcgccggattcttttccagcgcaatcatgcggttcatatgcgattcgacgcgctcgcgactggtggcatggtcgagctgctcctgcacatggcgggcgatgtcggccaacggctcatcggtcagcaatccacccataccgttgccgtgcgcggtgcgggcggcggactgctggccgtcgccggtcgcgtctgggcccgttgcggaagttttcgcggagtcctcatcggcttcgatatcggccggcgtgtacgccacgtaagtcatgccgtagaagttgcgcacggtctccgacctgaagaaggcgcgcaagtcgaccggaatatccacgcgaatcgcgcgattgcgggcgcgcgagggcatgacgtcgcgaatcgcgcacagtatcgcggcgatgaggtaggaggtgaggctcactccgcactgatgcgctgcaccaagcaccttgctggcgctgacgtgatattccatgaacgtgggcgcgtcccggtcgatggggccggccagccggtagatcttcgtgccgggcgcggcaccggccttgtctttctcgtagtatttgtcgaagctgttttcggctttgtcgctgtccgagccgtcgtaatccgaaggcacgcccggcacgtcgtaccgctcggcgatgtaggcgtgcaacagtgacttgaacaggttgatggcgccgcgaccgtccgaaatgatgtgcgagacctcgagattgacacgattgcggaaataactcacgcggaacagcatgcttttgggcccgtaatgcagtcgcgagcatatcggcagatgttccggctccactcgaggcttatcatccgactgttcgaggtaatgccagaacatgccgttgagcaggtgcacgttgaagctcgggaactgggcgatggcatggtcgagcgcgtgctgcaggatgtccggggcgatgtcgtccgccagctcggccgaatagcggaacacggtctgcgaggagcggccagcctgggaggagtagaacttgccgatgttgtctagtcggtaccaagtacgtcttgccatgcgtcgcctccctccgatgcgttggcgctggtgccggtgccgggagccggcaccagcggtgtgtcgtcgaggaaatgctcgatgatccggtaagtggtggacaccagccctacggccgacgtgttgagcagataaccgtggatgccgtcgtgaatccggtaacaggagacgttgtcgttcaccaattgcagacgacgggcgtacgcttcgtcctcgtctctgagcgggcagtattcggcggacaacaccagcgtgcgcggctgattgctcaggtcatgcgcggtgagcggcgcgaaatacggattggtcaggtcggccacggacgaacggtacatgtcgatgtagtcggccatgtcctgtgcggtgaggatgtagtcggtgccgttggtccgcaccgattcgaacgggctggtctcgggattgtagtcgttgccgaccaccgggtaaagcagcatctgcgtgcgcggcatgaactcgccgcggtcgcgggccatgagcgagacggcggccgcaagattgccgcccgcgctgtcgccaaacagcacgatgctgtcgggatcgggagcggggtcagacatatcgcccccgctggcgggaatgtctctctggtccgcaggaatatcgctcccgccggcaggggctgtcggcaaagccgactgggggtggccatcagcggcagaacctccacccaccccagaaatcggcaattccccagcaaacagctgccgggctacctcatagcaattctcaacagcagtagggaagcggtattcaggagccagccggtactcgaccgagatcacacggcgttgcagacgtacggcc

SEQ ID NO: 1702 - DNA, 30122 bp, Unknown
  MAG_14  MAG No. k141_9428
cagtaaaggaggaacaatgggtcagggtcaatcatccgtttttgatctcgcggcagtggctgcggcgtccaatggggggaacaacgacccgctgctgcctccggcacgattcatcggcgatccgcagaagccgagtcgtatgccgtataacaagtacgccgcctacgacaagcagatcccgtttgattacccggagcgcacgtggccgggcaagcgactgcagcgcgcgccgcgctggtgctccgtcgatcttcgcgacggcaatcaggccctcgtcaacccgatggattccgagcgcaagctgcgtttctggaacctgctcgtctccatgggattcaaggagatcgaggtgggcttcccgtccgcttccgaaaccgatttcgacttcatccgtatgctcatcgagcgtgagctgattccggacgacgtgaccatcgtggtgctcacccagtgccgcgagcacctcatccgccgtacttacgaggcgctcaagggtgccaagcgcgccatcgtgcacttctacaactccgtgtctgtgctgcagcgcgaggtcgtgttccgcaagaacaaggaagagatcaagaagctcgccaccgacgccgccgaactgtgcaaggacctcgagaacgaggccaagggcatcgacctgtactacgagtactcgccggaatccttcaccggcaccgagccggagtacgccgtcgaggtgtgcaacgccgtgatcggtgttatcaagccgactcccgagcacccgatgatcatcaacctgcccgccaccgtggaaatgaccacgccgaacgtgttcgccgacgaagtggagtacgtctccacccacctcgacgaccgtgactccgtggtgctctccctccacccgcacaacgacgaaggcatgggcgtggccgccaccgagctggccgtgctggccggcgccgaccgtgtggaaggctgcctgctgggcaacggcgagcgtaccggcaacgtcgacttggtcacgctgggcctcaactggctcacccaaggcatcgacccgcagattgacctgtccaacgtgcccgagatccgcaagacggttgagtactgcaaccagatcaagatctccgagcgtcacccgtacgccggcaacttcgtgttcaccgcgttctccggctcgcatcaggacgccatcaagaagggtctcgaggcccgtcaggtggccgccgagcgcgctggcgccgatctcgacagcttcgtgtggcttgtgccgtacctgccgatcgacccgaaggacatcggccgcacgtacgaggccatcattcgcgtcaactcgcagtccggcaagggcggcatggcctacctgctcaagaccaaccacaatcttgacctgcccaagcgtctgcagattgaattcgacaagatcgtgcaggactacgctgacacgaccaagaaggaagtcaaggacgaggatatctggcgtctgttcaaggacgagtacctgccgatcgaacagtccggcatgaccgccgccggtgtggttgtgggcgatactcatgacgcctcgctcgcgccgtggggccgcttgaagctgctcaaggtggccgtcagctccggtgaggatggctccgataccgtgctcaaggctcgcctgctcgaccgcggcgtgaacgtcggggtcgatgcgcccgtggagcgcgaggtctccggcatcggcaacggtccgatcgccgccttcctcaacgccatttccaactttggcgttgacgcctcgattatggattacgtggagcacaccatgtccgtcggcaccgacgccatggccgcctcgtacgtggaatgccaggtcggcgaggccgatgatgcgcagatcgtgtggggcgtcggcatcgattcgtcgatcaccaccagcgctctgaagtcgattatctctgccatcaaccgttcccagcgcaagcgctgagcgctaacaacaaaacaaagctccctctgattgcatcagagggagctttgttgtctgtgcttacttactactgggtgacgccgttggtgccggtgttcccgccggtgcctccggaattaccattatcgttgccggtattgttcccgttgttcccgccggtattgccgggattgttgccattgttgccattgttgccattgttgccatctccgccggtagtggtgccgggataattcggacactcggtggaatagctcggattggcgaggcactgctgggcgaactcctgggcctgctgttgcttcttggcttcctcttcggccgccttctgctgtgcgtcctgctcagcctgcttctgcgcgtcttcggtggactgcttgttggtgttgttggacaggccgctgctctgtcccttgcccaagccccaagtgccgtcgggtccaccgatcttgccattgtctttagcggtcgggaactgctccacctcggtaccttgcaaggcctgagccatgaactcctggaacaggtgggcggggtatccagtggaagagatgccgtatccggagaaggccggcaccgcctgcggattgcccttatcgtccgggttccagatagcccacacattcatcatgctgggggtgtatcccacgaacgacgaagccatttcgtcgttggcggtaccggacttgccggcgatgggtcggcccagcatgttggatgtgccggccgccgtaccgtacgtggtggtgccctgcatggccttctgcaccaaagcgcagtcgttggcatcgaacaccttggtgcctttgctgggcgcgttgtacatgtccttattgttggaatcaagcactttggacaccatgtgcaaggtgctcttcacaccattgttggcgatggtcgaatggccttgcgccaaatcccacacggtcagggcgttgatgcccagcacgttgtacatggagttttcatcgatatcgccctgaatgcccgcttcatgggcgattgcggccgtgcgcttcggcgtcagatgctcattgacgttcatgaacaccgtgttcaccgagttggcggtggcctgatacagattgatgttgccccagttgttctccagagcgttattcacctcttgatccaagccggtgaagtgctggtgggaattgccgttgaacaacgtatcgaagctgacgccggattgcgcggcccccagcaaagcgaacggcttcatagtcgaacccggttcgaatacggcctgatcggcattgttgagctgcttggacagataatctgaaccggcgtatacggacaatacttcaccggtcttcgggtccagcgctatgccgccgatttgcagggattcaggcatgtcgtccagacgggtgtcgccgatggactgcataaggtcctgcttgctcttgtcgatggtggtgatgatcttgtatccgccggtatccaaatcctctttggtaaaggccttggactgcaccagctcacggcgcaccatatccagcagataaccgttcggccccgcgtattcgttttgctgcgccaccgcggcagtctgcgggaacttggcatcagtgtgctgcttggcagtgatgtaaccatcctcctgcatgatgttcagcacacgcttgaagcgcgatttggccatatcggcgttatcggccggatcccacgtggacggtgacggaataatgccggcgatcatcgccgcttcagacagcgtcagatccttggcgtccttattgaagtatgccttggccgctgcctggatgccgtaggagttgcggcccagatagatggtgttcatgtaattgcacagcacctcgtccttggactcggtttgcgcgattttgatggccacgatggcctcgcgcgccttgcccacataggatgtggtttcgcccatgtaataccgctcggcatactgctgggtgatggtggaaccaccttggcgcgtgcccttggtcacattattaatgaatgcgcgggcgatgcccttcagatcaagacctttatccgtgtagaacgtacggttttcggacgccacaatcgcgttgccgatgtagtccggcagcccctcgcaagagatgattgaacgattctgttccgcgtaggagccgatcgcggtggtgccgtccgcgtaatacacggtggttttctcggccaacgcgaacttttcgggttgcgggacctcggtggtggtgtacaggtatgcgaatactgcgataccggccagcaagcccagtccaatcagggagaagaagatgcccagcacccatttcagtacacggtgcttgccttttcctgtgttctttttcttcctgttcggggctcgatggctattggaagccttgtggcttgcgtggcgggaacggctctcctggggcgtataggggccctcctgtgcggagtggtcggctctgctttgcgcggtgcgcggttgcctcagagcggggccattgcctcccgaatgtgcacgacgagtataagaagccatggtgtccaccgtaactgttggccttgaacaatcgtttgacgtgagcgtaaccacacgcatttatgccggtatttttccggaattcttacaattgggcacgttccttgatgctgcatgaatattgcctgaatgcgctggttggcctgccgtgcgacccggcgcgcacgtttcgtgtcgctgcgctggtccatacgtctccatagacttatccccagcctccacgcggcgctatgtcacccaactcccccagggcaggaatgcagcaagggtaagtggcctctgacgggtgcgtggaggttttccatttgtgcggatttggccgtgagctggcacgagcacggctccctgtccggggcgcggccgtacagtcgaacgtatgaatgacgcacagacccctagaattcgcgacccgcatgcggcggtcaatctggtcggctcaggcgcagcgcagcctgactcgtcgtcgaacgttgttgacccattggctgcgctcggcccggtctccggttcagatgcatcggcatccacatcaggctccttaggggatttcaggccgctgggcatggacgatgcggatggggcatctgatatcgaccgtggcttggcccggcttgacccgcttaccgtgcgcccgcgaatctccagccgcgtactgtgcgtggtattcggtctgctcctgatcgctattggcttcggcgtgtggtgggggtgcgtgtttaccgaaaacggacaatcgtacgacgaactggtctggaaaaacctgcacaacgatgtaccgtcctggaccaccggcatgatgaacgccgtcgcacaatcctggctggttatcgctgtcagctgcacaattgccgcaatcggcattattacggcgctgattcgacgccgctggtggttggccgggcaaatcgccgtgttcgccgtggtctgcttggccgtcacccgtatcaagggtctgttgccgcgtccgttcatcatcaacactgaatcgcctgccgctaattccgcgccttccggacacacgatgctggccgcagcctgtgcggtgattctgctgcttaccgtgcctcgcgcggttcgagctttggcgggcgtcatcggcgtggtttgggcggcgaccgtcggtgtctctgtgatatacgggcaatggcatcgcccttcggatgtggcgatgtccatcctgctggtggcgggattggccctgctcgctctggcggttacacgcaagtccggcatggacgagccgggccaccgcgtctcctcagtgagtgtgcagatcgtcggcagcgtgttgattaccgggggcctgctgttgctcgcctacagcggttatgtgatctggcaggtggtgccggggctcaatgtcagcgccagttgggcggttcagggggcgaatgtcagcgctgttgtgggcattacgggtgtggccatgctcgcattcggactgttgctggccctacgtcagatcactgcagcgcccttaagcaggctgggcctgatcggcgctccgccggcaccgcccaaacggtaaaacatgaggtgcgaacggctgaatttgcccggcacaacggcggaatttggcagttggatatgattcatgagtattatgacgccagaaacgtcgtgtgtttcgcgcaatacataaggagtgggtatggctaccaaactggtgattgtggagtctccgaccaaggcccacaagatcggtgactacctgggcaaggggtacaccgtcatggcgtcggtcggtcatatccgcgacctcgcgcagcccagccaggtgcccgcggcagacaaggccaagttcggcaagttcggcgtggacgtcaacgacgggttcaagccgtattacatcgtcgacggcgacaagaagcgtacggtcagcgaactcaaatcggccctgaagaacgccgacgaactctatctggcgactgatgaggatcgcgagggcgaggctatcgcgtggcacttggtgcagaccttgaaacccaaggtgccggtcaagcgcatggtgttccacgagatcaccaagaacgccatcaacgcctccctgaacaacacgcgcgacgtggacggcaatatggtcgacgcacaggagacccgccgcatcctcgaccgtctgtacggctatgagctgtcgccggtgctgtggcgcaaggtgggcccgggcctgtccgccggccgcgtgcagtccgtggccacccgcctgatcgtggaacgcgaacgcgaacgcatggcattcaagcgtgtgccgtactgggatatcgtcgccatgttggccgcgcctgacgcgctgggggagcgtgccgaattctccgcccgcatgatcgcgctcggcggcaagcgactcgccggctccaaggatttcggtgccgacggccagctgaccccggacgggttcgcggcgaacgttcgccagcttgatgaggctggtgccactgccgtggctgaagcgctgaggaccgccgatttcactgtgatgtcgatggaaaccaagccgtaccgccgccgcccgcagccgccgttcaccacctcgaccttgcagcagaccgccggcaatcgcctcggcatgggtgctcgcgtcgtgatgcgcgcggcccaaagcctgtacgagaacggctacatcacctatatgcgaaccgattcggtgacgctgtcgcaggaggccatcaccgccgcccgcaacgccgtctcctaccatttcggcgacaagttcctctccgccgagcccaagcagtacgccaccaaaaccgctggcgcgcaggaagcccacgagtgtattcgcccggcgggctcgcgcttccacgacccggatgagctggcttccaaacttcccggcgaccagctgcgcctatacacgctgatctggcagcgcacgctcgcctgccagatggctgacgccaccggctccaccgccaccgtgcgcctgtctgcgccggccggccccaccgagggcgaggccgtgttccaagcgtccggcactgtcatcgaattccccggctttatgaaggccacgggggaggggcgcaagcccaaagccgccgctcccggcgctggggctggctcggaccaggctgctgccgccggcaagacggacgtcaaggccgtcaggggtgacgcctccgaatccaacacctccctgccgccgatgagcgtcggccagcaggtcgaggcaagcgacatcgaaccggacggccatgaaacccagccgccggcccgttataccgaggccacgctggtcaagacgctggaggccaaggagatcggccgcccgtccacctacgcgagcatcatctccacgattatggatcgcggctatgtgtatgagcgtggccgtgcgctgatccccagctggctcgccttctccgtgaccaagttgctcgagacgaacttccccaagctggtcgactaccagttcaccgccgagatggaaaacggccttgaccgcatcgcccacggcgaggaatccggccgcgactggctcacccacttctacttcggttccggcgagggcgccgcccgcaacgccgacgaggcgcacgaaggcctgcaacagcaggtcgcgcagctcggcgagatcgacgcgcgcgccatcaacaccatcgacatcggcgacggcctgcacgtgcgcgtcggccgttacggcccgtatctggaagacatggagcatctggacgtcgaaggcaacccgaagcgcgcgtctctgccggacaccatcgcgccggatgagctgacggtggccgtggcccgcgatttgatcgacaaccactccggtggaccgcgcgagctgggcgttgacccggtatccggcggtaccgtcgaggtgcgcaatgggcgtttcggcccgtatgtggcgctggtgccgccggctgaggcttcggctggcgctgctggcgatactgctggtgcttctgcggccaagaagggttcgaagaaggccgcggccgccgccgcgtcgcgcccgaagatggcctcgttgttcaagacgatgagccctgaatcgctgtcgctggaagacgcgctaaagctgctgagcctgccgcgcgaagtgggcacatacgaggaaaccaacgccgaaaccggtgaggtatccgaatgcacggtggccgccaacaacggtcgctacggcccctatctgaccaagacgggtgccgacggcaagtcggagacccgctcgctggcctcggaagacgagatcttcacggtcgatatcgacaaggccaaagaactgttctcgcagcctaagtacggccgcgggcgtggccgtggtgccgccaagccgccgctgcgtgatttgggcaaggacccgaacaccggcaagaacgtgaccatcaaggacggccgtttcggcgcgtacatcaccgatggcgagaccaaccgcacggtgccgcgtcagtacacgcctgaatccatcacccctgatgacgccttccgactgctcgccgaaaagcgtgcggctggtccctccacccgtggccgtcgcggtgctgggcgtgccggtgccgcgaagtcgggagccaagggagccaagaagggcgctgcttcggctgcgaccaatgccgccgaggccaagcgcgccggacgccgtgccgaggtgaagaagctggcaaacaagggctggtccaaccagcgcatcgccgaaaagctcagctccaccgccgccaccgtcaagaaggatgtcgactggctgaccgccaacgagggctacgagcgccccgccgtaattcccaagcgtggctgagcggaattattgctctacttgcgtttcaaagggctgatttctcgttttgagaatatctacttccgcttcaaggggctggtcatctgctgaaccacgagtatgaacggctccgcgccaacgtcattccgccgttttgggacgttgtctacttgggtaacagccccttgaaacggaagtagaccttcagaaaagaccaaatcagccccttgaaacggaggtagagctggtttaactgcctgttgggcacaactctgcgcctaacgctaaggtcaatagcatgagcggtctgtttgtttcgtttgaaggtgtcgatggcgtgggcaagaccacgcaagtcgagcggctgcgtgcgtatcttgaggctcaggggcgtaccgtggtcgttacccgtgagccgggaggcactgcgctaggcaaggccattcgccaactgctgttgcacggtgtggatgggggcgccgtcgacatcgcaccgcgcgccgaggcgctgctattcgctgcagaccgagcccagcacgttgccgaaaccatccgcccggcattggagcgcggtgaagtggtgatcaccgaccgctatttagactcttccttggcttatcaggccggtggccgcgaacttacgccagaagagattcgagccttaagcatgtgggccaccaacaacctgctgcccgaccgcacatatctgctggacatggatccggcgctttcccacaatcgtcttgagcatgccgaagatcgcatggagtcggccggcagcgaattccagtcccgcacccgtcaggcgttcctcgacttggccgtggccgagccgaatcgtttccacgtgatcgatgccagccagtccatcgaacaggtgtggtccgccatcgaagcggacattcagacactgctgcgggacaatgttgcagatgtggatacggtgatggcgcgatccggggcgtctacaggagccgtgacgatgggcggtgtccgatgagcgtatgggattcactagtcggccagcagccggtaatcgacatgctcagtcgcatcgcgcagggcgacccgggtcagatcacccagtcgtggctgatttgcgggcctcccggctccggccgttccaatatggcccgagcattcgcggcggcgctggaaagccccgaccacggcatgaacgatgagcccacgcgcgtcacccaacaggtgctcgctggcacccacccggatgtcacagtgctggccaccaacaaagtgaccatcggcatcgaccaggtgcgcgagatcatcaccgcctccgagcaaatgcctgccacggcaccatggcgcatcatcatcatcgaggatgtggaccgcatgctggagcgcaccaccaacgtgctgctgaaggagatcgaggagccggctgaacactgcatctggctgctgtgtgcgccgagtgcccaggatgtactgcccaccatccgctcgcgcacgcgcatcgtgaacctcgccgtgccctccacccaggcggtggccggattcctgacctccaccaccaatgtcgagccaaaagtggcgcagcgtgcggcccgtctggccgagggacacatcggcatcgccaagttgtacgccactgacgagcaggtgatgacggatcgcgacgaattggtggtgggcgtactgaacctcgctcgcgcctcggacgcggtgctgctggccggcagccttatcgacaatgccaaggcccaggccgaggcggacgcaagccgcatcaccgccggccaggaagcggaattccgccgcatcaacggactggcaccgaacgaccgcatcccgccgaaactgcgtggcgcgttcaaccagatcgccaagaaagacgatgtgaagcgtttggtcacccgccgtacgcgcgacgtattggatcgtgcgctgaactccatcgcctccatctaccgggatgtggcggtgctgcagaacaatgcggaggattcggtgggcctcatcaacctggagaaccgctcgccgatcaccgaattgtcggtgcggttgaaccgggccggtgccgtgacccgtctggacgaagtggcccacgcccgcaagcgtctagccggcaacggcaacccgctactggtattcgaatccctcttctgcgccctaattccataacccgacgcaaccagccccctctgacgagggggctgtcgagcgcggcgagactgggggagagacccccgtaacgcacagcccccagtacgtcacacatatgagcgatactgggacatatgaagatttccgccgatttcaccgtcattccggacgattttgccaaggccgccgcgcctgagtacttcaacggcggcgtgccggtcgtctccttcccgttctacatcggtgatgtgaaccccgaggcccgttacctgcactgggagttcgtggacccggattcgattccggtctgcggcttcgagtggattcactggtccgtggccaatctgccgattgacgcgctgatgtacgacttcaatgattcgcatgcgttggccatcccgccggacttctcccgtcagctgccggccatgattcccgagaccgtgcaaggccgcaattcttcggcctccaagttcttgggccgcagcactgacccagcggtgatcatgcggtacaacggtccgcagccgccggacaaggaccacgagtactacctgcaggtgtgggccaccaagaagccgttgcccggcttgaatcagggcttctggctcaacgagctgttgcacgcgctgcgcaacagcggcgaagcgcccgacaccgacggcatcttcctgaccggtaaggcgtgatttttagttggcgtatgtgagctccctctgatgagggagctggccgccgtaggcggactgggggagagacagctagagtgactacccctcagtctcgctttgcgagacagctcgtcctgcaattacggacgggctaccgcccgcaacatctgtggtgggacttatctcccaccctcgcctacaaacagcccaccgggctgtttgctgaacggctcagcctgacaaggggagcttgaataagagaaaggacaccatcacactatggcctgcaccacgattctggtaggcaaagacgcgagctatgacggttcgaccatcattgcccgcaacgaggattccgcgaacggcgagttcaacccgaagcgcttcatcgtcgtgaaaccggaggaacagccgcgcgaatacaaatcagtgatctcccacctgaccatcactctgccggacgacccgctgcagtacaccgccgtgccgaacgcggacctcaaggaaggcatctggggcgaggccggcgtcaacgaggcgaacgtggcgatgagcgccaccgagaccctgaccaccaacgagcgcgtgctcggcgccgacccgttcgtggaatacacgccggccaggggcgatgagcccgaggtgcccggcggcatcggcgaagaggacttcctgaccatcgtgctgccgtatgtcaagaccgcacgccagggcgtccagcgcctcggcgcgctgcttgaggaattcggcacctatgagatgaacggcgtcgccttctccgactccaacgaaatctggtggctggaaactgtgggcggccatcactggattgccaagcgcgtgccggacgaggcctacgtgaccatgccgaaccagctcggtatcgacgaattcgaccttgaggacgctctgggcgaccaagaagcgcacatgtgctccgaagatctcgccgaattcatcgaaaccaaccacctggacctcgcggtggagaacaccaccccgttcaacccgcgcgacgccttcggctcccattccgactccgaccacgtgtacaacaccccgcgcgcctggtacatgcagcgcttcctcaacccgtacgacgaggtgtgggacggcccggacgccgaccacaagcccacctccgacgacattccgtgggcccgccagcccgagcgcaaggtgaccatcgaagacatcaagtacgtgttgagctcccactaccagggcaccccgttcgatccatacggccagctgggcgatgagcgcacccgccacatgtaccgcacgatcggcatcaaccgccagagccagcttgcggtgatgcagattcgcccgtaccgcccgcaggcctcccgcgccatccagtggatggcatacggctccaacccgttcaacacgctggtgccgttcttcccgaacgtggacaccacgcccgcttaccttgaggacaccaccacccgcgtgacgtccgagaacttctactgggccaaccgcatcatcgccgccctgtgcgatggcgccttccgctccacgtccaacgccgtcgagcgctaccaggagaagaccggtgcgatgggtcaccgcttggtcgccgccaccgacgagcagatcgcccgtctgggcttgacggccgccgaggaagccgcgcagtctgccgctgaagaggaattcgaggccgacaacgtggatggcgatgtgcagccgatgaccccggacgagaccatcgccgcgctgcgtaaccccgaggtgcgcgagattctcgccgccgccaaccagaccatggccgaccagctcaaggaggaaaccgacaagctgcttgactccgtgctgtacactcgcagcatggaaatgaagaacggcttccacatgtccgacttttagtccgtattgagctcccctccctgaggggagctgaccgcgaagcggactgaggggctaagctgttaagaaacagcccagtgggctgtttctaggcgaagaggcggcggcggccgccccaccaccccgctccgccatcatcaacacagaaaggcattaaatgaccaccatcgaagacttcaccagccagtacggcctggtccagaagatcgacgcattcggttacatgaagtacctggctgagaacccggacgccccgtgcaagcacggcaaggtggtgctcgtcaccgccgatacgccgctcaaggcatcgcgcggcgaaggcaagaccaccacgaccatcgccttgatcgacgccctgaacaagcgtggcattgatgcggccgccgtgctgcgtcagccgagcatgggcatcaccgcagccggttccaagggcggtgcctccggcggcggcaaggcatccctgacccaccccgagctcatcgactggggtctgtgcggcgaaatgggcgccatcgaggcggcccagaacctgctcgtctccttcgccgagaaggccatcgatgaaggcaagcttgacacgattctcgtgccgcgtgtctccgaggtgccgagccgctccctgcgctccaccgccgtggactacggcaagggcaacgtgccggagaaggtcgtgctcacgccgacctgcgagctcatgcagatcatggtgctctcccgctcgatggacgagatttccgagcgtgtatccaagatgatcgccggcaccaaggacggcaaggccgtgaccttcggcgagttcgtggacctgtggcgcatcaccggcattctggccgacgcggtcaagccggccaagaccgagaccgtgaacggctccccggtctacgtgcacggtggcccgttcgccaacgtgtccatcggcattccgacgctggtttccgtggaaatggcctgcgctctgcatgacgtggttgtggtcgaagccggttacggcaccgacgccggtgcccagaagtggctggacatcgcctgtcgcgagtatggcgcgcagtggccgtccgccgccatcgtggtgacccgcgcctccacctggcgcgacgatcccgagctggcctggcgctacccgttccacgtgcagcgcctggagaacctggacattccgaccttcccgctcatcaacctgtgggaaggcgaggacgatcaggttccgtccctgcaggccaccgccgacgagctgggcttccgtacgccgatcatcggcaacctgttccgcgacggcggcgaggcgctggccccgcagcttgacggtttcgtcgacgcgctgcagaacggctccatgccggccgaaccgcattcgcacaagggcatggccctgaccgagaacgccaagtgggtggccgagaacgcctacggcgtaccggccgagcgcgtaatctacaagccgggcttcaccgagtctgtgtccgaggccatggaactgtgccagagcgcaggcatctcgctggatgatctggcgttcgtggcggtcaagtccccggcgaccatgaccgacaacgaccgcgcccccgaagaagagcgcaccgtgaccctgaagaaggtcgaggtgcatgccggtgccggtctggtccacgtcaacctgaccaccagcctcaccacccccatgcccaagattgtgtgatgacaggcatgaggtgaggtaactcgctttcgaggggcggatttccggttttccggaggtctatctgcgtttcgaggggctcttcgattgcgaaacccggagtatgaccattgaaattgcaatgtttatactccgggtttcttgttttaaaagccccttgaaacgctagtagagcttctgaatgttggaaatcagccccttgaaacgtagaaagcccgccaccggcgggctttctacatctgagcttccctctttgagggggagctgtcagctaagctgactgaggggagccagaatacgcaaactagttgccaccctgagccattaaacggaaagcccactgggctttccgtaggcgatgcgaacagctatgctgcgaggggaatggtggcaactagaagttgccgccattccagccccaatcggtggtggcggtgtagcggatgtaggtgcggtcctcgggaatgccgagtgtggagttcagcgcggccataatgctttcggtcagcttttcccaagcagagcccggcacagagcggccgaatacgttgacctccacataggcggcgggctggtcatcgctaccaccgaagtagattggcatattgtcctcgaacgggcacatcagccagccttcggacttgcccggcacagcggtaatcgccttgccgtaggcggccttcagtgcctcacgctgctcgggggtggtggacacggacacatgagtgtgaataacgggcataattcctccttgattcggttcacttccagtctagcctcagcggctgctgttgaacatggcatgcggacgtaggaagctgcttgcagaacggaccggggcaaggccaattggggatattattggcctttccagccaatacacgttccgcagtcagcccaatagtgttgaatactcttgtgagaaaactgattgaacagctgatgaagttcggcattgtgggcgttatcgcctttgttatcgactggggtatcctcaacctattggttggcatattccacatgcacaacgtgctggctgccaccatctctttcatcatctcgctgattttcaactatctggcgagcatgaaattcgtattcaagcatcgtgatgacatggcacgctggatggagatccttatcttcgtggcgggcgctgtagtcggtctgttcatgaatgacgcgattatctggatttccacctatggtatgaaccatgatgcctatgtatcgcagcatgccgaatatctgttgcgcaccaatatcggcaagttggtggccactgccgtggtaatgatctggaacttcttgattcgcaagtggctgctcgacgatacgcacaccaatgcgatgaaccgtctgaagtccgctgaaaatcgactgaatgccgaggagcttgaagccaagtggcagaacagcttctcccacaagttcggcatctggtccttggagcacacgcccaaaggctggccgaagtagcgttttgacgtatgctaagccccctcgtcagagggggcttagcatacgtctcacacactcacttcagtcagggtcggctgctcggtggagcccttgatctgcttgaagccgatcagtgcaatcaccagcgaggccagtgccaaggtggtcaccaccatgaagcctccgtgcgagcccatgcggtcgatgaactggccggcaatcgccgaaccggcggaggagccgatagaattcatcgcacccatccacgccatgccctcggtcaagcgagagggcggcaccagatgcaacatgagctggttgccgttgatccacgtcggggcctggcatacgccaataatcaagtagatgatcatgatcacccacagatgcttggcgaacaggaacgtactgatgccgatgttcaccacggccaggcagaagtagaagcgcttccacagggcaatcgaccagttcttcgcgccatacaccaatgcgcccatcagcgagctgaaggagaagcaggcaaacacaaagcccgtgtactgcttcatattcgcttcggtggcaaacgcgatgatggagatgcccgtagccgactggaacgcgcccaaaccgaaccaggtgacgcacaccgcaatcagacccggaccccaaatggacgccttcttgcccgaacgcgcatcggcgaccgcctgcttaatggctgcgttaatcgtggcctcatcggtcacgccttcacgctcaagacggcggcgggtctcctcggcggcggtttccaccttcagcgcctcagccttggcggcctcgcgctcacggtattccttgcgggagatgccctcggcacgcgccagcgcggtctgcgacggtggctcagtggtcagctcggtcaggaacatcagcgcaccgaccaccacgcacatgccggtgaacgagaacgccagcaaaccggagatcacggccagcgtggaggccagcggattaccgatcacccacatgcattcgtcgagcacgccgcacagcgacagcgcgcggttcgtgcgctcccggtcacccttaagaatcttggtccagcgcgcgcggctcatcgcgccccacggcggaatggcggccaggaacggcgtcagacagtacagcacccattccggcgcgcggttggtaatcgccgtcaccagcgcgatggcggccacaatccaaacgataatcgtcggaatcgagacctgcctctggccgaacttgtcggtcagcttgcccagcagcggcgtggccacggccagcgcaatcgcctgaatggcggtgagcatgccggccagcgaatagttgccgtaataatgctgtacggaaatggtgatggtcatgccgaccatcgggaatggcatgcaggcgatgaccgagccgatggaataacgggcggtatgcggaatgcgcagtagttccgcatacccaccaaagactttgtggcctacttccttgatgccggccagaatggtgctcgagttcgagttggacgagttattggacataacagcactacgctcctttccgctcccgattggatgtcccccgctggcgtggcgttgccggcgaagccctcatcgaatgatgtgttgtccatggtcgcgcaaagtttgcgtcggattttcccatccgcatatttgcgtcacggatactctacgggtgtccactccgcgacacgcggtagattggagatattaagacaacgttctcatgcccttcagggcgggaagcagaaaggcggctcatgagcgctaccaccatccatttcgtccggcatggcaaggtatataaccccgaccatctgctctatgagcgactgcccgacttccatctttccgaccttggccgtcgcatggctcaagccaccgccacgtacttggccaagaatccccaaaccaatacgattgcagccgtctactcctcgccgctcgaccgtacgcgcgagaccgccggcgcgattctcgatgcgctgaaccccgtgcgcgaggctcgtggcgaggcttcgctcacgctcaccactgatgaacgggtgattgaggccggcaacgagttccgtggcaagcgcatcggccatggcgagggcgcgctgtggaagaacggcaactggaagctcgtcaccaacctgtacaagccgagctggggtgagtcctatcagcacatcgcggcgcgtatggacgacttcgcccgcgagaaggtggcccagcaccccggcgagcagattgtggtggtcagccacgaatcgccgattttcagttatcgccattatctggagaccggccaccccgagcactggatgttcctgcggcacacggcgctcgcctccgtgacctcggtgacgtacgacaacgaaaccggccgtgtgatgtcaatcacgtatgtcgacccagcagccaacgtcaagtaacggcacactggtgttaggacattggctcccctcagagaggggagccaagacgcactgcaatcgagtggtggacgcaaaggagcatagatgaccattgaactcaatcgtgaggcaatcgcacaggtcgcggcattgccggcggtaactgaggccgccgaagccggctcggcgctgatcagcctgtggccgctgaccgaagccatgcagatggacaatgacgcaaagtacgcggagaacctgcaggtgcgcgtcacccgtgcattcgcccgcatcctgaccggcgaggacgtcaccgtgccggacgccgagttcgtctacgaaggtgccgatgagattcccggtcgcccgcagagcatcgtggacgccctgctcgccgccaatgacgcctacgacacgatggccgactacgccgagtccggtgatgccaggctgatcgttgaggcggccgacgtgttgggaatcgactgggattccgcgacggcggaatcggtgagggaggcggtcgcggccatggaagcccaggtcgaggccgacgctgaagccgatggtcgtctggccacgtctgccaagcccgccgatgtggctgttcggttcgccaccgcgctcgccgtgtgcgatgcgttattgggtgaggtgtccggtgatgctgtggccgatggttcagcggacagtgtcgccaatgctgccgccaagattctgccgattctgctctacgtcaacgaactgcgcgagcagtgctcggtgccgcgcatctgcctgaccgacgagcagatcctcgggttgcttaatgcccgtgccaaagccgccgacgcagacaccctgaccgccaccgccgaatacatcgctcctctggccgttgccgaatggaacaagcaccgtgaggatgtgctctggaacccggacgaggctaagcgtcaggccaaggaagaagacgaaaagcgcaataaggaggctctggccgccaagttcgcgcatgtcaaggatgatcccggcaaagagaccgtggagttgtaaagagtaagggcgttgctctggccgatgcttcgctcgtaacggttagaggcctggtgcctctccctccgtcatcgctttgcgatgccacctccctcgtcagagggaggtggggttactgcttatcgattaccgagccgcgatcggtcagcgtcgggtccacgtagatgtggcgggttgtagaatccgggttttggatgcggttgatcagcaggttgatggccgcctcggccagatccttatcggacgagcgcagtacggtcagcgggcgggagctgggcgtggcaaagccgttgacggagatcatcgagatatcgtccggtacgcgcttgccgcggcgctccagggtctgcgcgatggcgatcaccagataatcggagtgcaccagcatggccgtcacgcccgaatccagaatggtgtccacgatttggttgacgtccctggtgttgtacggctgaatgccggtgatggtgaacgggcattcgatggcgtcgctttccgtcacgatttgcttccagccatcctgaatcagctccgaagtcggtgtatcggtgaacgccgcgcccacacgggtgtgaccgtgttgcaggaagcgcaccgccgccttacgcacgccatagggatggttggtgcgcactgaatcgacgtagcgggaacccagcagcggcagatcacgttcgatgatcactgtcggcgtcttcgtctgctcaatccaattccacgtgtatttgccgcattccggatgggcattgggggccacgatcagtgatctcaccgattactcaatacacaaacttgaggggagggctcccggaccggtgaaggaggcactgatgaacaccgaacgattcgaccttgaggatgagtctcaggactggtcggcgctcttcgccggtttgacggcctgaggcacttccctccgcctgagtgtttgcgcaaagggcgattcctatacggggatcgccctttttctgcaattggctaattttggcatattttgccccgccggcgacggcgtattgtgtggcgaaaagagtttcgtagttcgtagtaaaacggaacatcctcatggatattctggttggtggattcggcaaactgcatcatgtggcttgccccggcatcgaacaattggtattggatgccggcggcgataacagtggcgacgccaaggtgctacgccgcgaacggctgctgtcggacgcgccgtcgcccactgggtgcagccagtgccggacggccgcgtgctgaccagcgatttgggtgcggatcgcgtttatgtgcaccattgggagcacggcgaactggtgcgcgagggggaagtcgtgcttgagccgggcactggcccgcgtgaccagcatctattgccagtcgcatccgatgatcttgcgcacgattggcgcgtggcggtcgtcggcgaatggggtggcacggcctttgtgcatcctgcggccatactttgcgattcttttttgttaaggaagtatcctatttagtgaaaagtatcgttcgcacaatgggaatgggaaacttatgggcaatggtgtcgatttgcgtatgctcgtcaacaatggcggcagcgtggtaatcagcgattacggagcgcatctgttgcgctgggccccggccgggcaggcggatgtggtgtggacgccgagtacgtggcatatcgaggccggtaagtcgctcggcgggggagtgccgatctgcttcccgtggttcggcccgggttttgcgcatggcaagcagctggcactcaatccatcccacggttttgcacgtctgcgtcggtgggcgttggacgagggttcattcgacgacagccacatacggtatgtgttggattcgcagcagctgaacgacaatgaagtgccttggttcgatgacgagccgggtgctcagtttcatgccgtgtatgacgtgcaaacgggcaatgcgctgaccatgagcctgaccgtgaccaacaccggcacggcgcctatgtcgtacgaggccgcgttgcattcctatctgcatgtcggcgatgtgtccggtgctcagctggtcggattgcagggagcgacgtatctggatgccaccgaagaagggtttccgccgaaaacacaggacgcgcaagtggtgacgtttggcgagcagccggtgaatcgtgtgtattactcggatgcgcgtctggaactgcgcgatgacatgttggggcgtgcgattcatatcagccgtaccgggtcgccgcaaaccgtggtgtggaatccgggagcggacggcgacaatatgagctacaccaagccgggcgaatggcgcggtttcgtggcggttgaagcggcggtatgccgcgaccgcatcgtgacgctgggcccgggagaatcccatgtgatctcccaaacgctctccgtaggcagcttgtaggagtagctcggcgcagcgtccatcctccaccgtaacgcattccggggaatgttgcgcgaagagaggggccgcaataacgcacaatgccctgtgtgctggaatgatccagtacacagggcattggcttactgaacggcggggaatactaccgccgcttgatgagtggggcctcattgttgggcttcatgagtgatgaggcgaacttcttaagcgaacttcgccggcgtcagtcactggccttgccagggtttctgtgcgttgtcatcggtgggagccgtgtgcggagacagcacggtggacccatcatcaacgttttcgggaatcggcggaacctggccgtactgtggggcctgagcgtcgggctggccgtactgcggggccggggtctccggctggccgtactgcggaaccggtacctgaccgtaatcgggcgtaggcacagcgggctggccgtagtcaggagccggtgcggtcggctgaccataggccggggctggctggttgaagtcaggagcgggtgcgttcggagcggtgcccggagcggcctggttgaagtccggggttgcgggagcgccgtacggtgcgccgtaagcaccctgaggcatcggggcagctactgcgtcatcgtcgaaacgtgcgccttccggcttgctgggcatagccatgaacacgatgtagacgattgaaccagcgagcgtaatcagtccgccaatggccatggcaccgaggccgccggttgccatggctccatagctggagttgctaaggctgccgaaggcgccatacagtgctgcgccaccgccggcaaccatgatgatcatgccgagggccatcgcgccatagaagatggcgacccaccagccgggcttgtccgtgtcatgcagacggcgaacggcgagcgccagactgggaatcaggatggccagactccaaatgctggaaaggaacccgagcttgtcgtccgtggcactgctgaggaggctcagcaggacgctgatgccgacagaggccaacgtccaccaccagaactcgctgcgggaggcacgtcccttgaagaccacatacttcttccagaaacggaggaatgcctcagggaaggggcagtcgtaatacggcttgttcaacggcacggctgctgtggcagtgggagcggcgtactggttgtatgcgggtggcacctgaccgtaagcgttggcgtccggtccgggctggccgtaggtaggagccgcgccgggagcggggaattgcggagccgcattcgccgcgtacgggtcggcggcgggctgaccataggcgggagttgcaccgggcgctgcgccgggtgcggaagaatcgggagcgggctgcccgtatgcgggctggccgtaggccggctgtgcgggggacggagcgttgaattgcccataatctggctgtgcgggggccggagcaggtgcgccgtattgcggcgtgctgggattctgctgggccggggtaccgttgggcgcgggcatctgcggcaacggcacgttgttgggatcggtcattgattcccctttcataagacgattgcgtcgactcctattcttccatcgtttgggtaaaaaactcaacaattgcgccaaatggtgtcgaagccttgcgtgcgggcgtgtggatggcgccaaagtaggcgtcaaaacaggtgtgaagacaggcatcaagatatcgggcactaccaaagacaggcaaaagagatttcgttggaaaatggccgttttgggatggtgttggcccgaaatgtcaataacgaagcaaaagagcgaggagcgctgctctccgcgtccggcgcgcgcggcacaataggggattatgactgatgctgaaaacaccaaacccgaactgcccaagaacgttcgtgttcgcttctgcccgtcgccgaccggaaccccgcatgtcggcatgattcgtaccgctctgttcaactgggcggaagctcgcgccaccggcggcacgctgatcttccgtatcgaagacaccgacgccgtgcgcgactccgaagaaagctacaaccagattctcgaatccctgcgttggctgggtatcgactgggacgagggcatcgatgtgggtggccctcacggcccgtaccgccagtccgagcgtaccgccatctacaaggatgttgccgccaagctgctcgaagccggctacgcctacgagtccttctccactcccgaggaaatcaaggagcgcaaccttgccgccggccgtccggccgagttcggctacgatggctacgaccgcaacctgaccgatgagcagaaggccgccttccgcgccgagggccgcaagcctgcgctacgtatcaagatgcctgatgaagacatcgccttcgacgatctgattcgtggcaccatcgagttcaaggccggctccgtgccggactacgtgatcgtgcgcccgaacggcgacccgctgtacacgctgaccaacccggtcgacgacgcgatgatggaagtcaatgtcgtgctgcgtggcgaggacctcctgagctccaccccgcgccagatcgtgctttaccgttaccttatggaactcggcatcgccaaggagatgccgctgttcggccacatgccgtacgtgatgggccagggcaacaagaagctctccaagcgcgacccggagtccaacctgttcaaccaccgcgacaacggcttcatccgcgagggcctgctcaactacctggccctgctcggctggtctatcgccccggaccgcgacgtgttctccatggacgagatgatcgagaagttcgacgtgcgcgacgtcaaggccaacccggcccgcttcgacatcgacaaggccatctccatcaacgccgagcacatccgtatgctcgagcccgaggacttcctgcgccgctcggtgccgtacctgcaccgcgatggtgtggtttccgccgacaactgggatgccctgaccgaccgtgagcgtgaggtgctgaccgccgccgctccgctggttcagccgcgcgtgcgcctgctgggcgaggtcgccggcatggtcggctccctgctgtccaccgaggagtatctggagcctgcggacgacgccaagaagcagctgaaggattccgccggcgaggtgctggacaaggccatcgccgcacttgaggctgtggatgaagctgactggaagaccgacaacctgcatgagaccctgaacaaggctctggttgaggagggcggctacaagccgcgcctcgctttcggcccggtccgtgtggccatgtccggccgccgcgtctccccgccgctgttcgaatcgatggagatcgtcggcaagccgatcaccgtcgcccgtctcaagggcctgcgggcgcatctgtgatgcgtcgtccaccgcacgccggcggatgatgggagcgtgacgcatggcgggcatccgtacatacggatgcccgctttcgcgttgcatggggtgttcccgcagaacggcggaaaatggcgcgacacgccgggatttgcgtgagagcagggtagcgcgtaatatatctacctgttgcgcggttcgcctcgcagccggttgaaaaactgaatatgcccccatcgtctagcggtctaggactacgccctctcacggcgccaacaccggttcaaatccggttgggggtacgacgaacaactcttcggagttgctacgccaagccaaattggggtgtggtgtaattggcaacacagctgattctggttcagccattcttggttcgagtccaggcaccccagccaataaccctcgcggattagcgagggttttttgtttttacacgtcctgctcatgagatacggccgagagggtaatcctgaatagacaactctggggcaaagactgggctatagtcccaatccgtgactcaaaaacggcagaaatcccgcatccgaacgtaaggggcgcgggatttctgccgtttcgggccgtgcaggaccggccgacatcgcgcgttgccgcgacttgagcgctgtccgatcctgaaaacgtgagggagaccgacctcgtcttacttcttgaccgcgttgacggcgtcaacagccttctgcagcgacgtggtgtgctcgtggtaccacgtgacctgctgttcgagtttcttggtcgcggcctggtagcccttggtgtcgtcggccacgcagccttcgtacgtcggcagttccacggtcagttccttggacagcgcgtcgagagcggaggcgtccgagacgtctgccttggtcagagcggcggcttctgcagcatcgccattgaccaagttgttgtagtcgttggtggcgttacgtacgtcttccgaggcggcggcgcaggcggccactgcgctatcgtactgagacgcgctgtatgcgcgggtgccgaacaccgcgaccgcggcgataatcgccaccgccacgatggcaatcactatagcgacccacttcgtcactcgcttgttgtgcggctgtgccgtcgcttctgcttggttctgggattcgggctggttgccgttcgcctgctgtgcgtcagtcatatttacctctacttctcactgcccctgtttgtatcttgcggagggcctgtttcaaacaacgggtatccaacatatcgaggagagccgagattgccgggcgtttcctactggttgcgctgtggcgtggccgtttttgtctcatatggcgaaagtatgcgccagaggctattgccggccggtaacccacggcgcatccgaatggacgtgcggaatcatcatcgcgatgaccgccagcagacacccgagcatcaccatcaagatgatgttctcgtgtccgtgcgcctgcagaagcgcgccggtcagcgcgccagacgccagcgccagcattacgaccgcacgccgcccgagcttcgactgctggtggccgtgtgccgaagcgtctgcgacgacgccggtcagcgtcatcgtgagcacggtggtgggcaggtccggcaccgacagcttgcgggcggtggagttctggatgcccattgccggggcgagcagcacgatcagcaggatgatgtgcaggtcgatgtgccgtgcggtggggaagttcaggctcggctgtgaggcctgtgaggcctgggtggtctgtgcaagccgtgcaatcgaggagacgccggacgcatcgtctgcggggccggtgatgagctggttcaaaagatagacgccgattagcgcggcgagtacgaacgacgcctgcacgcaggtagaaaccaacagatgcttggcccggttctcctcgaatcgccggatgatgcgcccgccgataagcgcgccgaccatgaaggagacgagcgtcagcgccgacgtccaccagacgaagccttgggcatgggcgatcgaaaacccaagaaacacgatgttgccggtcacgttggccacgaacacatgccccagcgacaggtagctcagcgcgtccaccagcccggcgacgaacgtcagcaccaccaaggcgggggagagcagaccgtatctgtcttccttgcggggaaccaacgtgcgtcctgcttcggcaagatgtgatgtcatggttgcgacgaggctccttttcgggattgaaattatggcgagaacatgcgtcggtcgacgccgccactctactccctactcccgtacggttcctccggtttccgctcgtgcgcagatcgtcgggacggagaagacgccggtgatgcagatcgatgtgccgaaatcccgcagcgtggtctcgaccaagtcgggcaaggtgttgcgacgccgtatgaaggtggatggtacgccggagagcgtgccgatgtacccgtacgagatcgccacgcgcctgtccgatttgggacgtttggacttttccgcgcagccggtgccggatgcgacccgtgatgatttcgatccccttgaacgcgaccgtctgcgccggattatcggcacctaccaatccagtgaccgtaatttgttggaactgaccgatgaggagctggagaaatccctgcaattgacggtgaccgtcgatggcaagaccatgccgacgctgaccggtttgctgctgctgggcaagggggagtctctgaaacgcttcgttccgactcatcgggcgtctttccaagtcatgtctggtacggatatcaaagtcaaccaagactatgccggaccgttgctgaagaccatcgagcaaatcaacgacatgttctctccttggaatccaagcgtcgagctatccgtcggtctgttctcaatgatggtgccggaattcgaccatcgggcgttccgagaggcgctggtgaacgccttcggccatcgtgactacaccctgctgggacgtgtgcgcgtgcagttggatgatgcggggcttaccatcgccaatcccggcgggttcgtggagggcatcaacatccataatctgcttaccgccgaaccgcatggtcgcaatccctgcctgatggatgctctgaaacgaaccggattggccgagcgtacggggcgcggcatcgatcgcatctgcgaagggtcgctgcactatggacgtcccctgcccgattacacggcgtcgaatgagcgtaacgtgtccgtgtacctgcagcgcagcgcacccgacgtcgaattcgtgcggatgcttgccgaggaacaggagcgcaccggtaagactatgccggtcaacggtctgctgattctgaatatgctcaggaacgaacggcgctgcacgttcgagaccatgaacaagaaactcgatatgagtgagcagcgtctgcgcgctatgctggggcagcttacggaatccggcatgatcaaaggttctggcaacggttctcggcggacatacactttggggtctacggtctaccggcgcaccggcaagaccatcgagtacgtacgtcagacgggcatcgaccgtgtgcgatggccggagctcattatgaaattggttgcagagcagaatgatgtcacgcgggcggatgtcatggaactgctgcatgtcgatgcgaaccaggcgtactaccagctgtccaagctcgttaagggtgggaagctgagggtcattggccgtggcaagggggcgcgctatacgatcggtggctttaccgggcgaaagtgatgtgctggcagatgtgcctgtatgggtgctttgtgctgggcatcgtccgaacttgggaagtcgcttcggtacttaggaaggtacctaggaacctaggaagtggtgtgggtaaggttcctaggttcaggtatgcgttcgtgtggcgttcatcggagggggtcagggggaaccttcgcgctgggccgaccggtattcgctgcgatgcgcttgcgatacggaggctgggattgttgcgaaccaaaacgaaaaaa

SEQ ID NO: 1703 - DNA, 11277 bp, Unknown
  MAG_14  MAG No. k141_10742
cctcggcggcggctactccgtggcctacaccgatggcgaagattcaatggacattgacgtggaactcactcgcttggcggatgcggtcaacagcaccaaccgtgcgctcggcatgcccgccccggccatcagcttcgagcccggccgctacatcgtggcgcccgccggcgtaaccctgtaccgcgtgggcgccatcaagcacgtgcacttgtccgatgtcaaagacagtgccggcaatccgattgccgagcgcgtgtacgtgtccgtggatggcggcatgtccgacaacattcgtccggcactctacggtgccgactacaccgcgcgtctggcgaatcgcactggttccgctgaaacgatgctcgcccgcgtgtgcggtatgcactgcgaatccggcgacattgtggttcacgaggtgcagttgcccgccgatttgaagcgcggtgacattctcgccgtgccggttaccggcgcatacggccgcaccatggccagcaactacaaccaggcgctgatcccggcggtggttgctgtcagcgagtccggcgcgcacgtcatgctccgccgccagaccgtagacgacctactcaacctcgacgtcagcgagtaatcagcgtgcagaggtgagcgcctgacagtctgtaatgtgcggccaaaaccgtcataatacgaaaagggccgtcagcttgatgagtactttcggtctgctgtcggaaataatccgtaaaataggcgtgggatatagaaaactttttggaaggaccctgaattggctcacaacagcgaaaccccgattcgtgtaggcctgcttggtgccggcaccgtcggctcccagaccgcccgcctgattgtcgagcagaaggacgaactgtccgctcgtatcggccgcccgatcgaactgaccggcgtcgcctgcctcgacccgaaggaaaccgagaagttcccgtggatcgaccagtccatcgtcaccaccgatactttgagcgtggccaccaactcggacatcgtcatcgagctcatcggcggcaccaccgtggcccgcaagttcgtgcttgccgccatcgaatccggtgcttccgtggtcaccgccaacaaggcgctgctggccaagtacggcccggagatctactccgccgccgaggccaagggcgtcgacatctacttcgaggccgctgtaggtggtgcgattccgttcctgcgcccgctgcgcgagtccctggtcggcgacaaggtgaccagcatgctcggcatcgtcaacggcaccaccaactacattctcgacgagatgaccaccaagggtctccagttcgacgacgtgctcaaggacgcccaggccaagggctacgccgaagccgacccgaccggcgacatcgaaggctacgatgctgccaacaaggccgccatcatggccaccctcggcttccacacctccgtgaccatcgacgacgtgtccgtcgaaggcatcaccaagatcaccgccgacgacatcgccgccgccaccgccgagcacaaggtcatcaagctgctcgccgtggtcgagaacggcgaggccggcgtctccgcccgcgtctacccggccctgatcgacgagaaccacccgctggcctccgtgcacggctccttcaacgccgtgttcgtcaaggccgaggccgccgacgacctcatgttctacggccgtggcgccggcggcgctccgaccgcctccgccgtcgtgggcgacgtggtgaccgaagcccgccacattgctgctggctgcaccggcccgtccatcccgctgtacaagaatctgccgaaggctccgattaccgcctccaaggctgcattcgccgtgcgcttcctgatccacgacaagccgggcgtgctggccgccatcgccgccgagttcgccaagaacggtgtctccatcaacggtgtgaaccaggatctgaagcccaccatgaccgaccccggctacgacggcgagattcagcagttgcgcatcgtgacccacctgaccgacgaggaaaccctgcgcaacaccgtcaaggccgtgcaggcgctcgacttcgtcaccggtgacccgtccatcctgcgcgtgctggactgacaccgtctaggctccctctgatgaggcggtcgaacggctgcccgtgagttgaaagctgaatacccaagctcccctgacaaggggagctcctttttaaggaacaaccatgaacccaatctgcaatagcgttcacgtgcgcgtgcccgccacgtccgccaacctcggctccggcttcgataccgtgggtctggcgctcgactaccatgacgagctcactttcacgctcaacgacgacccgaacgacggcattgcccacgtgatcatccacggcgagggtgccgacaccctcccacgcgacgaaacccacctcgtggtctccaccttccgccgtgcctgtgccacgttcggcctcggccgactcggcttcacgctggaagcgaccaacaacatccctcaggctcgtggcatgggctcttccgccgaggccatcgtggccggcatcgccgccgccgcggccttcgcccagaccggtgacctcaaccgtccggccatcttcgatatggccgcccagatcgaaggccacccggacaatgtggccccggctgtgttcggtggcctgaccgtctcttgggacttcgaaaccgcggaaggcgtcggctcggtcgccgttcctggtggtgaaccgctgcacggcggattccacgccgtcaactacccggtggacccgtccatcaccgccgccgtgttcgtgcccgactatgagctgtccactgagaaggcccgtcaggcgctgcctagggaactgccatacaaggacgccgtctacaacgtgtctcgcgtgggtctgctgcccgctgcgatgaatcccatggtgctggcccaggccgcccagcagggcaagtccggcgtcgccgctgccccggctcaggatgccgatacgtgcgcttgcgctggcggaacccgtgaatcgccgttcgctgacgagcttgcggccgctcaggcccagtccaacgcgctactgttcaccgccacgcaggacaagttgcaccagccgtatcgcggtaccctgatgccgccgtccaccgagctcattgcgctcttccgctccaagggctatgccgccgccgtctccggtgccggcccctgcgtgctcgtgctgcactacggcaacgcccgcgaagccatcgaccagatcgcatcggagcagcttgcttccggccactggcgtgtgcttcacctgcccatcaacaccgccggcgtcgaaatcgagcgtcgctaagtcgaggagaaggctcccgctggcgggagctggccgccgcaggcggtctgagagtggtccgccataccggcagagaccaccctcagtctcacttcgttcgacagctcccgccagcgggagcataaggacttaagtcatgtccattccgctaattcttgcttccaagtccaagcctcgccgtgacgtgctgtattcggcgggtatctgccccacaattcgcgtctcgcacgtggatgagcctgctgcgctggaagcggccgcccgtgaggaaggtgtcaccgtcgacgatttgagcatcaagcagcgtgtgatgattcttgccgcagccaaggccgaggccgttcaccgtgcgtatcgcgatgtggccgatactgccgccgccgcgaccggtgaccgcgtgatcgcctacccgctcaaggccaaggagatcaaggattcggaacgcgaagctgccgtcgaagacctgcgcaaagccgccgccggcaagcccatcgactattccaaggcggaaatcgccaccacgcgcgacttctccggcatcgacatgccgaccatcaccgaacccatcgccaccgctattgccggacagccgggactgaccgaggcgacggtcggcccgctgattctcggctgtgattcgatgttcctcttggacggcgaatgctacggcaagccgcacagcgaagccgtggcccgcgaacgactgaagcgcatgagcggcgcgaccggtgaactctggaccggccactgcctgatcgatttcgcgaccggacgtaccgtgcgcggcgcaagccatgccaaagtccatttcggcgaattcaccgatgacgacatcgaacggtacatcgtcaccggcgagccgctggaagtcgccggatcgttcacgctggaaggcttcggcggcgcgttcatcgacagcattgagggcgatccgcacggcatcatcggcctcagcctgccgttggcccggcatctggccggcgaactgggcatcacgtggaccgacctgtggaatgtcggccgtggcgaactggagccggaaagcaaggcctcaggcaaccagcacgctggcattctgccgccggtcgaaaacgtgcatcagcccggcgatggctgggtggactgcgcctgcggccgcaagcattggggcaccaacggtgcgtccggcattctgctggctcgccgcgacccggcgagcggcaaggtgactcacgtggtcatgcagcaccgtgccgcgtggagcgccgaaggtggcacgtggggtatccccggcggtgccactgcggacggcgaatcgcccatcgaaggcgcgttgcgcgaaagctacgaggaagccaacatcacccccgaagacatcgaggtggtcggctcctaccgcgaggaccatggcccgtgggcctacaccaccgtgtttgcctttgaaaagcccggccacaccgtcgagcccaaggcaaacgacgacgaaagcatggaaatctgctgggtcccgattgacgacgtgcccaaccgcaagctcctcaccgctatgaagaccgactggccccgcttcgccgcccgcctggacgagctggcctgtgctggacatcggtagtggtgttggctgggccaatgttttgccgatgagttcacttgggtaatgccgtgtgaaccgcgtgtggaccgggacggattctgctgtcccggttcatcatttcgtctcttttgggacaaccgggacagaatctcattcacctgacgccctatcgtgcgatggtcgccgtcggggaatggcggaattccggggttttggatttgcatatatcgggtgttcatggaagggcctgtcccggttcgccaaaagaggccgaaatcccgaaccgggacagccgaatctgtcccggttcgtatgtcgatcgattgaccccgccaccgggacatcaaccgcgcatagacaggacgcttcaatgtctggcgggcatgaccatatcggatgacacacgttccctcgtgcgtttcgccacgacctccgccccaagtcagtgcgaaaatggcatttttagcggtgtggtcagctgtcgcatgcggaaaatcctaaatcaaccgccgaagagacacatcgccgactcggcggaactcgctggtctgcgcgcaatgaggagtgttgtgtctgaatgcgattcagacaatggtcggcgtcaaatagcggtctccagccattaatcattggtgattgtggacattgagcggagtaaacattctagatgattcagggatatgccgaaaatcatatcgttcagagaatgaaataccgcatctcggagtaactgactgtcgacgtgcatggtttgaaatctgatatccacgcccatcatgcctagcaaaattacgggaatggggttcggactatttcgcctcagccaaccgggagcttccgaatgctcaatgctgtatgcacttagtgtgtggaaaccagccaatcattgaccaatggcaggccgcagtcgaaaccagaaatatcctcgctcgcagtcaggtgccgaggctcagtgaagttggtcacgtccatatgggatcacgctccaacaattcattcagacgtaggcccataggttcgtttaatgctgcggtgaaatcattccacgctttactgttgagccgaatgatatgagcttcatggatgtcccgatctgcggcggcgagcagattcgataatgcccattgcaacgaagtcatgcctttggactcggccgcttggtcgattctggaacgttgctcttaggtgagtctcatttcaaaacgactgttcttgttattctctgtaatcatgctcctgttgtacgacttttgtacggacacgattggtgtgtgcgggatgtcgattgcgatggccatgtgggctcctttgcttggtctgttgtggttccagcttccgaaccggtcttccactgttcctcgtcttctcgagcaatgaacatctgatatatggattgtcgcgtcgactgcgtatctctaatccttgcggatgaggagcgggccggtgatccagaaaggttcataccgcagcccgatggtcggctgggcgttcgctccgtacgctcgggagtatgaacacagcagcatcgcaattgcagcagcctcagccggcgtcgggaccggcggctcagcctcagcagtctcagcaaccccaacagttccagcagccggcatcgcacacccagcagtgggccccggtcatcgaggcgcacgacctggtcatggactacaccgccagcatggcccgcgcacaggcagggcacggcgtcaccggcgtgatgccagccggcacgggagccggttatgcgtcggcgaatcccgctgcggccggaccgggtgccattcaggccggccagccagcccagcccggcttcgccatgccgaccatgcacacgctcgccctgaaccacgtgaacttcacgctccgggagggtgaaacagtagccgtgatgggcccgtccggctccggcaaatccactttgctgcacgcactcgccggcatcattaagccgaccgccggcaccgtcatcttccgtggtgccgacctgagccgcatgagcgacgccgagcgcaccaaactgcgccgcaacgccttcggcttcatcttccaatccggccagctgctgcccgaactgccggcggtcgaaaacatcgccctgccgatgatgctcgacggcatgccctaccgcaccgccaccgacacggcgatcctgtggctggaacgcatgggattgcgcgcgctcgccacgcaccggccgggggagatgagcggcggacagatgcagcgcatcgccatcgcccgtgcgctcgccgtcaaacctgccgtggtcttcgccgacgagccgaccggcgcgctcgaccaagccaccggccgcgaggtcatgggcattctcatggccgccgcgcgggacaacggttccgccgtggtcgtcgtcacccacgaccccaacgtcgcttcgttctgctcgcgcaccgtgaccatgcaggacggccagctgggaggcgtacgatgagcgctttcgcattgtggcgattgttccatcgccccggctcgcgtggcagtgcgggtcatacttcggtgttggccatcattgcttttgccgcagccaccactatctttctcaccgttttgggcggcgtgcatgggttcatgtggcgcgcctccgccgaccacaccattggatgcgcaatcaatctcgacgcttgcaaacccggaacagcggaaatctggaagcagcgtatcgccaatccccacagcctggatcaatacgccacggcatacgtcgtgctggcgttctttgcctgcctgctgctgattgtgccgttcgtggcgcttgccggttccgccgcgcgattggctgcgtcccgtcgtgacgctcggctcgcatccctgcgcttggcaggcgcgaccacggggcaagttattcgccttacggcgcttgatgcggctgggcaggccttggtgggggcgctgattggcatcgcggggtactgcgtgttgatccccctaatcatgttgctgcatttccagaatcagacgtttacgttcgagcaactgtgggtggggccgattgccttgatcattacgcttgttggcgtgaccgtgttggcgctgatctcttcgctggtcacgcttcggcgcgtggccatcacgccactcggcgtcacttcacgcgttgcgactacgctgccgtccggctggcgtgtggtggtgttcgccgtcatcatggtgattgccgttcttctgttcaagaatccgatggtgctggctcaggccggtgaagtagtgatgtacggcgtgatcatcggtttcatgctgctgtgcttcgcgctggtgaacctcgtgggctcctgggtggtcaccgcccgcgccaaagccaaggccaaacggcccaaggacgcggccacgatgattgccatgcgccgtattctcgacaatccgaagcgcgcgtggcgcaatgtgtccggcattgcactggccgtgttcatcgccggcatcacctcgatctgcggattctttggctcggccgccgtggtcggtgacgccaacgacccgtccatcgtgttcattcgcgacatcggcaccggcggcatcctgacgctagtgttcgccgctgtgcttgccgcggtcagctccggtgtgatgcaggccggcagcgtgtacgatcaggccggcgaatatcgcatgctggtgttggagggcactgatgtcaagaccttgaaccgtgcgcgattcatcgaggtactcaccccgctcaacatcgtggtgatcgtggccggcggctgttccatgctgcttatggcccctctgttcgccgcttcgatgaccgaaccggccacgctggccagcttcttcggcgggcttgcgctgtgctatgcgctggtttcggtgggtgcgttcgcgtccaatcgggtggccgccagcttgaatctggccgattatcgggccgatgactgaggcggtacggtactttcccgggtgacgacactggtggggaggatgacgtgcatatcaccctgattgcccttgcggctgtcgatgatcatctgcacggcgcgttgggctatttcgctgaacggctgatgcacgctggtcagggagggcatgagttggccggcggggaaaatgtcgtcgaaccccatgacggacaattgctttggcaacgcgatcttatgctctcgtgcggcacgatacgtgcttactgcagataagtcgttgcagcaaaaaatcgcggtgggtcggtcggtgagttccagcagccggcaggctgcttcatagcttgtttcggcggggaagtagtcgccctgttcgatataggactccggcagatccaccccggcctgttgcagagcggcggtgaatccgctatagcgcgcgatgctggtctgtaggttcgccggcccccggataacggcgatgcgtcgatggccgagcgacagcaggtgtttgccggcctggtatcctgcggtccagttatcgatggacacgctcatcacatccgaatcgacggtatcgattgggtcgatgatgaccacgggaatactgcgcgatttcaacaaagacttcgcttgagtggtcagaccgcccatctgctgcataatcacaccttggggatttctatcgatgatgccgcggaaacagtcttccgtggcatcgccatggttggtctgggtgaccgtgatggcgaggcccgcctgctgcgcccagtatgaggcgtatttgatgagttccatcgtgccgttgtgctcaatgtattcgacgacgagctctatggtgggggagagtttggtgttgaccagaggccttgagtaaccgtgatctttgaggatttgctcgacttgtctccgcgtctcgtcggaaatgcctgacctgccattgatgactttggaaacagtggatgcggatacgccggcgatttttgcgagctcgccgaccttgagcttgtgggtggatgtatcgttaaccatcggtgcttccctcttggatattcgccgttcaattactgagacgatttcgtcgttgttcccaccattatgacgcattgtgccgtaacaattccgtgttttcttgccctttgtccggccttgaataaaaattttcgcaaataggcttgcaaatttctttattcggacgtacgatatagccgttggttcacaccaggcgaaggagcccgaacacatgagtaccatcaccaaagtcaagacgtatgacttccgattccccacttcaacgacgctttccggctcggatgcaatgaaccccgatccggattattcctctgcgtacgtggagatttccaccagcgccgacgacggcatcacgggtgtgggattcgtgttcaccatcggccgtggcaacgacgtggtttgcaaggccatcgaatcgatgtcgcaggtgctgattgggcgcaacaccgaggaactgctcgacaacatgcgcattgcatgggacctgttcgtgcatgattcccagctgcgttggcttggccctgaaaagggcgtggagcatatggccatcggcgcggtgctctccgcgttgtgggatatcaaggccaagcgtgcgggcaagccgttgtggctgctgctgggcgagatggagccggaggagctggtctccacgctcgatttccgctacatgaccgacgccctgcgccctgaggaagccgttgcgattctcaaagagggtcagaagggcaaggccgagcgtatcaagcatctgctggaggtcggttaccccggctattcaaccgctcccggttggctcggctactcggatgagaagatggtggccctcgccaaggaggagacccaggtcaagggcttcaagcagatcaagctcaaggtcggccagaacatcgacgacgatctgcgtcgcctggccaaggcccgcgaagccatcggccccgacgtgcgtcttgccgtggacgccaaccaggtgtgggatgttcccaccgccatcgactggatcaacaagttccacgacttcgatctggcttgggtggaggagccgaccagccccgacgacgtgatcggccacgccaccatcgcccgcgccatcaaccccatcaaggtggccaccggcgagcagatgcagagccgcatcctgtacaagcagtacctgcaggccaacgccttcggcatcatgcagatcgacgccacccgcgtggccggtccgcaggagatcgtgctcgaatacctgctcgcgaagaagttcaacaagcccgtctgcccgcacgccggcggcgtgggcctgtgcgaggccgtatgccacttcgcgatgttcgattacgtggccgtgtccggcacgatggacggccgcatgatcgaatacgtcgataaccagcatgaacatttcgtccacccgaccgagatcaaggacggcaactacgtcgctccgaccgctccgggcaacggtaccgaaatgacgctggagacggccgagaagtacctgtatcgcggc

SEQ ID NO: 1704 - DNA, 3398 bp, Unknown
  MAG_14  MAG No. k141_11539
tcggcgatgagaagctgctggtcgtggtcaacatgtccggccgaaccgttgatctaccgcgcgaaaccgccgaactgttggcagtggccgatggccttgccgagtcgaacgtggtaatcagcacgtatgatgccccgcacgctgtggccgctcttgccggccgtgagcttgcaccatgggagggcgtcgtcgtcagcctataagtgttgctaggcggtatctccatttcaaggggctgatttggcttcgcggggaggtctatctccgtttcagggggttggtgcctgaatagccgggctccgaaaaccgcataataccgctgcaaatgatgtgtcatactcacgcattgcacgatcgggcagcccctcgaagaggagatagacctccccgcgaagccaaatcagcccctcgaaagctgattacgaacgggaattaccgtaaatgagcgctcgttagcgagataagccactgttttcggtgtccccgcgccatacaattaaaagctatggaacaaaaggatgttttgaaggcgctgcagcgtgatcatgcagccgaactgaagctggccgccaaacgtctcaaagggactgcccgtcatacggaaattatcccttcgccggtattgagcgagatgaccggtcatgagattctcctgaagccggaaaacctgcaggtcaccggttccttcaagattcgcggcgcgtacaacaagatcgcatcgctcaccgaagagcagatcgcccgtggcatcgtcaccgcatccgcaggcaaccatgcccagggcgtggcctatgcggcccgtgagcgtggtgcgaaggccaccatctgcatgccgcagatcaccccgccgctgaaggtcgatgccaccaaggcctacggcgccgatgtggtgctgtacggcgatgtgttcgacgaatccgccgcccacgctgctgagctcgccgacaaggaaggcatgatttacgtgccgccgttcgacgattacgaagtcatctgcggccaaggcaccatcggtctggagatcctcgaagacgtgccgaacgtcactgacgtggtcgtgccgctcggtggtggtggcttgggtgccggcgtggcgctcgccatcaagacgttcaagcctgaagtgcgcgtaatcggtgcgattccggagggctccccggcctggaaggactcgctggccgcgggtcgtgtgtctccggctgaccatgtggtcacctccgccgaaggtgttgcagtcaagcgccccggcgacctgcccttcgctctgatcaacgagttcctggacgatctggtcaccgtcaccgagcgcgacatcaacgaaatgattctgctcatgctcgagaagcacaagctggtggtcgaggcggccggcgccgtttcgctggccgcgctggaacacctgaacctgcgttcgcgcaagttcgccgccgccaccggcccgcacgtggtggtgccgattatgtccggcggcaatatcgacaccgtgaccatgggtgcggtgattcagaaaggtatgatcgcccgcggtcgcatcatgaacttcgaggtcgagctgccggatactccgggccagctcgtcaaggtggccaccctgcttgccgagcagcgcgccaacgtcattcagcttgaccacgaccagttcaaggcatccggccactacaccaacgcggtgtctctcggcgtcacggtcgagaccaacggccccgagcacatcgaccgcatcctcgtggcactcagggaagctggattccagcccaagcgcatctactgattccaataccgctggcgggaggccgcgcagaagtgtgctccaatacctcccgctagcgggaggtggcgcgaaagcgccggtgggtggttaaccaacaatcatcagttgcttaaccacccaccggcgctttcgttatgctgaggactacttgttctccgcaatcgtctcgtccaccaacttcggcagcgcgacggcgatatcctcatgaatcaagcggctcgcaagatggtcatattgcgtgtgacccatattcatgatggtgatgggcacgcccgcctgcgcggccaccggcacaatgctcgctgccgggtacacctcaagggtcgatccgattacccatagttcgtcggctttggtggccaagctgtacgacttctccatcgctccgtccggcagtgcctcaccgaaatacaccacatcggttttgataatgccattgcatggcatatcgccacgatacttcagtttgcgatggcaatgtggatcgggttcttcatccaaacgggccatgatgtccgccgtggcatattcctgatggcacttcatgcaatgcgaggtgccgatggtgccgtgcaggttcacgatgacgctgtcgctgttgccggccttctcatgcagcgcatcgaagttttgcgtggccagcagcgtcagcatgccggcttgttccagcttgaccagcgccttatgcgcggtgccgggctgtgcgttccatactggtgattccttctgccagcgccaggagtactcacggtcttctttgttacgcagaaacagatcgatgtcgtaaacgctcatttgatcaggatgcttggtccacacaccgtccggaccgcggaaatcagggatgccagcggacgtggaaatgcccgccccggttaatacagcaatcttcttggtcataactacaggtatacccgtgattcatgaacgaaatccgatgatggagcgttgttgccatgcattgattgtgcgccggtggtgtggttgccgaacgatgaacatggagctgacagtccgaaaactcgtgcgacacgccagtcgaataatggattcgatgttttccggaaacattcgaggggttacgctagccctatcagagcaaattgggctctgtgcgacacgccgaaggaaccgcgctgttatgccgattccttgggttctcgtgcgctttgatttgcgttgtggcgtggttgcgtgtaagttattcacctgttgccgctcagcgcggcgggttccttcttctggttggtttcctgtcttgctggtgtggtggtggtttgagaactcaagagcgtgtttgtactacttctttatagtcaatgattgccagttcatcgtcagccttgtcttttgtggcggggtgccccgggaggggttgaatgatggtgaggttttttgagggcgtccttccttaaggacgtgctcgtctttttcttttttggaaatgatgtttgagagtcatctattcggatgcttttcatgaagttttttttgtggagggttcgattctggctcaggatgaacgctggcggcgtgcttaacacatgcaagtcgaacgggatccatcgggctttgcttggtggtgagagtggcgaacgggtgagtaatgcgtgaccgacctgcccca

SEQ ID NO: 1705 - DNA, 21987 bp, Unknown
  MAG_14  MAG No. k141_11647
acaactcgcgcaagtacatgccttggctggacggcctcggcttctcgctgcagctcatcacgctcggcctcggcggctttcttgtcatcaagggctacatgaccctcggcaatctggtgagtttcaactccttcctgtggatgatcgacggcccggtgcgccagtccggctggctcatcaacgactggcagcgattcaacgccagctgcatcaagattcgtaagctgctcaccgaacagccgcgcatcgtggagaagcccgacgcggccgaagccgtcaagcaggcggtcacgatcgtcgagcaggtcaagcgcgatgatgaggctaccggagcgcccggggcttccggaacatccggtgcccagcagtccgccgaacgcaagtcctgcccgctgcacatcaagggcgacatccgcttcgaccacgtcagcttcgccttcccggacgacccggagaccccgatcctcaaggacctcgacttcaccgtgcccgccggctccaagctcggcatcctcggcgaaaccggcgcgggcaagtccacgctcgtcagccttatctcccgcttctacgacccgaccgtgggccatgtgctcatcgacggcatcgacgcacgcgactggccgctgaccaccttgcgctcgcaggtgtgcatcgtggcgcaggatacgttcctgttctccgacaccatcggcggcaacatcggttttggtgccagcgatgatagcgacgaccgatatatccagaaaatggcccagatcgccggcgcggacaatttcatcaggtcgatgccgcagggttatgacaccgtcgtgggcgaacgcggcgtgggcctgtccggcgggcagaagcagcgcctgtcgctggcccgcgcgctcgcggacaatccgtcgatcctgattatggacgatacgacctcggccgtcgatatggagaccgaggcggagatccagaagcacctcaaggagatggacggcggcaagaccatcgtcgccatcgcccaccgcatctcgtcggtcaaggattccgacctgattctggtgctcgagcacggacgtatcgtcgaacgcggcacccacgccgaactcgtggccgcacacggccgctactgggacatctaccacaagcagctcggactccagtccggcgccgcacaggggttttagaagaggacttatggcacaacgcaatacattccgcgaggatgaggagctggaggagtccatcaacctccacgacatcgctcgcgtcggcaaatatctcaaaccgtatatggcacaggtggcgcgcattctcgtcgtcgtcatctcgatgagctgcatcgtcgtcgccgtgccgtacctgaccaagatcatgatcgacgaggcgatcccgaacaaggacctcggcaagctcggcatcctcgccgtaatcctcgccgcgctgatcgtgctgtacgagttcgggctgcgctaccgcacggtggcgatcacgcgcgtcggccagctcatgctcaaggacatgcgccgcgatatcttcacgcatatccagacgctgcccttcagctacttcgattcgcgcccgcacggcaagatcctgatccgcgtggtcaactatgtgaacacgctttcggacacgctgagctccggtctgatcaacgtgatctccgacgtgttcaccttcgtgatcactctgatcgtgatgttcgtgatcgactggcagctggccctgtggagcttgatcctgttcccggtgctcatcatctgggtgcgcgtgctgcagatcttccagcggcgcgcctaccagaagctctccaacaagcagagcaacctgaacgcctacatccacgagtcgatcgccggcgtgaagaccacgcagaccttcgcgcaggagcaggcccagttcaggaccttccaggagcagcagggcgaggtgcgttccgcgtggatgcacgccgtgcacatccagttcctcatgtggccgggcgtgcagaccatctccgtgatgaccatctcgttcatctacttcgtcggcgtgatgggcttcgggggcgtgaacgtgaccaccggcgtgctcatcgcgttcgtcggctacgcgaacaacttctggaatccggtgatcaacatcggcaacttctacaaccagctcatcacctgctcggcgtacctcgagcgcatcttcgagacgctcgacgtcacgccggagatccgcaacaagcccgacgcggcggacctgccgcagatccgcgggcgcgtcgacttcaacgacgtggtgttccgctacgagaaagacggccgcaacatcctcaacctcgtggacttccacgtcgaaccggggcgcacgatcgcgctggtcggcccgacgggcgccggcaagacgacgatcatcaacctgctgtcacgcttctacgacgtgtccgagggctcggtgacgatcgacggctacgacgtgcgcgacgtgacgctcgcatcgctgcgccggcagatgggcgtgatgctgcaggacaccttcatcttctccggcaacgtgcgcgagaacatccgctacggcaagctcgacgccaccgacgaggaaatcgaggcggcggcgaaggccgtgcacgcgcacgagttcatcatggaactgcccgacgggtacgacacggtggtggaggagcgcggatcgaccctgtcggccggccagcgccagctcatcgccttcgcgcgcgtgctgctcgccgacccgcgtatcctaatcctggacgaggcgacgagcaacatcgacacgcgcaccgaggaggcgatgcaggccggcctgcagcatctgctcaaggggcgcacgagcttcatcatcgcgcaccgcctgtcgacgatcgagaacgcggacgagatcttctacatcgatcacggccagatcgtcgagcacggctcgcacgcgcagctgctcgccgccaagggcgcgtactaccgcctctacgagtcccagtacgcgatgattcgcgtggccagcggagcgccggaagagtgacgagatgttgcgcacaaggatgcgtttagcggcgtttcacatagcgggtgctgcgaccggcaccgattttgatgatcgtaccggagtccaacagtgatttcagcgtgcgctcaatggtggtggtgctggtatcgggcatgcgagcgagaatatcggccttggagagtggaactagggattgatcaagcagtgcttcaatccgcgttcccttggtggctactcgcggtgctccctgcgttctgccgcctgccgtgagattgatgcgttcgtcgaattccttgcacgcggacagtatgatgccaagcaggtagttcgtgaatggcgcataatcattggcgttgtcgtcccatccttgggtgcttgcggccagcgcctcataataagtgcttttactttgctcgataaggtgttcgatactgatgtatttgccgaccatatagccattgcggtacaacatcaggagcgtgagtagccgactcatgcggccgttgccgtcattgaacggatgtatgcaggtgaaatcgagaatgaacatggcgatggcaagcaatggatcggtatgtccatctcggattgcttgcgtgtaggcggaacacgcgcgttcgatcagttccggtgtgacaagtgcggacggtggggcgaatcgtacggtgctggtcccgtgtgcatctcgttcgatgatgacgttgtcactgtccttgaaatgccccgcaaaggtcagtggtgtgtgtcggaagaggtcgcggtgcagttgaagaatgacgttcggggtaatcggaatatagtcgtggctttcgtgaatagccgatagcacgtcacggtaaccggcaatctcttcttcattgcgattgcgcggtgtggctttctccgagacgagatcgttgagcctgttatcgctggtggaaataccttcgatgcggtttgaggcatctgtgctttggatgcgcgcgacggcaaccagcgtctccaatatatccggtctgatcgttgtctgtatgctttggcgcccttttgcctcgtgaatcgcggcaagcaaactcgtggtgtgcggggtgagcaacgtcttacctgattcgatgtagtcgaatgatctcatactgcctcattttctgcatcatacgaacttttctgcatcatattttatcaaaatgaggtagaaaatgggctgatgaggtagaaaaggcggcaggatggtggccatctcgcttgccggttgcgctactttcccgggaatgttgcgctcgtggcaagagacggcaagttcaggcggccgagattggcgatacccgtcgtgtagtcgaacgtcttaccggactgccttacgagcgttgctgacggtagcctacgctgagaaacagcttacactgagaaaccatgagcaagcaccaccatcgcgaccgtagctgggccccggcacctgaagcattgccggacgacgcccagaccatcgacaaccacactcacgtggcctccgtaatccctttcgcgcgcgctatgagccatgaggcgcaggagaaggggcagcccgaagtcccggtgtacgacgtcgaccaattgctggcgcaggcgcaatctgtcggcattgggggtatcatcgactgcggttgcgagctgccgcacctgatgaccgccgtccagatggccctcgatcatccaggtaacgtgcacgcggcgctcgcaatacaccccaatgagtccgtgctccacgggcatcgcggtgtgccggggccggatggtctgcctctcaaatacaagccttaccatgacacgtctttcgaggacgcgctcgccgaagtacatcgcctcgccaccacataccccgagcaagtggtggctatcggcgagaccggcatggacctcttccgcaccggcgaaggtgccaaggaactgcaacgcgaggctttccgcgcgcatactgccctggccaaggaactgggcctgcccatgcagattcacgaccgcgactcccatcgcgaggtcatcgaaaccctgctggccgacggcgcgcccgaacgcaccgtattccactcgtattccggcgaccgtgagatggccgagattgcgcgcgaacatggctggtatctgagcttctccggcaccgtgagctacaaaggcaatgacggtatccgcgaatcgctacggattgtgggtctgggccatgcgatggtcgaaaccgacgcgccgtatctgacgcccatgccgtaccgtggccgcaccaacgcgccgtacatgatcccctacaccttgcgggccatggccgatacgctcgacctgtccatcgcggatgtggcgcgcggcacccgcgataccgcccgcgccgtatacggactgtgagggccgggtgtgcggccgtcgcggcgatgtgttgacttgtaaaatttgtcagaattgtgaacgaggtctaccatgatgtacctgacataagcgagggggatgatctccacctcaatggaggactgaacgtatggctgagtcgaaccaaaggaccgcacgcgcccaaaaagcctcaaaggcccagacagcccaggctggcgccgccaaagccaaggcccgacaggaagaagaagcactgctgagggccgacacctttaccaacgcccccaaggtgtcccgccgcactctcaccaaggaggagcgcgaggcactcgccaagcagagggaagccgaaaccaaggaagccgagaaaatcgccagcgcatggtcgaaaggcggcctcggccgatggtgggcccgcttgcaatccagcccagacaaggttacctggggcatggcgatcgtggcgctcggcgtggtgtacggcgacatcggcacctcgcccctctacaccgcgcagaccttccttgccggtcagggagggcttggcagcgtaaaccgagaggccgtgctcggcatgctgtcgctggtcttctggtcgattacgctgatcaccaccgtcaaatatgtgctcatcgccatgcgcatcgacaacaatggcgaaggcggcatcttcgcactgtactcgttgattcgcaagtacggcgcatggctcgcgattcccgccatgctcggcggcgcggcattccttgcggattcggtacttaccccggcggtttccatcagttccgcagtcgaaggcttgcagaccctgccgccattggaagggttgttcgacgaaaacccaagcctgaccctgatgattaccgtcgtgatcatcgtgattctcttctccgtgcagtcgcgcggcaccgaaagcatcggcaaagtattcggctcgatggtgctggtctggttcagcttcctcgccatcgtgggcgtcacgaatctctctaacgactggtctgtgttcgcggccctgaacccggtgtacggcatcaaattcctgttcagcccggacaatgctgccggcatcgccctgatgggcaccgtgttcctctcgaccaccggtgccgaggcgctgtactccgacatgggccacgtggggcgcggcaacatctacttcacctggccattcatcaaggttgcgctggtgctcaactacttcggccaaggcgcgtggatgttggccaatagcgataacccgcaatacaccgcgatgaagtcgctcaacccgttcttccagatgatgaccccgaacgtgcggtacctggccgtgattctgtctgtttcggccggcgtgatcgcctcccaggccctgatcacgggcgcgttcaccatggtttccgaggccacccgcctcaactggatgccccatctgcaggtgcgttacccggcccgtacgcgcggccagctgtacattccggtggtcaacggcgtgttgtgcgtggccacgctcgccgtgctcgccatcttcaaggattccgaacacatctccgccgcgtacggcctggcgttgaccattacgatgatcaccaccaccgtgttgctcggcgtctacttatggcattccggcaagcgggtcggtgccatcgtgttcaccgtgctgttcttggcgattcaggctatgttcttcatcgcgtctatggccaaattcctgcacggtggttggttcaccatgttgctgaccgccgcgattctgttcgtcatgtacacgtggaatgagggcaccaagctcgaacgtgcgcaacgccgtcacatgcggcccaacgacttcctacccgcgctcgacaagctgcacggtgatttccgcatcccgtattttgcggacaacatcgtgtacctgacctccgactcggaaaccaagcgactcgacacggacatcttcttctccatcttcgccgaccaccccaagcgtgcccgtgcttggtgggcagtcagcgtggaaaccaccgacgagccgttcacccgtgaatactcggtggaggacttcggcacgaactacatctaccgcgtgcgcttccgtttgggcttcaaggtttcgcagtccatcccggcgtacatccaccagatcatgcacgacctgtccaaaaccggcgaactgcctaagcagaagtcgatttaccccaaggtcgacgccgatccggacatcggcaccatccgttacgtgctgattcacaaggccctgatgccggaatccaaggtttccgcacgcggtgccctgtcgttgcaagccaagtacgcaatccgccgcatggccggctcgccggttaagtggttcggtctggcaccttacaacccgctggtcgaggtgcagccgctgttcgtctccacccgccgcccaccgcgtctgaagcgcaccgatacggccaagaccatcacgacgcccacgccgactcgtgcagtggccgacccggccgccgtccccgacccgatggacaccacgtccgggctcgggcgattggtacaggagctcgatgccgccgtatcggccgaggagcggaagatcgctgagaccgctgccgccgctgcggtcgctgagcagggcgataagggcaaggccaagaacggcaaacccgccgccaagcctcagcgctccgccaaacagaagcgataacataccagtttgcagcggcgctgatgcgctctataaagaatgcctataacagtcgccgcacgtcgccacacggtttcggtaagttgaaataccatgtgcagattactgggatacgcgacggcaggcttcaacctgagtctcaacgccgtgttggggcaagacaatgtcgaggatttccgtgaactgtctgaaatccacaatgatggctggggtgtagcccagctttccgatcccgccgaagcgccgcacgtgcgcgacggtggcgcacccaccccggaaaccggcacccgaatctacaagtcgaccatcgcggcccgtcatgacagcacgtttgagacgctggccgacgaaccgtctcgcggtgccatctggcacctgcgcttggcaagctccaatctgccgctcatcatggagaaccagcacccgttctatgcgaacggcctgagcttcatccacaacggcgatatctcggacgccaatggccgcaacatcgtcaccaaccgctcatacccggtgaaccacagcgtgctcctctccaccggcggccgttccgactccgctatcttcttcgcggtgattctggaatacatcggcttcggcttcccgctcgacgaggctgtggcccaggccgtgcgcgaactgcgccaagcctacccgaagtccagctacaactgcatgattcagtccgaggaccagctcatcgccctgtgcgccgccggtcgtgagaagaccagcccgcgcatcgtggaaatctacgatgagtatggccgtggcgagcaggccgccgactaccgtgtgatgcgctaccgtgagctgcgcgacgacaacggcgactccgccggtgtggtggtctcctcttccggctatgagcaggaaggctggaacgtgctggagaacgaccagatgatcatcgcctccaaccgcaacggcacctaccgtctccgttccatctgaaatagcttcataagctccctctgacgagggggcctagagcctcaaatcatccgcatcccatacttctccgccaacgccggaatatccggcacgccatacttggccaccagatccagccatcgttgtttgttctctccgccaaatcgctcggctcgggccgtatacgcctcgacctgcaggaacttcggcggcactgacttgctatggaacttgtcggcgtacatcaccacttcctgctcgagattcatcggcacatagtcggctggtggcaatggcagctcctggcgcaccacatcctcgcgcgtaagtcccacgccggtatggttgcggcagaactgggcgatggactcgtccacgccctcgtcgagcagatactcgtagcccttaagaccgtgcagaatgtagcgtttcttgctgaatttgagcggttcgccgtcagagccgtcatgcttgaacacgcggtaggtgccgatgtcatgcagcagtccgccgatgagtactaaatgctcgtcgagcagacgcggcggcacatgaccgccggtgacgcctgcggtgggcggtacctccgcgtccttcggtaatgtgcagcggcgcgtgaacagcgcgttctgccggcgcacgatctggcagccgatggtcgccacaatcacgcaatgcgtgtgcaccagctcgtacgccgccttggacggcgcgattttgcggtgcaactcgtcgatctgctccagtgtgggaatatatccggtcatgattatcaggtttcgcctcgtacggtcagatttatcctcagattagcgcggcaatgagccgcatcaggattgtcaggagctgattcggacatctcgacatgcctatctccgtttcaaggggctgattcggcatcctcctgaggtctacttccgtttcaaggggctggtgcccaagtatacgcggcgtaaaaacggcggaatgacgttggcatgaagccgtttatactcggggtttggcggatgaccagccccttgaaacggaagtagacctcccggaacacgcaaatcagcccctcgaaatcgaaaaagctcacgatgtttggtatgtatccgaacatcgtgagcttcaagagcctgtgctggtgtgtctggtgtgtattgctaccggacagatcagatcttgaagagtgtgtcggctgcttcggcgatctcgcgtgatgcggtgagcacgataacgcaatgcttcgggtcaccggtgtgcgccagcttggccagcgcggcgaacacggtcacctcgtcatccgcgttcagccctcgtgtcggctcgtcgaggatcagcacttcggcctcggtgctgattgcacgggcgatggccaccaaacgctgctgcaccaaaggcaatgtgccgacggccacgccgctggtggcctcggagaagccgaccttggccagcagttcgcgggcgatcaccggcttgggcttcaggaagttgcggttggacgcattcatggcgtacagcacgttttgttcggcgtcgagattcggttgcacggcgtgcagctgcggtacgatgcccagacggtggccgcgcagttccacgggctcgagctcaacaatgttggcgctcttgttcatcaccgtgccagacaccggcgtggccaaaccgctcatcacgcccatcagcgcgcgacgtttggcgtcggcggtgatgcccgaatcggggtcgtcgctgatcagcagcgcgtatgcgtgtccggagtagcagaagaaattcgcgccatcgaggatgttgaccttgcccttggggccggcgaccgtcaccttgttcagggcaaaggtcgggtaggtcttgagcagaatgtcgtcggaaccgccgcccaccaacacgcgatcgatacgcgaggccagcgtcatggtgggttcggccgctttgccctgaggctccgcatgctcggccaatgcgtctttgtgatcggttttggccagtcggagtgtttcgttgacgcgggcggcattgcgctcggtcacttcggcggatgcgttggccgaagcgatggcgtctgcttcggcctcgctggtctcgtcggttgctccggtttcggcagatgccagtgcgctgtaaataccatcgtcaacagtgccttcgtcatcaacgtcatcgaaggtcacgctgaactgcacggagtcagctggaacggattcaatggcgtcgttcgtctcagtctcagaagtcacttcgtcagccgttgcgtcagtggtcttctcgagttcctgatcgttgttcttgtcgctcatgcctgtgcctccgcatcgtcggttgtggtggtcgtcttattggcctcgccggcatcatgagcggtggcctcagcagcttcatcggtctcagcagcgccagtggtttcggccgtttcaatcgcctcagcctcgctcacggtgccccagtcgccatcggcggcgaacagcttgttcgcgctgaagaacgcaaggcgcagggcggcaagaatcgccaggatcaggattgaacccagtccataccagaccatggtccaaatcaggtccgatgtcaccgggatggcatggccggatgccagagcaggtccgatcggcttggcggcgaacgcgcctccgaccagaccaattacgtagaagggcagggtgacgatgaacacttccagcatgaactgccatcccaaacgcccgcgagtgacgccggacaccagtgccatgccgatctcgtcatcacgcttgggcgcccacacgcctgacagcacgaggatgagcaacagcacgccgcccacggcaaccaacgcaatggtgccggtcttcgcgcgcgaggatagcgtatccagcggctccagagaagcgttgtaggattccagcgaaggggaagacacctcgtatcccttggcgggcagcttggacttcttgagggtggataccaaggacttgtatgtagcgggatcaccggtgtcgaacaccacgtccagatccggcatcgcccagccggaggcggtcttgtcgttggactgtgggtcgagtccggccttggcgaaggtctgatagttggtgaagatcgcgttctcgcggttgcgggcggccgtcaccggattggcgacggcggattcggatgtgtacttgtagatgccgcgcaccttgagcttggccgtggtctgggcgtccgaggcggccgccaccttgagcgtatcgcccaccttcaggttgttggcggaggcaaacgcttcagagaccagtgcgccggtggtgttcgggttggaggacttgttgtcgtagctcaggtccttgccgtccacgatttcgaaggtaccgaggtcgctggccttggcggcatcctcggtccagaaggctcgccaaatgagctggccgccggtctcatcatcggaggccgagcccagcgatccgccgtccagggccttcaaatcaccgctcacgcgggccggcacggtttcggtaaccgtgaagttcaacgagttggtggccgaccggacgagcgtggcgtattcggtgtatgaggtccacgtcatgtaatgcttggtggaagccgagtccgtagcggagaccttcttccacgtagccgcagtcgggcgaatggccaacgtggccttctgctgatcgtacgcggtggtgtgtgcgttggtatcttcttgaatgatggccagtccggcgactgtgccgaaggtgaccgccaaggtgatgaacgcggtcagggccgtacgtcctttagaacgtgtcagggcccgccaggcgttgctgaggacgaacatctaattgcctctcccgttctcctaagccgaacaaatcaatacggctttaactattgttgcgtttagtgaccgttttcttgcgcaatactgttatactcctcaatgaagtctgagaacattctgacagcgatgtggtggtcatgaggggatttgcacccggtatgggataaaccctcggtctatttcggtggcatcggtacactggcatgagatatgcgtggcgtcacgtgtgctccggcatgtctgcgattccggattcgcccggagtccggcatccggaagcgtggccttgcgccgttggataagagtatgagctgagcagattttcgggtaggataagtatgcgattcacttcagggcattcgagccataaggctgtggggcgtaggagaagccgccatgccggtaacgggaaatccaatcgctccgcatctacgaatagcgttgcaaatcagcagacgggtcccgtaaacctgaagactccccagcacgtgggtggcgacggccgttcgctgatcagccgtacaccgatatgggtgcgagtggtggttgtactgctgctgacgttgctggccagcgtcacctgtgtgggcacgctctacgcggcatccgtctcgagaatggccacggatgcgcagcgtgtgctgacatccgccgaaagtctggccaattcggcacttggctgcggcagcgataagagtctgtcggacatctcccaagagttggtcaatgccaccaatgatctcaacgaggagctgaacggcccgcagtgggacttcttccgcgaccattcgcgatttggcagcgacatcaccgctgctcgcgaaatgctggcttccgtggatacgctggtcaacggtccgttcactgatctgctgaacctgtccaaacgattgcagggcttctccctgaagaatggctcggtggacgtcagcgccctgatggatatgccggatatcgtcaagcaggcgcataaggatatctcgcagcagctcaccaagctcaacaaggtgccgactccgagcgtcgccaaggtggccaccgtgctcgaatccgaaaaggctgcgctcaagaccgtggattcgatgctcagcgaatacgatggcctcattaacttgctaccgcaactgcttggcgaggacggcaagcgcacgtatctggtgatggtgcagaacccggccgagctgcgttcggcgggcggcatggtgggcaccatcgccgcaatcacggcagataagggcacgattaccatcggtgatttcgccaccacttctggttgggacattcctgagaagccaatggatgctacggtgctgaaggagcgccaggtatttggcgacacttttgaccagtacccggccaccacgaccatcgaccccgaattccagcgtgtggcacagatgaacaaatacatgtggctgtatcagaaaggcaacgaagacgagaacgtagcgggtgtattgtcattcgatcccgtattcctccaggcattgctgggagccacaggcaaggtcaagctttcggacggccgagtgctggatggcaccaccacggtgccgttcttcgcttcagacctgtacacggattacccggacttcgagcagcagaacaacttcgtttccgaagcggctcaagcaattatgaaccatgtgcttggcaacgcgaatgcttccaccgcatccccgctgttgaaggcaatcagagataccagcgctagcggtcatttcaagctatggatggctgatccggatgagcaggaggcgctgattgccaccggacttatcgacgataaggccagtggcgagttgtctgctgacagtcaggtacctgaaaccggcatctatctttcggagctgcagcaaggcaagcaggattggtatctgaagacctccaccacggtcacaaaaacctgcggcgacgcctcggccagccggaacgccctgtattctggcgtgctggataagcgcatcacgacagctgtgcgtaacacgcagctgggtcagtttacggaagatcagctcggtgacgaatacacggtcaccttcaccatgaagaacacgctgactaaggctaaggccgaatcgttgcctgatttcgttaatggcggctcggagaatccagtgctcggtggcatgctgtaccgcgtggtgcttaccgccccgtacggtggcgaaatcaccgctgtgcaggctgatatagattcatggggtaccaacaccgcgagcctgtatgaccgtcagtacattatgttcaaccagcagtggatcgagcccggaaaagaattgacgattgcctataccgttcgggtcagcagcgatgccacacatccactgaacgtggtaaccacgccggtggtgaatgcggatggcgtcgagacgggctccaacggtaaggtgacggatgagtgcccggccgatacgaacggcgccgatggtgcgaacggcgccgatggtgcgaacggcggcaagaacgacgcgcataagggcgcgtcctccgatccctcggccggcttggacaccttggacaagctgaagagccagatcagctgcccggtcgatctgaagtccctgacgggatccatgtgatgaccatgcccgattccgtttccggcgtcgccgtttccgacgccaccgtttccggcgtcgccggcaggccgcgcgacgtgaactacgatctgctgcgcgtggtggcgatgtgcctggtcatcggcgtccacgtgatcaacaactacatgcccgtcaagatgaccctcgccggcagcgcggaaacggtgcgatccgtgctgttcgcgttgttcatggtctgcaatccgctgttcatcatggtgtcgggccggttcaacctgacattcgatgccgaccggccggtgagcacccactcagcgggccgtctgccgggctctggctctgatgcccgggcaggcggcggtgccggccaagccgatcccagcagcctcgcgccgtacgtgcgctactactacaaacgtttcgtctcgctgattgtgccgtatctgctgtatgcgggcggcatggggttcgtcgcctacctggtgattgatcatcgttcggttggcggcgctgtgtctggaacgttgtttgatctgttttccgggtatgacgattccgtctattggttcgtattcatgcttgccggtttcgtgttggcgacgccgtttctggccgcgatggtgcgcgcgataggccggtcgggtgcctggctgctgatcggtctggccgccgccgtggccgccgccgagcagatctgcaatcttgccggatacccgttgacgttcctgcagtcgttcccctggcggggactgctggtctaatatctgttgggattcgtgttggaatactatccgccgtccacgcgggcgcggcgcggcttgtatgcgttggcgccgttcgccctggcctggaccgttgccacgccatatctgttcgccggccagcagatccaggtgggccgcacgctcacggtctccttcgcggtggtggtggccgcggtgttcctgttcttccggtacgacgtgcatccggcgtcggcgcggctgcgcagggcgatcacctggctggcgggatactcctacacgatctatctggtgcattcgccgctgtccaaggtgctgatcggcccgcggattcccgcgcccacggacggatggtcgtacgcgggcatcagcgtgctgatgttcgcagccacgttgctcgcggcgttggcgttcgcggtggtcgccgacaccgtggtactcaagcctgtgcagcgtctgctgcggaaggtacggctgtagattcggatacggcgctatgccacggtatcaaagccaggaatcccagcagcagaagcggggtgaacgtgaatttcgacatgcccatcagcacgcctacggtcatgagcgcggtcaatcgtccgttgccggcacgcggatcggccatgcaggaaaacagtagacacgcgaacaataggcacagcgcctgtgccatggaatcggccgagatggcgaacgaatagcggaagatcaacggcggtgagaccaagagtagggccgtaggcaagcgccagcgggggagtgcggctacggcggcgaacatacaaccggcgtacaccagcaacatgattacttccgcgagtacgtatgtggggccagaggtgagcgttgagtctgctcctatggcaaaggcggccaattgcggcagataggcgaagggtgaattaaccgctgcattgttgtagggcgtgtccacgcaggtggtgtttgcggtgctggtgctgttcgtgccgctgcccgctgcagtgctgcccgtgccgtaccgttcaagaaaatcggcattgacggcagccggatcgtaaccgtcgtaatggtcgatggagaaccggatccaatcacggctcacgcacccgcccacattgccgctgcccgaatgcaggatgctggtcgagtcgaccggccgagccagcacatccccgttaacgatgccgtcaatgcgatatgtgtgcgcccatacgtctggaatatgcccggcaggcgtcaccgcaatcagcacgaaacccatcagcagaatcaccgcttccacgcagcgttcgccgccactcgtgagaacacagtcaaaggagcagaaacagcatcagaggcatcggaagcatcagacatatgtcccactatatgtgaggtgttggtggtagtagtgatgcataaaagaaatcggcctttcgctgtttggtgtgggtgaagcgggttaggcggtgacgacggtagggtagttttggtggcatggataccacaatgctgttctttctgcttttctattgtttttcacagtctgagctagacgctaaaagatggggacacaacaaccgtaggttgcgctccccatcacgtttctatatggcgcttagtcagtgtcttttgttgtatgcgaatctgttggtgtcaatgaggaaggtcttgcggtcgttcttggccatgacgtcgaggatgatgccggcgatgatgagcagcagccccgtgatgaccagcatcaccgcgccgatcagtgtggggaagtgggtgaccacgccggtcttggcgaattcgaaggtgacggtgccgcagagcacaatgccaacgatgccgatgattaggcccaatccgccgaagaaggggaggggcttgtattcgcgaatcatgcggaagatggtgctcatgaccttgatgccgtcacctacggtgtccaacttggacactgagccttcggggcggtcacggtactggattggcatctcatagagtcgcaggttgttgttcagcgagtggattgtcatctcggtttcgacctcgaagcctcgcgagagtacgggataggtcttgacgaaggtgaagttgaacgcgcggtatccggtcatgatatcggtgacgtgcgcacggaacaggtggttgatggagccgcgcacgaggcggttgccgaagttgtggaacgggtgcttgttctcctggaagtatgtggaggagaggcggtcgccgatgaccatatcgtagccttcgagcaccttggcgaccatgtcgggcgcggcggcgatttcggccgtgcggtcggtggagttgttgtcgtacacgtagatggccgcgtcgggcagcgccgcacggaagtcgcgcaccaccttgccaatggtcacctcttcgttatagcaaggcaggagaacggcgacggtctcatttctgcctcaagcagggggcattgctatacgcgttgactcgtgtgatgaggacaaaatagatataatccaagcactgtaggaggggccgtccgctggccgccggcccctcctacagtgtggtttcgatgcggtaacgggggcgatgtttggattccatataaattttgccgacgtattcgccgacgatgccgagggagagcatgatgagtccgccgatgagccagatggagatcatcatggacccccagccggcgatggcgtggccgaacccgagcgagacgagcacgtacacgaacatgccaatcgctaccaggatagacagcagtccggcaccggtgacgaagctcagcggtttcgtggagaacgaggtgatgccctgaatcgcgaaggcgatcatcttcttcaacgggtatttggattcgcccgcttcgcgttcgccgcgctcgtagtagactttgctggtctggtagccgagtgtgggcacgatgccacgtaggaacaggttgacttcgtggtattcgctgagcgcgtcgagcgtctcgcggctcatgagacggtaatcggcgtggtcgggtaccgtctcggcacccatccactcgaacaccttgtagaaggcttcggcggtggtgcgcttgaaccatgtgtccttcttgcgtgcggaacgcactccgtagacaacctcgtcgccgttgcagaatccgtcgatgaacccgtcgaccgcgttcacatcgtcctgcaggtcggcgtccatggagatggcggcgtcgcagccgtaggcgcgcgcggtcatgagcccggcgaggagcgcgttctgatggccgcggttgtgggagagctttacgccgccgaacaagtgtgcgtcgcgttcgtgcagattgcggatgatgctccaggtgccgtctttggaaccgtcatcgacgaacaggatgcggctttgtttgctgatccgtccggtttcggtaagatgtgcgactttggcggccagcacgtcggccgtgtgcacgagcccttccgcctcgttgtagcagggaagcacgaaatacacgaccggctggtcgcggcggtcggcgcgctcgccggaaccatcgccaccggcgctcgtgatgtccgatttctgcgtgtttgtctcgaagatcatcttcccatcctcatactcagttcgaagccgtctcatcccggtcccggcccatactcatgtgctatagatagtttacccgcgtaatgtcgtgcgtgatttcccgtgattttcttggttcggtcaatttcggtatttacatgttgatgcttgcgttcaggttcctgttgctgttcggcatgcgtgttcgtgccgcttgtcataaaccggttcttgatgtcatgagcttatcatgatgcaatcatgataagctcatcatagagtatttatcttcacgttatcatgagatttcagacgtgggtttgaagtcgattggaggcgaccgcttggatccatgtggccgcaacaaataagacaaatgagctgatcaagggggatgatgatgtggacgaatgacgatatcgccgaggtgctggaacatctacgcgtccaaggcaacgatgatgcccgtttcgaggcgaaatcctgtgctcggaccatcggcaccagcgtgtgggagagtgtgagcgcgttcgccaacaccaagggcggcgtgctgttgttgggaatcagcgaggacggggatttctcgcctgttccgggattcgacgccaaccatattgcatcgcagttcatggatggtatgggagatggcaatccgcaaggagcacggttgacgaatcctccggagtatgacgtttcccgatgcgagcagaacggctcgtcgttcctggtcatcgacatccatgaaaacggcattcagcacaaaccctgctatcttacggcgagagggccgcaaaccggtgggtaccgccgtgtggacgacaaggatttgagattgtcgccaaccgaagtgttcgaaatgacccatgccctgacgctcagttccgcggatcgtatggttgtccctgaagccgacgtctccgatttgaatgccgaggcggtggacagggtgcttgctgagcatcgtaattccaagacgctgcgcgggactgatactcgtcttgagcgcatgaccagattgaatatggtgaacaaggttggagaggtgcgtcttgcgggactgttggccgccggacagtacccgcagcagtactatcccaagctgatcattgacgtcgtcgcacatccgggtgtcgagaaatcggcggttgagggtccgcgcttcgtggatcgtgtgcaatgcgacggcaatatgccggaggcaatcgaacaggcggtggaggccatcgccaaaaacctgcgggctcccacgttcgtcgtgggggtcggagcccgtaccgatagcgagattccaaaggaggtgctgcgcgaggtcgtcgccaatgccgtggttcacagggaatatgatgcgcaattcctcggagaatccgtgaccgtggacatctaccccgatcgggtggaggtgtcgaatcctggcggattatggggtggggtcacgctggccacgatcggcagcggcgtgtcatgctgccgcaatgcgacgttgatgcagctgcttcatcagataccgtatgacgatgcgaatgatgtgaccgtggaaggcggtggctccggcatccctctggtgattcgcgagatgaaatcccacgcactgggggaacctgtgttccgcgcgactcccgatcggttcacggtcgttcttggacgctacggcgtggagcagcaggagaaccgtgactggcttgatcatgtgggcgtccccttgactcgtcatgaacgtatggcgttgctcttgttgaagaggcatggcgatatgacggttccgcagttgcatgtcgcgctgtatctggattccgacgacatcagggtgattctgcatagattggtccaagcggggctggccgatgaaatcggccctgatcggtacgcactagcggagaaggtcgatggtggggagccgaatgggggccgtaaggggcttacggcatcggaatccgcgatactgtccgtattgtcggcggatacgccacttgatgtccacgaaatcggccgtcgctcggggagaggccttcctacgacgcgtaaggcgttgagccggctcgttgagcgtggagtcgttctcgccactgcgccgccgcgcagcagaaacaggaagtatcttctcaaaagataggatgatgccgtcgccggaatgtgcggtggagttccgctgattttgtccgcttcgctccgcccgccttatccgccgcgcacattagactgagacgcggttgaaaacgttgggattacgcctattcccgcctgcctgttcccgcgtgtgagagtccggtcgaccatcggaacgcgtggcggtgtacgggtgcgcgggatgggtgcgtcaaggagttacgcatggtggaaaagaagtggctcgacggctcggattcgaagggcgcgacgggtgcggcgcgtgcgacgggcatgctgcgtgcgttgcgtgcgcgtgcggcggcgtccggtgcggggcgcggcgtgatcgcggcggtgacgtccgtcgcggcggtggcgatgttgggcgcggtgtgcgtcactccggccagcgcg

SEQ ID NO: 1706 - DNA, 6053 bp, Unknown
  MAG_14  MAG No. k141_11660
cctcggacgacaggtgcgaatactgttgacccatgagtgcgacaccttcttaagttagaaacttcgaacacttccaaccctagacaaggtgttgcacttctatttagaacccgggaattttaccgtcagaccgggctgccggtacaataagtcaccgaacaccgactgatatgaggagcctccgtgaccacttccggcattaccgttttcggccaaccatcccagcccaatcatggtgccggcgggcgaatcgccatggacgatgccctctttcccaccgattatgtggcgcttgatctggagaccaccggcttttacccgaacagttgcgccatcacggaaatcggtgccgtgcgcgtgcgggaggggcatatcgtcgatcaattccagcagctggtgaatcccttgcggccgattccgcgtcagatcaccacgctgaccggcatcaccgatgcgatggtggccgacctcgatccgattgacgaggtgcttccccgattcatcgcatggctcgctaccccggctgccggtcccaccgttgagccgattgtcggtcataacgtcagcttcgatctgcgattcctggattacaacacccggcatatcgccggctgcggctttgcctgcgcggattatgacacgatgcagatcagccgcgccctgttccccgcgcagcggcatcaccgtctggctgacctgatcgtgcgcttcggcatcgcggacaatgaggaacaccgcgcattaagcgatgccatccagacccagcagtgcttcgaatggatgcggcattatgtcaccgagcatcacgaatccgaagcaatccgttggaagcaggcgccggccagaaacagcaccgaaattctccaccagcagctagtggtaaagcggtagttacagcccgtattattcgcacatagaggaaaactattagtcgctgggctagagaccttatagtggacggattcctctcgcatatcggagaaattcgggataccacacggttagcggccaatttggggccggcgtcccgcaaccgtgcgggacgccacgcacgtcaaacgatgcacacggctggcatcccacaccccattccacagaaccattggaattctgccaatcccacaaaccggtgacgacaccgtacatcaggttctgtgggacgccagaggaaaaacacccgaaatccgctggcatcccacaccatgtcacaccgcacctgcagcatcgcaccacaccacatcacgccgacacctattcgtgccccccatttgcataattcgacgtttttggaagatggcgcacacatgcatgtgcccccatttgcatatcaaacggttgacgcacaaatggggacacacaaccacaactcagaatcctcggaattccgccaatcctgagatttcatcccccaacacggcaatcgccgcctctgccaccattttcgcatcaaacgattgacgcaacaatggtggcgcatgcccctttgtatcggtatgaatcagtccctgccgtcaggctctccccctattgtgagggccgactggcagggactgaacacgcataatcacatgagcacgccatgccaagcatggacatctcagtacgaacagaacctattcgcacacgttacagcccgtattccttggcgatgacggaccagaggtcggcggcggcctgatcgacggtttcgttgacgatggtgacgtcgaattcgttttcggcggcgagctccactttggcggtttccaggcgacgggcctgctgttcggcggtttcggtgccgcggccgatcagacggcgcttgagctcttcaaagctcggcggcgcgatgaacacgtacaccacttccaagtcgagttcggcggcgcgctgcttgacgcggcgggcgccctgcaaatcgatttccagaattgttggcacgccggcagccagatgctcctccaccggagccagcaatgtaccgtagtgggccatgccgtgcaccacggcggtttccaggaactcccccgccgcttcgcgggtcaggaactcgtcttcggtgaggaaccagtagttgacgccatcaacctcgccggggcgcggggcacgcgtggtggcggagacggacacccacacttcggggtggtcggcgcgcagcttggcttccacggtgcccttacctactgcggtagggccagtcaggacgattagacggccggcatgggtgttttcagtcatgggttcctccggagatgatgtggtgtgcagcgattatgaatccaatgtggtaacggctcaccggcgagatgaccggtaactgttacagccccgacgaacagggaagaatatgaatcgtgatgcgacgtatgcaatgagatagatacgtacgcatgccgcgacatctgattccgttctgattactggttttctgcgccttcggcagtggcttccatcagcgactgacgtacgtcaagcgcaatcgactcggtagcttggctcagtgcggcgatatccggcccatgcgaggcgataaagcgggacacggtaaccagcacgttgccgcgcgtaccgcggaacacggttttcagatccttggcctcggcaccctgccaaccgtaaccgggggaaagaatcggaccggtgaacttggaggggtccacgccggaatcctgcatccattggccgatggtggcaccgatgatcagacccaccgagcccatgccttcgatatccacgttatgcttctgcgcggtggaggcgatgccgtaggccacggtacgtcccttgtaatcgccgctctggcgcaacgcggtctgcagactcatgccttccggattggaagtcagggaggcgatgaacacgccgcgtccgttttccaacgcttcggtaatcaagccgttcaacgagcgcgcgccatagtacggcagcagcgtgatggcgtcggccagcaacggtgcaccgggcttgaaataggcgtccgcgatggcggaaatcgtggtggacaggccgccgtgcaggcagtccacgatggtgatgacgcccatttgtcgtgccgcgtagagcacgcgctcgagcgcttcgaaacctttggctccgtagcgctcgaacatcgacgtctggaatttgactgctgcggcgcgcccgttggcggcctgcagcatacgcatggagaagagttcggcgccttcggcgtcgacgttgtatccccagtcggtgaggagcttgcgatgtgggtcaatgcccacacacagcggtccgtatttggccattgaattgctcagtcgcagaccgaaatccgaacgttgtgcctgcaattcctcactgctgggtgtagtcatcagaactcccgtcgctccaattcgaacagctgcttcgaatgctcctgaatgctcatgatctgataatcattatgcttcacggcctcgatagccagcagtgcggcttggaactcggtgatggtggtaaactgcggcagatcggcggcaatggcggcagcacggatggagtagccgtcggaacgggagccgcgcgagttcggcgtgttgaggatcatgtcgatcttgccttcctcaatgagctgaaccacgttcttgcccacggagccggcggcgtgatgcacctcgaccggggcttccggatcggtgtccacgcgggtgctgatcttgtccacgatgttcgactcgatgccgtaacggcgaagcacggaggcggtgccctcggtggcccagagcttgaatccaagctcttcgaggcgcacggcgagcagcggcagctgacgcttgtcggtgtcgttcacggaaatgaacacgttgccgtgggtcggcaggccaccatcgtaggcggcgagctggctcttggcgaaggcgtgcgggaagtcgcggtcgaagcccatgacctcgccggtggagcgcatctcaggtccgagcaggatgtcgacggtcttgcccaccggggtgcggaagcgcttgaacggcagcacggattccttgaccgcgacctgctggccggggtggatgtcgccgccgtcgcccttgggcagcagcagaccgttggcgcgctggtcggcgatggtttcgccggccatgatgcgggcggcggccttggccagcgccacgccggtggccttggaggcgaacggcacggtacgggaggcacgcgggttggcttcgatcacatacagcgtgttggccatgaaggcgtactgcacgttgatcaggccctgcacgtggcagcccttggcgatggcgtaggtgccttcacgcagacggcggatctggtcgtcggacagggtggacggaggcagggtgcaggcggcgtcaccggagtggacgccggcctcctcgacgtgctccataatgccgccgatgtacagttcctcgccgtcgaacagggcgtcgacgtcgatttcgatggcgtcctgcaggaacttgtcgatgagcagcggggagggcaggcggccggagaccacggtatcggccttggcctcggcaagcgcgcggtccacgtacttggtgagctgcttgtcgtcgtagacgatttccatgccgcggccgccaagcacgtagctcgggcgcacgagcaccgggtatccgatgcggtgggcagcgtccatggcctcttcgaggctcagggcggtgccgtaacgcggggcgttcatctccgccttcttgagcacctcgccgaacagctcgcggttctcggccagatcgatggattccggggtggtgccgagaatcggcacgccggcggccttcagacgcgcggccaaggacagcggggtctggccgccgagctggacgatgacgcccttgaccgggcccatcctcttctcggcctcgtagatttcgagcacatcctcgaaggtgagcggctcgaagtagaggcggtcggacatgtcgtaatcggtggagacggtctccgggttgcagttgaccatgatggtgtcatagtccttgccaagctcctgcacggcgtgcacgcacgtgtagtcgaactcgatgccctggccgatgcgattcgggccggagccgaggatgatcacggcctcgcgctcgcgcgggcgcagctcggtttcgtcggcgtagcagctgtagtagtacggcgtggcggcgtcgaactcggcggcgcaggtgtcgacggtcttgtagaccgggcgcaggccgtaggtccagcgcagctcgcggatggtgttctcgccttcatcgcccaagccacgcaggtgggccacctgcacgtcggacagaccggcgagcttggccttcttgagcagcttcggggtcagggtctcggcctcgcgcaccgtcatggcggtctcgttgatgaggaagatctgcttcaggaaccacgggtcgatcttggtggccgcgaacacctgctccagcgtggcgccgccccagatggcgcgcatgagctgcaggtaacggtgttcggtcggggtgtggatggcctcaagcagttcggccacttcctcggcggacggcttctcgccatcccagttgaagcccatgtggcgcttgtcgatggaacgcatggccttgccgagggactcctggaagttgccggccagggccatggcttcgcccacggacttcatggaggtggtcagggtggggtcggcgcccgggaacttctcgaaggcgaagcgcggcaccttggtgaccacatagtcgatggtcggctcgaatgaggccggcgtggactgggtgatgtcgttgcgaatctcgtcgagcgtgtagccgagggccagcttggtggcgatcttggcgatcgggaagccggtggccttggaggccagtgcggaggaacgggagacgcgcgggttcatctcgatgacgatgatgcggccggtcttcggatgaacggcgaactggatgttgcagccgccggtgtccacgcccacgccgcggatgatggcgatgccgatgtcacgcagcttctggtattcgcggtcggtcagggtgaagcagggggccacggtgatggagtcaccggtgtgcacgccgaccgggtcgacgttctcgatcgggcagacgaccacgacgttgtcgttgcggtcgcgcatgagctcgagctcg

SEQ ID NO: 1707 - DNA, 3650 bp, Unknown
  MAG_14  MAG No. k141_11903
caaggtgacgctgaccatcgtgcgcgacggcaagaccatggatgtggacgtgacgctcgatcaggaggagtcgtcggtgaacggttcgtccagctccgattccaacggtaacagccagaataagcagaacaaccagaacggcaacggccggaatggttacggcaatggcaacggcaacaacgatggcggcaccggtgatggcggcggcttctccgacccgttcggcctgtggtaaagctggttcagcgcgtcacacggcgttgagcggtaaccgttgaacgccgtgtcagataggcaaaggtccgcagcagtgagcaactcctgctgcgggcctttcgtatacgcgggaagcgtttggctgggtcggccggagcggcggcagatatcttgttccgtgggcttttgtatgcacgggaatcgttctggcaggacgtcagctgcaggcgcataagggctgcgagcccctcatatgcacgggaattcttggcggaatcgtaggaggggggcgattgatgccttccgactgatccgccaacgtagtttcgcagcctggcatgtcgcgttcaggccgctgatagagtaggccaagcgctgattcgggcaatgtctcgaacgatgcgcacaataattcaacacataactaaaaacgatttctttacgccgtgtatcggatggtcgcgcggagccgaaaggccctaagcaaagccgccggtgggttaacaaggcgtgaccgcagcgccgattgcgcgggccacgcttgccgcaatcgactccgtatacgagcgtaaggagcaatgatgagcggactcatcagattcttcaccaaaatcctcgacatctgccgacttgtgccgatgcttcccgttgttgttatcgccgcaatcccgctggcattgctgggcgattggcgcccatggggcaacgcaattgcgatgccggtgctgggtaatcctggtgtaggccaatggctgataatcgcgctggtggcaatcattgtgattgacacagtgcgtggcatgattgacgatttgcgccacggacaagtcggcgtcgatttgctggccgtagtggcgattctttccaccgttgccgtccgcgagtactgggcaagctgggcggtcatgctgatgattacgtccggcgaggccattgaggaatacgcgcaggccaaggccgagcacagcttgaccgcattgatgcaggcagcaccgcaaactgcgcacgtcgtcaacttgcctggcgtggggtgtggggctgccgctgataaggacgattcgtccgatggcttccggcgtgtaggctcggttccggcgacgtcctcccctcagtcgacttcgccgacagctccccttggagaggggaaccaagtaccgccgtcgaggggagctgactcgcggagcgagactgaggggagctggccggctgaggccgccacgcaccgcttcgacacggtgccggtcgagcaggtgaagctcggcgatgtgctcatggtgttgccgggcgaaaccgtgccggtcgacggcgaactgctttccggctcggccacgctcgatctgagcaacatcaatggcgagccggtgccgcgcgaggtgttcgccggtgcccgagtgatgtctggcgcagtgaacggttccactgccttgaccatgcgcgccacccaggtggccgccgattcccagtaccagcgcatcctcgaactcgtcgcttccgcacaggagtcccgtccggccgtggtgaaaaccgccgaccgattggccgttccgttcactgtgctgtcgctggtaatagcgggcgtcgcctgggcggtgtccggcataccgacgcggttcgcccaggtgttagtgctggctacgccctgtccactgcttatcgccgcgcccgtggcatacatcgccggtactggccgtctcgccgccgccggtgtgctcatcaaggcgcaggatgtgctcgaaaaccttggccgcgtcacccaggtgttcttcgacaaaaccggtacgctcaccgtcaagcagccgcaagtggtgcgcgttgagatgctgcctggagctgagacccgtcttaatgaggaccatgtgctgatgatggccggcgttgtagagagctattccgtacacatcctgtcgaagggcatcgccaaagccggtgccgacgcgatggcccgcttgcgtcagcgtttcgcggacggccagcgtctctgccccgaaccagaggccagctggcccggccacggccgcgaatatccggtcgtcaagaatattaatgaggactccggcaagggcgtgttcggcgaggtgaacggccatgccgtccgcgtcgggcgactgtcgttcgctgcagccggggaggatgggttcttgactgccgaggtagcgggtgtaagccgggcggatggcccacggcaggaggcggccgacctcctcagcccgcttcacggacagtcccctctgggcggggatactgaggcaggatctggccgtacgattgccgggaacactaaggaaaaggaaacgctgcgtacgcgattcggtatgctacagccggacgaaatggcctcctacgtgtccgttgacgggcaactgatcgcccgcatcgtgctgcgagatgtacctcgcgccaacaccaaaaccgcgctcgccaatctgcacgaactgggtgttaccaagcttgccatgcttaccggcgataatcacgcctcggccgaaatcatcgcggacgaagtcggcatcgacgaggtccacgccgagctgttccccgaagacaaggttgccgccgtcaaggctgccacggaggcaagcgccgcgccggccgggcgtgcgaatcacgccgccagccctgtgtccgatgccgtagatggcatccggtccgatggttctcaaccgtcgcgttctcgatgcagccgcgccgccgcaatccgcaagccggtcacgatgatggtcggcgacggcgtgaacgatgccccggtacttgccgtcgccgatatcggcgtggccatgaccgacggcacttccactgctgcttccgaaagcgcccaagtggtcattatgaatgacgatattgccgctgtgccgcgcgctatcgccattgcacgccgtaccaagcgcgtgatgctgcaggccgtgatcgctggtctcgtactcgccaccatcggcatgattgccgccgccttcaacctcattccagtgatcgtcggcgctttcctccaagaggccatcgacgtggtcagcatcctctgggccctcactgccctcatcgaccgcgactaggcggggtatctcctcgactgagtcgcggttttgccccgctgacggtctgtaagcggggcgattctgtgggctaatagtggttttgcttcgctggtgggggtcagtggggtgctttggctggttagtcgcggttttgctccgctgatgggctgtaagcggagcaatttctcgggttactcgcgattttgctccgctggcggtctgtgagtggggcaatttcttgatcgactcgtggttttgccccgctggcgtaaggctggcagagggtattaggcacaggattcccaccactcgcccctgttgcaacggaaggctttgcgataacctgtaacgcgtgactgaatctgagaacacagaacttcgtattgctgtaattggcgctggtcc

SEQ ID NO: 1708 - DNA, 3390 bp, Unknown
  MAG_14  MAG No. k141_11938
cgccaggcggcgctcgacatgcgcgataatctgcgggttgccgtatataggtcggtagattgtccggctgtgggctatacgtgagtgtgggctggaaaccggagccgagtgtgtttaactacccctcagtcaacctgcggttgacagctcccctgataggggggagcttgatgtgctgaataggaatgaaatgacaactttcacccccacccatgatgtggttgcggaggcgactgcggccggattctttccgccgcgtcacaacgttgaaatcacacaggttgcggaactgaccgaccgcgtgatgcgattgacgtttcgcgacccgttcatcgtctcccacgccaagcccgcccagttcgtcaacctgttcacgcacgacgacttcatgctcatgccgcgtccgttcggcgtcagcgaagtcgacggcgacgaagtcagcgtgatcttcgccgtcgtgggccacggcaccgaacagttggcaggactgcaagacggcgacaccgtcgacgtgctcggcccgctcggccgcggcttcaacctcaaggaagacgccaactacattctcgtcggcggcggactcggcgtgcccccgctaatctacgccgcgcaaaagctcgccgaacacgacgcctcctttgccaccgccgtattcggctaccgcaacgaccacttcgctgaggaatacgtctcccggtacgcggactggtcgtggagcatcgacgacgccgaaggcaacgtggtcgacctgctcaacaaactcgaacaaggcgacgacctgaaggcctacgatcgcaagccgatcatcttgtcctgcggaccgctgcctatgatgaaggccgtggccgcttgggccgccgaacgcggcatccccgcgcagctgagcatggaacagcgcatgggctgcggctacggcacctgcgtgctgtgcaccatcgacaccgtggacggccggctcaaggtctgctccgacggacccgtgttcactcgcgaacagctcggatggggggagtgacgatgagcgcaaacaaccagtccgcgcagggcagcgacaaccacatcaacctgtacgagccccacgtgtggaagcaccacaccaaggtggccggtctggaatggaagaacccggtcggcaccgcctccggcaccttccagtacgccgccgtccgctggttctacgacgtcagccagctcggcgccgtatgcaccaagggcgcctcgcccgtgccgtgggagggcaacccctcgccgcgcaccgccgaatcgccggccgcgaacatcaacgctgtgggcctgcagaaccccggcatcgaccattacttggccgaagacctgcccaagctcaaggccgcgggcgcgttcgtcatctccaatgtcgccggacattgcgatgacgattacgcggcggtcgtggaaaagctcgccgactccgacgcggacatgctggaaatcaacgtcagctgcccgaacgtttccgccggcggcatgagcgtgggcaccgacccggtggccctcgccaatcttatggaccggctgcgcccgatgaccgacaagccgatgatcgtcaaactcacgccgaacgtcaccgacatcaccgtgccggcgcgcgcggccgtggaacacggcgccgacgcgttgagcatgatcaacacgctcaaaggcatgcgcatcaacattcgcacaggccagccgatcatcgccaacgtcaccggcggcgtatccggcccggccgtgctgccggtcggcctggcagccgtctatcgggtgcgcaccgcattgccggagattccgatcatcggactcggcggcatcgacagtggtgagaaggcgctcgaatacctgtacgccggcgcgaacgccgtcgaagtgggtgcggccgcgctcttcgacccggtggccccgctgcgcgtcgcccgcgaacttgacgacctgctggacagccgtcccgaactcgctgctaaactggccgcaggacagacttggaggtaaggaacatcatggcagaaacactcgcacatcgcttcactgaattcctgttggaatccaacgcgctgaagttcggcgacttcacgctgaagtccggccgcaagagcccgtacttcatcaacgccggcgccttcgacgacggcaagaagatcgccgcgctcggcgcgttctacgccgaaaagattagccaggccatcgtgcacaacacgattccccgcaacatcgacaccgtgttcggccccgcctacaagggcattccgctggccgtgtccaccgcgatcgcgctgaccgccggccacaacatgaccgtcggatacaccttcgaccgcaaggagaagaaggaccacggcgacggcggctggatggtcggcaccccgctgaccgacggcatgaaggtgctgctcgtggacgacgtgatgaccgccggcaccgccgtgcgcgaagtcatccccaagctcaaggccgaggcgaacgtcgaggtcgtgggtctcgtgctctccgtggaccgcatggagaagaccaaggactccgacctgtccgccgtgaaggccgtggaagccgaattcggcttcccggtgctctccatcgccaacgtgcgcgagatcttcgacgccgccgccaagatgaagaaccccgacggcaccccgctgctcagccacgacatccagcagcgcgccgccgcctacctcgaagaatacggcgcctgatcgtcttcaatctaaaaccaaaagcgggcttgcgagcccgctttttttattacgttccatgaacagcagtaccatattaaggcagaagctttggcaaggagcgtgctatgaactggttagtttgtatagggctgtttgcgctcgtggggatatgcagttacttcggcatcgagcatcatctggacagtaaagcgaacaagttgtcgcaaggtaatgaagaagaccgccgagatgctgccgaattacgtgatatcgccgccaaaatcgatcacggtaagtattacccgatgctgtaacgggcaatctgggcctaaatggatgctatctccgcttcaaggggctgatgtcgtggtttccagagatctacttccgtttcgaggggctgatgcccaagtagaagcagcatgaaaatggcggaatgacgttggggtgatgccgctcatactcgggatatgacggatgaacagccccttgaaacggagatagatgtctccagaaggccaaatcagccccttgaaggcgagatagggttttaaactctgggaccgactcgcctgtgatgaaaacccgctcggcgtagaattaccgtaggttcgttacattcgaacaaggaaggccgccatggggaacatcaccgacgatatccggcaacatttcgacaccttcgccgcactgccgttcaccgaggcggacagtc

SEQ ID NO: 1709 - DNA, 4230 bp, Unknown
  MAG_14  MAG No. k141_12030
acggcgacggcggaatggccgccgccgtacgcttgcggagttgagaggcatcagctgaccaaatgccgatagagctccggatcgattggccgggccaaccgcaggatcgacagcgtgaccttcacgctgccttgtccgcttgcgtcaggtttggtggtgagctgagggttgtcaaacgcagcaacgtggccaacgtagtagtacttaccctcggcctcttccgccttgcacataacgaataacgggacgaaatgcgtctggccccaattcgggccaatgccgttaagcgcccattggaattcgggagactgcggagttcgtccattcttgctgaagtatttcatttcctgtgtgctcaggaattcatcttcgtattgacttgccgcgtatttcacgaagatgggcatggtattggtttccttgtcgaggaggtaaccacccacgttttgcggagtattctccttcttccatccgcacagtcgcatgacgtctgccatggaatatttgcgttcgtacaagaacatgtgatcaaagacctgttgcctggcggcggcctcacggaatatatctcggcaattggccataccggtgcgcagagtgtccgcaaagaagatacggaacgttctgttcgtggcaagcatatcggcgaatctgctgttcaatcgatatgcggtaccgttttctgtgccggtgctgttcacggcttcgactaatggctgattgccgaaacgattgcagtttgggccggtgaaatatgagtaatcgagcacgctgatcgcagagtcgaattgcgtgtctgaaccatcggactgcgggaattcagtacgaatcgcatcgagcaattcgctgcggccgattggcgagcccgcactccaatgctgcggtacgtcgtcgtcgagccgttcgctgacgaaatggcatagctgagcaagaatgaccaattcgtgcggtcgcaatccgggcagcagcagctccgctgccatcttgagtatcgcgtcttcaacgtcggtcaccggctccaactgatcctcaaatgtcgcttcatgatgtttgcctttgcccaggcttttttcacgggaacgcacgaaatcaagatagttgctgcgcttcgatgcgatggtatacggcagtgaggggtcgtagttatagatgtccgtaagcatggggatgcggcccagctcgtaacggacttggcgatactgttcggacagctttttcatgtcggaccagtcggcggtgtccaaagacttaaggatgcgctccttggcgatcgggtcgaaactgatggacgacaggccgattgactttctctgcaggttcttgcgagctctgtcgcggtcgccggtgttgccgtataacgccaccggaatcagatagttgttgttgtaattgccaatgaaatcgataaccacaacgctttctttgtgcgggaatttgcgcagtccgcgcccgagctgctgcgtgaagataatgctggattcggtgctgcgcaacatgacgatttggttgacggcgggaatatcaactccctcattgaacatatcgacagtgaagagatagtcgagttcgccttcaatgagcttgcggacgtattcgtctcgctgcgtttgggacacgggcctgccgtcatcgtccgtgctggtaacggcagcggtgcgataggggcgttcggcttgttgattccactgttggttaaacagctgggatagcttatgggcttcctcctgtcgactgcagaacacgagtccggtgaccggaatgttgaactgcccatattcctgcaacttgtcaatgatgtagcggactcgcttttcggtggcaagctgctcgatctcgtacttgagctgtttcgagtccttcgcatcaaggcccttggagacatcgagacgatgggcgattccattcggatcgtcgttggagccaaggtattccgcaacaccgtagtagtggaatggacagagcatgttctcgtccaacgccttttgcaagcgaatttcgtacgcgatgttatgcccgaatagctcgaagatgttgatgccgtcggtgcgctctggcgtggcggtcatgccgagcatgaagtcggcatctttgaaatgattgatgacgcgctgatatccttcggctccagcgtgatgaacttcgtcaaccagaacgtagtcgaattcatcggatttgaattgcgccaaaacctccggctgccgcatcgtctgtaccgtggcgaatacgtagcggcggtcctgttgcttgctggtgcctgaatacaatcccaattcggattcatcgcagccgagcaccttttggtaagacttcattgcagtttgaagaatcatctgctgctgggcgatgtacagcatgcgcttcggctggcattcgcgtacgtcgaatgcggaaaggtacgtctttccggtgccggtggccgacacgataattgcgcggtgctcgccttgttcacgaatcttcttgagattcgccaacgcctcctgttgcatggcgtttggctgaatgtcatgcccctcaagcgactgcagaatctcatgacgcggtggggcgtatttcttgaaatcttcctcatactgtttgatccactcttcggtcagcggaacggaatcagccacctgtgagtcgatttcatcctggaactgcccgaccagctctccatccgccagcgatgagactttgagattccattcgcgttgcgtggtcaatgcggctccagtgagattggaactgccaacgtacaggtcgtaatagggtgtaccgtctttcatgcggcgagaaaagatatatcccttgggatggaatggttgtccttgagccattgcggaaactgaggtattacgggaaccttcccacacgcgaacgtcaacaccagtggtgttctgaagatgcagcagctcccagaatgccctgggatcgttgaaatgatttttcgttgaggtaatcagtgtgcccgctcgggtcgctgtttcatggtgacttctgaagtcttcaaataagctgagcacggcctcagccgagacgaatgcgacagaaatgtcgaaggaatcgctagtagccaaggaattgccgatttcctcgtgcatggtcaatccaccggggcgatttgcgatgagggtcggcttatattcgccgggagcatctgagcgcggctcgatcagacctgagatgacatcttcgaggatcgagggggttggatcagaatcgtgatgttgcgtgttggctggagagtctgaggtgctgaccagatttatagacatgttgccctgttcccttgcgattcggatcgtttgatgactgcctgactgcgctgtggcgcgttcattggagcgtcagttgtttgttcgcgataatcgcgactgcttcgcgatctaccggagcccagttcaatgtcggcatatcagtaggattcagccatcggatatcggtgtgctcggtgagatgcggcgtaccggcgatgaggtgacagatgaatgtggtgagccgcacggttccaaagtcgtaggcgtattcgctggtacatacctcttccgcgacctcaacttcgcataacagctcttcttcgatttcgcggtgcaaggcttgccgcgctgtttcataaggctcaattttgccgccggggaactcccagtatccggccaacgactttcccgggccacgctgggcgcatagtacggtgccgttggtgacgattgcagctcccacgacgttaatgattttgcgttcccgctccatgaacaaccaggatacaacgcttcaagatccacaagcgatccacgatcctcggtggttttgcatatcgatcctgatgcttttgattatgcgatcggacgggtcgaaaatgtcggtgtggacgctgccgactattgtggtagccaagagaagcagtctgtttccgaggtgagattcgggaacggtccgactctcggcagtgatttatctacgcagacaagccaaaggagcctcgccatgatcctcgtcaccaccaccccgtccgtcgacggatacaccatcaccaactaccagggcatcgtcttcggcgaagtggtgtccggtgtgaacatgttcaaggatcttggcgcgggcctgcgtaacatgttcggcggccgcagccagggctatgaggaagagctgatgcgtgcccgcaacgaggccatcgccgagatgcagcagcgtgcggaggcgatgggcgcgcacgccgtggtcggcgtggacatcgactacgaggtgctc

SEQ ID NO: 1710 - DNA, 31970 bp, Unknown
  MAG_14  MAG No. k141_12122
atggacttgtccgtatcgttgacattcaccttctccgctgcaagcgcggtgccggtgacacccggattgttcgcgtacgcacggataagctcatcctgatgggtgttggcaagccagttcatcggatcgccctgttggtccgtgcttacatacagcggtttgccctcagtgctgagcagatttttttgcatggccgcaataatgctattctccagatttttcaccgtctcaagatgcaccgagccgccggacgcgccattatcgatcttgtaatcagcgactttcaccacactaaacgtgcggttggccaggaattgctttccttcgttcgtccatgtcttgaacgcgtccgcatccttgcctttcaccgtgatggtgttgctcgtggccgcgcaattcgtggaagtttgcggggtacccggcgcacccgcctcttcggccatggcgctggccggtgcggtcatggccgcgaacagtgtggccgccgcagcgactcccgccatccatgattttgctttcattgttctcctccttatggaatatatggatgaatccatgttggtcatacggaacggttcccgtatgaacgttttctgatatgcgcggcgattgccaacaccgccaacgcccctccggacgccaccatgccgacaatcgtcaccacccacgcggcacgacgccccgcggagggcagcgcggaaaccggttgcggccgattggtcagacgattgtccgtaacgccggcccaatcaccccgtccttgcagcacggctttcgccttgggatcctcccggcgaatcgtgaactcggcccaggtacggtcgctgtcgggcaaccggtatccgccgggcgcggtgacctccgtcagccggtaggtaccccagtcgagattgtcgatggtcagtttgccgacggctggatccttgtctccggtgccggcacaggcggcatcaccgtcgcccacgcaatcggcgaagttatagagggaatcgttgaccttgttccacgtaccgtcatcgttgcgtcgttcaagtcgccacgtggtgccggacaggtattcctcgtgatgatcggcgtccaccttgctccacgacaccgagccggtgatcttcttgtctcgaatcgtcaccgtatagccaccggtccattgatgcaccgacgcatgcggactgccatccgcgttcgtcgggccgaaatacgcgcctccgccgcaattcgtcagatagaaatcggtctgctcgtcgttgatctcatagccgagcggcgcttggagctctttgatccgatacgccgtgccgcactgcaacccttgggttttgccgacgacgatcatgcctttctcgtccgtcaccgccgtaatgggcgtgggcttgctcgacgcatagtcatggccgtcccattcgagcagttcgaatttggcgccggccagatcccggtagccggacgcatcatcatcggttttatgcaacagcatcgtcgatgtctgcacgatgacgccgctactgctgatggccgcgccgttcgtattgaatgcgccggcatcggaccatggcgagttggcgaattgcgcggtgttcgccacgtcgaatccggcggagcctttgaacccgtactggtagctgatggtcaccggcgtggaatcgggaacgtacaccgtcaatacgccgccgagtttggcatcgttttcctgatatacgatcgcatccgaggatggttggtacgttttgccggccgggcaggactgtccgttgcctatccaggcgaggcacacggtcacgttgcccaggaacgtgacctgcggattgctgccttccggtatggcgggcacggtcagcgtgtctttgatgggcagcatgtcggtatcggggacatcatcctgtttcgcatgcgtggcatcgatgttcagtccataccggttggcgcgcacataataggttcgggtgaagcttttgccgtcggaggaccagccgctgtcgacgttctgcttgtcttcgacgccggtattggttttctggaaattatcgacgaaggtttccgacgtggacacggaaggtatgctgccggagcccatggaaaccgtattacggtatttggccgtcaggcaatcgccggcaccgtttttcagcgcgggatcggcgacgcaaccccgtttgccgtcgtatttgccttccgcccagtacttgccgtcgttgatgtcgggagtgcgtgcggccacatacagatacacgttgccgtcgttcatgagatcggtcgcctgttgggggatggtgatctggtacgtgcggtcgccggtctgcttgacggtaacgacatattgcacaccctgggtattggtgaaccgcgtctcccccacggtaagccactgtttgcggtcgccatgatcggagaacgcgaacttcacgtcgtgcaggccctccggcagggtttccgtgaagacgagcggcgcgcgacgccaattgtcggtcacgtgcgcgctgatacgccatcccacttgcctcacggacaccggatcgggggtggcggtacgtgtgtagtcggcaccgttggccgagcaggaggtgaatttggggttcccctgtccgtcgaccggatcgccgcaaccgtctttgaccaaagaggcgacttgcacactggaggtgacgggtttgacgaacgctccaccgacgccggttcccgcggtggctgaattcttacgcacggtcgtttcactggaatcgaacaggctttgataggtgatcgccgcggttttgccggtggcaagcgcgttgtcggccacgaaccggaaggacgtgtatcgctgtgattcctgcgccttgttaaggtctatccaggtcctgccgttgtcggaggacacttgcgtcgctccggccagctgcttaccgtcgacggtcacgcgcagactgtcctgcagcagttgcttcgtgtaccagacgccgctgccggtgtcctgcatgacccatcccgccggcaattgaccgtcgccggcattgcgcaccgagacattccacgacgcaaggccgcaatggccttccgccacgcccatggtctggcactgctccgccgagggggtctgctgcccgcccgccgttttggtgagtgagatccttggccgcagcggattccaagcgactgcgttgttggtgaaatagtcgcctccgttattggaacggacgaaccgcgaaatgtttttcgaagcgggatacagcacgtcattggcgaacgtcgaatcgtattgcaacgtcaacgtctgccctgcgggaatcgaatacgaatccggctggaaaacccatttccaataggttcccgtggccaatccgccggccggccatgtgacggcgggtccgcccttgtagctcggcagcgtgaccgtatataccgtcaacgtgccgtgccccatcgttgtggtcaacgtttggtacagatcgttgatgttctcagccgtgtaccatcctcggcttaacgagatggaaccggcgttcggttgatcaacgttctcataggccaaccaatcctcgatcctcacgatcggctggtcgatggttcccgtgttgacgtattgcgcctgccatctggtactgagcgttccgtccggttgcagcgtcggcgtgccgacgacctgcttggaggtgctgccgcttctgcggtacatggtgatggtggtggtatggccgttgccgaaatccaatacggtctgccctggattattgccggtcaccttgctgcgatcggcttcgatgtacaatcggccattgtccagtggggcggcggcgttcttgctgatggcgtgctcactgaagacgatggtcaccaatccgtctggagcgatcgtgtacgtgccgagatcgtcgttgagcgtgcccgacatggcggtaccggtgccgttgaatcccgcgatgtggtatcggaacacgtggttgtcttcggtgatgcttcctttgggtatgacgaattgcgcgtcaaaacggaattgcgctatcctcgtgctgtaatcgaacgagacattgccgtgttcatccgcgggaacgttctgccattgcgtcgaattctgcaatcgatattgcactgcggcattgctgatgcagccgaccaatcggccggaaggcttgctggaatcaacgacggtgccttgttcgtcctgattccaaggacgtccgcacgccggcgtctgttgcgcggcatcgacacccccccccgtcgacggcggcggccgtggcgaccggtacgatcatgccgacgaccagcgcgacagccgtcgccaaccgcgttaaacgtgtgaccataccagaactccgcacatactgacggttcatcgcttcgcgcgaaccatcgtgagatagtgaccgcaagggatgcgcttgtttgaatgcgtgccgaagcacacgtccctaaacgcgaaaacgtaaccctttattcaacaaatgttatcacttgtatcatatgtcggcatatctttgtgccgggatatggaaccggtatacggccgcgcctccggccgcgcgcgtatacgaatacttcgcgccgctttccgcctctatcaggaacagttacctgaataaaccggacagttggctccatagcgacggcttgcgcagcaaatcatcaccctcgccctcgccaggcgcggtttggttcaccgcataggtgtaggcgcgtttggaactgggcttgcccaccagttcgccaaactccagcaattgcgtacgcggctcgtaagggtgacggatatcaaattcgatcaatcgcgtggcacgtttggccggagccggtccgtacgtattgaatccgcaggttggcgtagcgataagcaacagaccctcatgttcgccgacgaaaccgttgcgatgatcatgaccagctacgacgccgaaatacccctcgcgcagcgcctcaaactcgtccgactcatccgggcaggaaatgccttcccccagatacccgccggcttgagtgcgatcctcgtccagcacataataggtatccgcatgcttgcggtagccctgcatggcgaaagccgcattggcggccaccggtttgagtacctggtaatactccggcagcggcatgtgctggaacaccattgatttggctccgatatgttcgggcaaagccttgaggaaggccaatgtctcgggcgaaggcgtgccgaaaccgcctccatgcgcatagtcaccggaattcaccagtaccagtcccagtacgttgcgcgtgcaatccacatccatcaccggcaatgcaaaagtgccgggaatggtggacgcggaaatcggcgcatcggtttcttcaccattggttgccgcaggcgagccgtccttatgacacatatatacggtctgcttggccagcgcatcgctcggcggattgatgcaaccgggaaactcgcggtagattccgtcgagttcggcattgctcaaaccgcactggaaatcgtggttgccgtaggtcaccgcccacggtatgccccgtgacgccaaaggagaggtaaattgaccgatggccttgcgcaccaattcacgcgtatggttcaacgcagattcaggaatcgcctcttcgcaccaacggcgtttgcggaagctcttggcaaaggccggatcgtagccggcgatctggttgccggagaaaatcaccagatcaggccgtgtggcatcaaggctggcctcaatcagggcgatggtgtctttggagactttcggcccatcctgaatgtcggcaatctgcagcacgcggaacttgccggaatagtggaattgcagtcgtccgagacgcgcagagatagagaccgggcggccgtcttcggcatcggccggcttgatacggggtttcgacgacatcccctctggcgtacgctgtgtttccgtcatgccctccactgtacacacaaacgaaaaggcccgccggagcgggccttttctacaagttcaactactggagcagaatctctgcacaacatcatcgtcgtaacggtaagtctttccaatgcccgtccaacgtaacagtcctcgtgaccatacactatttgtgggctctgctctgttcagttgttcttgtacctcataatctattcatcactcccgtttctcgcaacctgcagagagtcgttgtgcgttttttatcacaactgttcaatcgcactttctggctatcggaaaacgagctgaaccgttcacatcgaacccgtctgatgttcggtttcgttcgtttcaccgccgctcacggcgtgtcgcgagcacgctagcacactcagaaccaaccaacaccgaactaacatgaacacccgttgaattctggcgcgttcagccgttttccggccacgccagagcttacgatataagctatggcacagatatttgacgcaccctcgaaggcaattctgcgcagccaaatcgcagagcatattgccgaaaacgacaacaacgaccgccgcgtcgatcaggaaggcgaggcaccgctgcccaaggaccgtttcttcgaccgcgagctcagctggctcaagttcaaccagcgcgtgctcgaatgcgcggagaacgaagacatgcccctgctcgagcgcgccaacttcgccgcgatcttcgcctcgaaccttgacgagttcttcatggtccgcgtcgccggcctgaagcgtcgtatcgactcgggcatcgccgtgccgtctgccgccggcctgagcccgcgtcagcagctgcgcgcgatcagcgagaccgcacaccgtctgcaagacgagcacgcacattacgcgatcgacaccattctgccggaattggagaaggagcgcatcgtcctgctgacgtgggacaagctcacctcctccgagcaggagcgtctctcgcgctactaccgccagcaggtgttcccggtcctgacgccgctcgccgtggatccggcccacccgttcccctacatttccggcggttccatcaacctggccgtgattgtggagaacccggcctccggcaagtcgcacttcgcccgtgtcaagatcccgggcaacctgccgcgcctggtgccggtggacgacatgaccgacgaggagtccaaggacgagcgttacggcttcatcgccatggaaaagctcatcgccgcgcatctggaatccctgttcccgggcatgatcatcaaggaagcccgctccttccgcgtgactcgtaacgaggacatcgacgtggaagaggatgacgccgagaacctgctcaacgccatggagaaggagctgctgcgccgccgcttcggaccgccgatccgtctggagatcacggacaccactagcccgttcctctcccagctgctcgccgaccagctcggcgtgagccaggacgaggtataccgtctgcccagcccgctggacctgaccgtgctctttgagctcggcagcgtggaccgcccggacctgaagaaccgtccgttcgtgccgaccacgaaccgtcagatcgccgaggtcgagtcctcccgtgcgcaggacattttcgccgccatccgcgagcgcgacatcctgctgcatcacccctatgactccttctccacttccgtgcaggccttccttgcgcaggccgccgcggacccgaaggtgctggccatcaagcagaccctgtaccgcaccagctccaactcgccgatcatcgacgccctgatcgacgccgctcatgccggcaagcaggtgctggctttggtggaaatcaaggctcgtttcgacgaggacgccaacatcgcgtgggcccgcaagctcgaacgcgccggcgtgcacgtggtgtacggcatcgtgggcttgaagacccactgcaagctcatcgaagtcgtgcgtcaggaagcggacggtctacgccgctactgccacgtaggcaccggtaactacaacccgaagaccgcgcgactgtacaccgatctgggtctgctgacctgcgacccggtggtcggccaggatctgactcgtctgttcaaccagctctccggttacgcgccgaagtccagcttccaccgtctgctggtggccccgcgcaccgtgcgcaccggtctaatccagcgcatccgccgcgaggaggacgccgcccgcgccggcaaggaggcctggatcaagatcaaggtcaactccatcgtggacgagaagaccatcgacgccttgtaccgtgcctctcaggccggcgtgaagatcgacatcgtcgaacgcggcatctgcgctctgaagcccggcgttcccggcctgtccgagaacatccgcgtgcgttcgattctcggccgcttcctggagcactcccgcatctacgccttctgcaacgcggacggcccgcagatcggcgagggtccggcttccggcccggaggtctacatcggttcggctgacctcatgcaccgtaaccttgaccgccgtgtggaggctctggtgcgtgtcaccgccccggagcagattgacgggctcatcaagtacgtggacctgcagatggccgactccaccatgagctggcacatgcagcccgacggcacgtatgtgctgcacaccaaggacgacgagggccgcccgctggtcgacagtcaggaatacctgattcgcaagcaccagcgccgccccaattcgcacaactgatttcactcgatgctccctgtcaacgcaagctgactgagggtggttacgatgcccggctcctctttcgagaggatgccgggcatcgttgttcagcgcgcaaaaactacgtagcagcggtccaacgtgacctacaatacaagagatgggtacgaacagtatgagacgaatcgtggaagccgccggcggtattctgtaccggtggaaggatgatgccgagccgacgcaggcatcatctccatcagcgaaatccaatattgccaccgatggcaccatcatcgcgaataccgcggattctgacggcaaggccacggcagcacacggcgcatcggacgcggctcccaccccggacccggcgcaggccgacagcccggccgcggcggacaacgtactcaaccgcatcgaactgtgcgtcgtgcatcgcccgaaatacgacgactggagctggccgaaaggcaaggtcgacccgaacgaatcgcaccggcatgccgccgtacgcgagatcggcgaggaatcgggcctgtccgtggaacttggcccttatctgggcgacatcgagtacccgctgtccgaagaaggcagcaaacagcgccataccaaggatcggtcggcggataccaagcatatccagttctggatggccacgccgatcagcgccatcgacaacctgcggcgtacccatgcgtttggcccggtgcatcgggcggacatcggcgaaatcgacgaagttttgtggctgacgccggccgaggcccgcaagaagctcagccattccaccgataaggacatcctcgcgctattcgttgatcgggtcgaagaaggtgcactggacgcggtgccggtgattatcgtgcgccacggcaaagcggaagcgcgcaagctgtggaagggttcggacgcgaaccgtccgatcacgccgcgcggcgcggctgcggcatacgcgctgaaccgcgagctggcgtgtttcaatccgacccgactggccacgtcgccttgggtgcgctgccaggagacgttggagatgttcgcgtggcagaccggacgagacatggttcatctcgacccgctcaccgaagatgcatacgccgctgcgccggacaccgcatgggagtgtctactcagcgaaatcgagttcgcacttgagcgccgtcagcccatagcgatatgcatgcaccggccggtgattggtggtatgttcggacacctgcgcagcatgtgcgttgcgccgtctctgagcaaacgcctgatcgccaagacaccgttcatgccgaccggcacggcggtggcgctgttcgtcactccgacgcctcatggtcccaaaatcatcgatattcagaaggttcaaccgcttgtctactagacccgcatttcctgattcatccaactcctcggccgctgccgccgcggctcatgccgcgcacaatggtgccgccggcagtctgggcccgggcttcggctcgctgcgtgcggccggagcggcattcggacctgctcgcatgggttcttcacgcccctcgcgcccggctcagctcgacccggctgtggccgatggattggccggtggcatggacccgcaggcgttgagcgagatgagtcatctgtctgctgccgcattgctggatcgtgtgcgccatagcgaagacccggcggttgttgagcgggtgctcacgttggtggagacggtcggcgtggatgaaatcgccgaactatggagcgatgccgagccggattcgctgcctggtgtgctgtggcgactgtatatgttgcgtacgtggatgcgatcgaatcgcgactcgatcgcgcatctgtggcgcttgggtgagccggtggccactaccgcctccgccatcgccggcgtggatcaggctcccagtgaagatgacatcgtgcgattggccgattcgattctctccggtgcttttgtgggcgattttgccgtggcgcttgagcgtgcggcggcgtttaccgatgtggtggcgttgggcttgcgcgtggaggcgcggcgcatggtgacccgggccgaggccaacggcgccttctcctcggatgccgatgaaaaggcggtgcgcaccaaagccgcccgccttatgcacaccgccggcagcctcatggccaccgccaaggatttccagcacggtgccaacctctggcgtcgcggacggttggagtagccctgctccaggctccctctgatgagggagctgtcacgggcgatgcccgtgactgagggagagacccaccaaccgcaccccaacaatcagctaccagccaacaccacacctcccccggcgcggcgagccccatcgcaagctatactaagtatccgcgtcggaccgtgcttaagccccgggctccattttttgccgccgcgagcggcccttgcgccgacaggcgctttcgcggttcggcgcttcttttcttttacccgattcacgccccgaacgttgcgatgggcacgaccagtatgccgtcattgcggcgataggccttcccacctcggccggtaaggaacatcatgaactctggttcgcgaacttgggccatggggttgccacagattttgtcgcggaaggatttgagcttatccgcattgtcatcgttcaccttaaggtcactgagttttatttcgatagcaccccacctgccgtcagacaactcgataatgacatcaacttcaagccccttgtcatcgcggtagtaggcgatgcgattgttcgcgcccggcatggccgacagatatacattcaaatcacgaatgcacagcgtttcaaacagatcgccgagcgtctgtgtatcgcgcatcagagtattcggcgcggcacctaaaaccgcagcaggcaacgaaggatccacgaaatatcgcttgggcttggttcgcacacgactctttgcgcggagtggcggctcccaaccctccaaatccgtcagaaggtacaagtccttgagcattcccaaatagctctttactgtctgcgtatccggttcacggcgctcatcgccataggccatatccgcagccagcgtcgcatattttggtgcctgcgatacgttcacggcgagcgcacgcatgagtgcacgagcggtttcagggttcttgttcatcttgggcacgctgatatcaagcacactcttgatatattcactcggaatttccagagcaaactcgtcatccaaatcaagatttgcgggccacccacctcgacagcaccatctggcaatatcttcaatgctggttgcacattcggcaggctcgaattgtccatcaaacaaaccagacaagctcactacaccggtagattgccctgactcgcacagactcataggccacatacgcaagcgagaaattcgacctgtgccactgtggtgaattgtttctcggtccttcggaatggccgagcccgtaagaatcagctgccccttgcgattcgcattgtcatccacatgacgacgagcggcatcccaaatttgcggcacatcttgccactcatccaccaaatgcggttcattacccatgagtaccaatgccggatcagtctgtgcggccgcaaaggtagcggcatcatccagacgatccatacttcgcgagcgggaaagcgccgtccatgtctttccacaccattttggcccgacgatttccaccgcgccgaatgctttaagtaacttacctaacctgccatcgaccacgcgagcacgataatcaggttgagtcaaggtatcactacgattgttcaaatcgttcattttccggcctttctcagctacccaatcacctcaatatagattttacacctttctcattcccgattttacactatttccattcccggttttacaccattctgattcccggttttacaccgcaaggtgtctagtttcttcctatgacttaatccaccgagaatcaatccaacgaatcttcgcgcacgactgcgagcgctaggccaaacttgacccattccgatgagacatatttcacaataccgtagctttttcagctggtttccagaaaccgttgacttactgtccggttcggcctagatacgctctttttcgaatctcatgaaatcaacgtcaacaccttggggaaactctcatgaaggcaaccatcaccaaagcgactatcgcagttctcgccggactcgcgatcctcgccgatgcctttctgcttttttcgatgaagatatccaatagacgccacgtgaatgtcattgccatagtgacggatgcacgcgcacgatgcgagcgtcgagccgctccacgatgtcgtggtgatgcgtggagaacagtacagtcttgccggcatcagtgaaggcgcgcaatacctcaaccactacgtcggtattgcgctcgtccaagccgtcggtcggttcgtccagaacaagcaggtccggattcatcgacatgcagcaggcaatcgccacacgctttttttcaccgccagacagacggtatggcgcccgctcccgcatccgatccaagccgaacaacgtcaccatgtcatcgactctgcgctgtacttcggcatccggcaaccccatctgcaacggaccgaacgcaatctcctcttccaccgacgggcagaacagctgggtgtcggagctttggaacacgaatccgatgcgctgatgcagcgctttggcgaacaggctgttcttcgcctcgacttcctcgcgaaccaccggagtaccgccaaaccgatactcgcctgagtccggaaattccagcgcattgatgatgcgcatcagcgtggtcttgccgctgccgttcggcccgagcagcgccacgcgctcaccgcgttcgacggtcagcgaaaaatcacgtagcacggcgtgcgacgaggtttcatcgtcggcgtcgccgtaatctttataggaaaagtcgatgtgattcagttcgaccagcgggtcgccgcggaaccatgagttatctggctgcatggttgcagtttgtttatgattacgctttaatccgaacattattgggctccattcattcgaaccaccctcatcccgaatacaccgccagcgcaatcattgcagcaatgcacacggcatacaccccgttgcgccacgtcagcagacgctcgtggtggatatgatacgtaccgtcaaacccccggcacaccatcgattcagccatttgccgcgcctgcgtattcgcacgcagaaacagcgcgcccatcaactggccggcggacgtcagcttggtccggtcgcggcccacgctgcgcaaccgcagcgcatccagcaactccaccatcgaacgaccgagaatatcgatgaactgaatcgtcacgtcgcagatataaatcaccgaatcagggtagccaactgcgcgcagtccggcaatcaggcgattccacggcaccgtacgcgccagtgcgatcaccagcgacaccgccacgaacgcacgcaccaccagccggaccggcgcactgtactgcccaatcagcaggctcggcaccgccacgaccaggctcaggatgcatacggccagcaccgggccgagcaacgccctcatcaggcgcgccggccgggtcgccatcatcagcagcaccaccgccagcatgatgtacgagaacagcatgttgcatgtgatgttgacgcagacaatcacggccagtatgcccagcagccgcacgcccggattgaccgagcccagcaccttgtcgaccgggctcgactcaatcggcaacgcatgaccaacctgctcgagtacgctgccgaaatgccccaggttgtgttcgatgaaggatgacttgtcagccggaggatcgtaatcctccgactcacgcatccatgcaggtatcgtcaacgcgcggatgtcttgccgttgccgctcaccgcgagcgccagcagacggaacacgatagtgagcacggcgatgccaatcactgcggagagaatgtagccggcgatgtccggcagaccctgcagcgagtagtcaggcaacagcgcatcccacgagaagccatgggcgatgtactgcggcacgtagttgagccccgtggcactcatgaagtcctcggcgccccactcgccccaggcgtcgccggtggcgagcaggccgatcggggaaagcaccgccaccacggccagcgcaatccacgcagacttgcgcagtccggcgtgtgcgacctgtttgccgtcagcaccggcggtctcggcgaagttcacacgggcattgtcttcgataatctccggtgcggtgcggcgcacgaattcgacaaccaccacggtcaccagaccctcgaccacgctggctacggccaggtgcgggatcagcatggcgggaatcgtcacgttaaaggtgaacgggaagtagagcgcctggccgtcagcggctttgaacagcagcggctgcacgccgagttccagcgccacgcagaatgcggcgagcgtgatgccgatatagccggacacgaattcggccacgcgttccttccagccgtcgggcagcaccttgcgtagcaacacgtacagtccgtaagccacaaacggcagcacgaacgccatgttgaagcagttggcgccgagcgtgatcaggccgccgtcgccgaagagcagcgcctgcagcagcagggccaccgacacggagaccgtcgcgtactggggaccgagcagcagagcgatcagcgcgccgccgacaccgtgcgcggtggtgccgccgggcgtgggcacgttgaacatcatgatgaggaacgagaacgccgcgccggcacccaggtaggccatcttctccggcgtgctgttgcggatcacgtagcgtaggcacagcacccacaccggaatcatgatgacgtagaacaacgccccggtggacggcgaaatgaaattatccggaatgtgcatcgccaatgtgacggtgtcaggtacttcgatcatatccgacttccctctttttgttgatttcggagctcgaccacaacctcccgctccaggaacgtgatatgtaatatcacaactgtgattcgtctaatgcacaaccatgcaaaatagcttgcaattactagcgacacaccgtgtaccatatatccggtttccgtgttttcggatatttttccgctatattttttgcatatttcgatcattcgttacaaagtgacgcaacaggctctctacactgtggcatgaaggacgtggggattctcacgccacaagcaattttctccaaggagaacggatgatcgccaaagaaatcaccggcaacatcatcagtcagcagtacagcgacggcaaacttaatgtgtcgattgccttcgactggttcgaaaccgataagaagcgcatgcgcaaggtggccgaggacggcaccgagttcggcatcatggttggcaagaccatcaaggatggcgatgtgctcgccgaaaccgaagacaagcgctatttcgcacgcattaaaaccgcacagctgattgagattccggttaactcgatgaaggaaatgggacgcctgtgcttcgaactgggcaaccgccacctgagtctcaaggtcgagaacgaccgcgtgctggtgccgtacgaccatccgaccatggaatacacgaagaagatcggttatgaaccgcatatcatcgagggtgggtttgacggcttcctgatcgtcaaggcccacgccggcaccggcacactgattccgggcaccaacaagaccacgggcgacgtggccgaggaggagcaggaagccgaggccgacaaggaattcccggccgaggaggccgccggccatctggatgtgcatacacacgacgcaggtgagggtgagcccgccgaatatgagatgaacggcgtgctgcaccgcccggacggctcccacagccacgacggcggccgcacctggcacacccactgatagccccatgaacatcaacgaaaccgaatcgcgacgtctggccatgctgcaggtgtgcgacagcgtcttccccgtgggcgcgttcgcgctgtccaacggcatggagaccttcgtacagcgcgacttcttgcgccgtggcgccgatttcgaggagtatatgaagaactacctcgaagtcgcaccgtacaaggaaatcgggcagatggtgctggccggcaagtacgccaccgattcgcgagtctcccgcaaagggctggccgagcgactcatcgaacttgacgagctggcctcggccctgcaatccgcacgtgaaatccgtgaaggcagcgagcgcatgtgtacccgcctggtcaagctggccgagcagatggatgccggccaggcgcagacctcggatgggcatcgtgggttcgccaagccaagtcctgccgacaatgccaccgcatccgctgcggattcgcgcgaaaacagcatcatcgccgtgcacgagcatcacaccgaacgccaccagctgcacgatgccgccgacggcctgtacggctcgccgtcgctcgacctgtatgccgggctgattcgcgagcgccgctgccgtggcctgcattcgatcgcgatgggcctgtacgcggctgaccatgcgaacgacgtgcgcgacgcggccatcatgtatggatattcgctgttgagcgcgcttaccatgtgcgccgcgaaggcgattccgctcagccagtacgctggccaagtcgccctgcatgattcgttcccgcgcctcgtgcgcgcggtgaatatcgcgatgacgttgaagcccgaggatctcggcatctccggagcttacctcgacatcgccgccatgcagcatgaaatcttgtactcgaggctctacatgagctaattatcctggctcccctcaaggaggggagccaggataacctcacccgcaaaccacatacctaactaattcccacataaaggagaaaccccatgtcatacgtacgcatcggcgtcgccggaccggtcggttccggcaaaaccgcgcttatcgaacgcctgacccgcaagatggctgacgaatacagcatctgcgtggtcaccaacgatatctacaccaaggaagacgccgagttccttatcgagcactcacgcctcgcgccggaccgtatcgtcggcgtggagaccggtggctgcccccacaccgccatccgcgaggactgctcgatgaacctcgaggcctgtgaggaaatggcccgcacccacccggacgtgcagatcatgttcgtggagtccggcggcgacaatctgtccgccacgttcagcccggacctggccgacgccacaatctacgtcatcgccaccgatgagggcgacaagatcccccgcaagggcggccccggcgtcacccgctccgacctgctggtgatcaacaaggccgacctggccccgttggttcacgccgatctagacgtgatggcccgcgactccaagaagatgcgcggcgaccgcccgttcatcttcaccgacctgatgggcggtgccggagtggacgacgtcatcgcatggatcaagaagagcgtgctgttcgaggacatgtgatgttttggcccgcccgtatccaaaaacggacgggccgaaacataccgttgcaccaagtgcggcataattgcccatgtcatcgtcaggcaccaatcataagaaggcagcgattcgtccatgggcagtagcacttttcgtctatccactgcattccgccacggacgtaccaaaatcgacgatatttatttcgaggcgccgttcaaactgatgaccccgttcaccaacggacgtcattcggatttcgtcgtgatgctcgcctcccctggcttcctgaggggcgatgaagcccatatcgatatcgacttcggcccaggcaccgattcgaccatcaaaacgcaaagctacgagaaggtgttcgacaccgcggacggctcggccgaacgcaccatcgaactcagggcgcgtggcaatgccaaagccgtgttcctgccgttcccagtgattccgttcaagaacagctcattcatgaacctgaccaccgcgcatatttccgccgagtcagcattcgtgtatgcggatgtggcgacatgtggccgcgttgggatggatgagcgttgggccatgaaacgttttacgaatcgtatgcgcgtatatgtggccgaacccgaagccgtgaccaaggccgccgcagccgaattggcgcaacagcacgcacatcgccgaggccggccttccaaggcggaagccgccgctgcccaaccgcgcgaacatctggcctttgctgaccgcatgctgttggaacctgatgcttttgactacaccgaactcggcatgtggcgcgaattcacccactgcggcgttctctacgctcacctgcccgaactcgaccctagcgacgctgtacaagatgccgcaactaaagaagcatcctccgccgccatccgcgagcgcatcgagactgcccgcatcgccgccgaagacgcgctcatcactcgcatccatgaacacgcagacgccatcggcttcaccggcgagctcggcgtgagccgcgtaatcaatggcatctgcttgcgtgtactgaccacccgaggcgacgacgccttcgacctcattcgagatgtggccgatttcgtgaccgatttcgtgaccgaaggctaaaaccaagtggctctcccctttgaggagagccaccagttctctcagaacaggaagtaccgctgggtaagcggcaactcgtacgccgggtcagagtggaccggttcgccgtccaccgtcacttggaaggtttcgggattgacctgaatgtcggcgagcacgtcgttgaacttcagatccttcttgcctaccgtgcggcagccatgcactggtaacacctggcgctgcagctccagcttgcccttgatatcgtcatccacggcggcctgcgaaacaaacgtggcgcaggacttgccaagcgcacggccgagcgcgccgaacatatcgcggtagtagacaggttccggggtcgggatagaagcattcgcgtcacccatacgagagtaggcgatggagccacccttgatgaccatttccggcttcgcgccgaacatggacggctgccaaagcacgagatccgccatcttaccgacttcgatggagcccacgtattcggaaatgccgtgggtgatggccgggttgatggtgaacttggagacgtagcgcttgacacggaagttgtcgttgcggttgttgtcgtgttcgtcttcggggagcggaccgcgctgcttcttcattttgtcggcggtctggatggtgcgggtgatgacctcgcccacgcggcccatggcctgcgagtcggagctcatcatggagatgatgcccatgtcgtgtagcacgtcttcggcaccgatggtctcggggcggatgcgcgagtcggcgaaagagatgtcttcgggcacattgcggtcgaggtggtggcagaccatcatcatgtcgagatgctcgtcgatggtgttgcgcgtgaacggcatggtcgggttcgtggaactcggcagcacgtttgggaagccagcggcacgaatgatgtccggagcgtggccgcctccagcgccttcggtgtggtaggtgtggatggtgcggcccttgaacgcggcgatggtgtcttccacacaaccgccttcgttcagagtatcggtgtggatagccacctgcgtgtcggtttcgtcggccacgccgagtgcagtgtcgatgacggccggggtggcaccccagtcctcgtggatcttcaggcctgcggcaccggcgcgaatctgctcacgcaacggttcggggctggagtcgttgcccttgccaaggtaggcgatgttgatgggcagcgcttcggcggcctcgatcatgcgggtcaggtggaaggctcccgggttgcaggtggtggcgttggtgccgtcggccggaccggtgccgccgccgaccatcgtggtcacgccaccggcgagggcagtgcgaatctgctgcggggagatgaagtggatgtgggtgtcgagtccgcctgcggtgacgatgaggccttcgccggcgagagcttcagtgccggagcccgcttcgagaccgggggtgataccgctcatggtctgcgggctgccggccttgccgatggcgctgattttgccgtctttgatgccgatgtccgccttgtagatgccggtgtagtccacgatgagggcgttggtgatgatggtatccggcgattcaacgtcgagctgcacggagctttggcccatgccgtcgcggaatgatttgcctccaccgaacttcagttcatcaccgtagtgcgtgtagtccttttccacctcgatgatgaggttcgtgtcaccgagtcgcacgcggtctcccgtggtcggcccgaacattcccgcataatccttgcgcgtaataatcttcatgtcaaaagtccttgctgtttttcagctccccttgtcaggggagctggctcgcgaagcgagactgagaggtagtccgctccccgctggcgggagctgtcagcgaagctgactgagggtggcccttagctcagattcccgagaatccaagctcatgcgccttcttaaacgcggcctcccgcacctcagggtcatccaacttcccctcaaccagtgcgctgaagccgtgaatctcacgcgtgccaccaatatcaatcaaccgcactcgatgcgtttcacccggctcgaacctcacagccgtaccagccgcgatatccaaccgcttgccatacgccgccttacggtcgaacttcaggtacttattaacttcaaagaagtggaagtgcgaaccaatctgaatcggtcgatccgcagtgttcacaacgtccagctcgatgtcttcggaaccttcattgagttccaaatcatcgtcagccagcagatattcccccggcaccaacttctcggtggattcgatggggttatgaatagagacgagcttggtgccgtccgggaacgtggcctcgacctccaccacttccagcatctcggccacgccatccatcacatcttcaggcttgagcagcgtgcgaccgtatgccatgagctccgccacagtgcttccctcacgcgcccgctcaacgcattcggcggaaatcaacgcaatcgcctccacatagttgagcttcacgcctctggctttgcggtctttggcaagctgccccgccaagtacagcatcaacttgtcagtctctcgtggtgtaagtctcataacatcctctgttgttgactggagtttttcaggcacaccaatgtgagccctaacatcgcccaataataagagcgttataagaacgggacgtttctcataacgctctatggccataaacgggggtcgaatcaatcacactctcatggattccttggcggcttctacttggtcggggccgccttcgccggtggcgatgaaacggccggaggccaggacgtagtagcggtcggcgcgctcgacggcgaattggaccttctgctcaaccaagaccacaccgatacccttgtcttcggccatcatgcgaatggccttctggatttcggcgacgatattgggctggatgccttcggtcggctcatcgagaatcatgagcttggggcgggtgatcagcgcgcgggcaatcgaaagctgctgacgctggccaccggacagcagaccggcacgtcggccagcaaattccttcaagaccgggaacatttccacggcttcgtcgtaacgggccttggcctctgaaccgtagcggtcggcgaccacgtgcaggttttcgtccacggtcatggtgccaaaggactgctggccctgcggcacgaacgccatgcccttgcggatgcgttggttcggtgcagccttggtaatgtccttgccctcgaaactaatcgaaccggacgaaacgggcagcaagcccagaatcgccttcaacagcgtggtcttaccggcaccgttgttgccgacgatgctcacccattcgccggcggccacgtcgaaactgatgtcgttgacgacggtcactttgccgtaaccggtgttcaaatcctttacttcaagcattgccatgattattcactttctgcggcgtcgtgcatattgatgttgaggcgcgttgtatcaccctcaatatgcactgaaaaagcgcattccgggatgcgatggttgttgtcagtgcggtccatattgcgcttcttcctcttacctacccccctcagtcaccttcggtgacagctcgtccgcaattaaggacgggccttgcctgcaacctgctggttcgactatcgtctcgccttcggctacaaacagcccactgggctgtttgcttaacgcctcggcctcagggaggggagacagggagttagttttctccgccgcccaggtagatgcggactacttcttcgttgttttggatgtcttcgaccgaaccctcggcaaggatttcgccctggttgagcaccgtgaccgaatcggcgaactgacgcatgaaatccatgtcgtgttccacgatgatgaccgtgcggttcttgctgcatcgcttgagcagctcaccggtctgcacacgctcggccggagtcatgccggccaccggctcgtcgagcagcagcaggtgcgcgtcctgcacgagcagcataccgatttccagccactgtttcttgccgtgcggcaggatgcctgcgggcttgtttgcatccacagtcagattgcacacgtccatcatgtattcgatgttctgcgaaacgccgcccatcggctggaacagctcacgacccttcttgcggaagccctcggccagctgcagattctccaacacggacagctcttcaaccaccgatgcggtctggaaggtacgcccgacgcccagcttgacgatgtcgttcggcttgcggcccaacagctgctcgccacggaattccgcggaaccagtggccggcaccagtccggtaatcgcgtcgatgatggtcgttttaccagcaccgttcgggccgatcaggaatcgcaaatcgccgtgctgcacagtcaaatcaagattcttgacggccacgaatccatcgaactcaacgtgcagtccacgaacttccagataatcgctccactggccgccgcgatcatccagcaccgcaagctgatcgtgcagcttcgtacgctcttcaacgatttcggccttcatctgggccgcttcgtcgcgcatacgcttggcttcgtcgcgcatctcaatcatttcggcgcgcaactgctccaaatcggcctgcgatgcaggtgcgggagccgatggattcgagctcatgttcttctcctcactcatgcgttcaccgcctttgcagtagcagtaccggtaccggcaacggcaccagcaccagcaccagccgaagctccaaccgaactctttccgagcccgatcttctccttaatccaaggccatacgcccttgaactgtcccaagcccttcggcacaaaggcaatcaccagaatgaagatcaggccttcgatgtacgtccacgcggacggatacgcctcagacagctgcgtttccgcaaagcgcaccagcagcgtgccgaccaccgggccgagcaaagtggcacgtccgccgatcaccacgccggcgagcatcaggatggacggcgtcacgccgatatcggacggcgaaatgatgccgaccactggcacgaacattgcgccaccaatgccggcgaacattgcagccaccgagaaggcgaacaccttgatggaggcggggttatagcccaagaacttcatgcggttctcttggtcgcgcacgccgataatcaggtcgcccataaacgatttgcgaatccagtagacgataagcaccatggccagcgtcaggaacgcgcagatgtagaagatcatctgcttgttggcgttatcagtcaagtcgtaaccaaagaatcccttgaaatcgttgagaccgttggtgccaccggtggttttcgactggccgataagcagcacggcgaacgcggcaaccagcgcctgcgaaagaattgcgaagtaggcgccacgcacgccacggccgaacacagccagaccgaggattgcggcgataatgcccggtaccgcagccacgccaatcacggcgatgaccggattgcggaagagttcccagaatccaggaaccttggtgatgccgtactgggacatgaagtccggcacttggcccacgccaatgtcctcaagcttcatgtggatagccatcacgtacgcgccgagaccaaagaacaggccttggcccagcgtcagcataccgccttggccccaagccaggccgatgccgaccgcgaccatcgcgtagcacaggtatttggacagcaggccgaggttgtacacgctcagcacagtcggagaaaggaagatcagcgccacggcaatgaccacaccgatcaaagccttatatttcgtggcgtattcgctcaaagtcatcttcattgtcgtttccttacccttctgaagcactcacgcgaggttcctggagcggatggagaccaagccctgcggcctgaactgcaggaacaccaccacaatcaggaacacggcaacctgaccaatcgaggcagaggtcggcagttcgatggacgactggcacaagcccagcacgaacgaggcgataaccgcgcccttgagctggccaacgccgccggccacaacaaccaggaaggcctgcacgatgaaggtcgtaccgaagttgaagctaatcgagttcagcaggctcagcgccacgccagcgataccggcgatgccggagcccaggaagaacgtcacatggtcgaccatcttggtggagatgccggaaacctcagcgaggtcgcggttctcggaagtggcgcgaatctggcgacccagcggcgtgagcttcaggatcgcgtacagcgcagccacgcagataatcgacagaataaagatgaacagtcggcctgcagagaagctgtagccaaagatggtcaccggattggtcagcgcttcaggagccgaagcgtagaccggagtggcaccgaaaatatcgcgtgcgagctgctgcaataccagcgatacaccgaaggtaaccagcagcgtatcaagcggacgattgcgcatacgctccagcagcaacacgtccagcagtaaaccaagcaaaccggctactacgaaaccgaccaccagcgccacggccagggacactgttttattgccgatgaccatgctcatgacgtatgcggtgtatgcgccggccatcatgaattcgccgtgggcgttgttgataacgcccatctggccgaaggtcaacgacaacccgagggctgcgagcagcagaatcgatccgttggacagacctgccacaatttgtggaaataacatacccatgttgttgtgtcctcttctctcagttgctctcgacgctggcgctcaggctcttggcccagctgtaggtcttcaggtacgggtccggcttgatgggaccgtccgacttccagacggtgtggatgagcttgtctgagccgatcttgccgatgtatgaggtcttgtagatgtggtggttttcgccgtccaccttgaccttgccttccggtgcattgaaggtgacaccgtctgctgcagccttgaccttgtccacatcgaacgacttggccttctcgaccatgcccttccacaggtacacagatgtgtacgccgattccatcgggtcggaggtggggcgattggctccgtagcgcgccttgaagttcttcacgaacgtcttgttttgcgcattgttcagcgtctggtagtagttccaagcagtgagctggtccttgacgttgtcaacgccgatagcggaaacctcttcctcggcgatagacatggaaatcaccggcgtggtggcggctttcaggccggaagccttgtattccttgaagaatgcgacgttggaatcaccgttcagcgtgttcaccaccgcatccgcgccggagaacttgagcttgttgacgatggtggtgaagtcggtggagcccattggggtatattcctcgccgaccacttccatgccattgccctcggcgtacgccttgaccacgcgatttgcggtctgcgggaacacataatcggagccaaccaagaacagcttcttgtagccttgctccttaaggtaatcaagcgcaggcacaatctgctggttcggtgcagcacccgagtagaagatgttcgggctggcttccatgccctcgtattgcagcgggtagaacagcagcgcgttatccgcctcgaacacaggcagcatggccttacgcgaagaggacgtccagccgccgaacaccgcggccacgcattccttttcgatgagggtcttggctttttcggcgaacacagccggctcggacttgccgtcctgctgcactaccttgagctgcttgcccagcacgccgccctttgcgttaatctcatcaacggccatgtgcagcgaatcactcaccgtctgttcggaaatggccatcgtgccagacagcgaattcacgaaaccgattttgatggtgttgcctgaggtgtccacacatgatgaggtgtcgcttgccgcagtcgcgttgttctcttgggcctctttctcggccacggtgcgaccccagccacaaccgctggtggcaagcactgcggcaacaatgcacaccgcagcacccatcttcagtctttgcaatcgagtcatatgactcttcctccccacatacgactacattccgcgaacgttgcccgcccgcggaatgtctacgctgattgccgtaccgtgccctgatgcctgatatcgtgctgaaccacttgccgtatatcgacggctggcttccggccgactgcactatacgatggcagtgcctgcgtgaatttccgttgcctgaatatttcatatgcgtctcatacataacgctcacgttacaaaatcaacggtgttacgcggcccgccgtcgaacgctgtttacattggtgtgcgatacgcgcgcgactgccgcccaagtgacttccccgcgaactacgggtaggctggggagtatggaacttcacgttttgaatcatccgctggtcgagcacaagctcaccgtgctgcgcgacaagaacactccttcctccactttccgcgagctcgtctcggagcttgtgatgctcgaggcctatgaggccacccgcaacctgtccgtagttgccgcaccaatcgaaacaccggtcgctccgatgaccggtaagaagctggccaaaccgcgtccgatcattgtgccggtgctgcgtgcaggtctgggtatgctcgatggcatgacccgtcttatgccgaccgccgaagtcggcttccttggtatgaagcgcgacgaggaacaccccactcagcaggtcacctatgcgaaccgtctaccggaggacctgtccggtcgtcagtgcttcctgatcgacccgatgctcgccaccggtggcacgctggttgctgccacgcattatctggccgagcgcggtgccaaggacgtgaccgcgatcaacatcatcgcggcgcctgaaggcatcaagttcgtggaagagcacatcgatccgtccatcgacttcaaggtcgtagtgtgcgcggtcgacgagaagctcaacgacaagtgctacatcgtgccggggttgggcgatgccggcgaccgtctctatggcgtaattgactgattttcctggctcccctcagagaggggagccaatgtgatgggctttttatgcaaatcgacattattgcgccgggacgcgtgaaggaacgatatcttcgcgacgccatcgacgagtattccaagcgactttcgcgctactgcaggctcaacatcattgaagtggcagatgagaaaacgcctgaccacgcctccgaaggcgttgaccgacagatcaaggccaaagaaggcgaacgcatcgccaagcatctgaaggacggcgcgtttgttattgcccttgccatcaatggcaagcagctgtccagcgaagaattggccgccaaaatcaacgaccttggattgcgtggcaccagccatattcagctggtcatcggcggctcaatcggccttgacgacgcgattctgcgtcgtgctgattttctgctgagtttctcgaagatgacgttcccgcatcagctcatgcgcgtgattctgctggagcagatttatcgcgcttataagatcaacgctggcgagccatatcacaagtaaaacgccatacctcatggggcgggaaatcccccatggggcggtaattgcctcatggggcggtaaaaccctcatggggcggtatgccaaaatggcttaattccgcggtttcacatattcttcaaaccgccccatgggcaagttaccgccccatgggcacatcaataacgccctcaacctcacactgcgtcggggacgaacgcttcgaagatgtggcggtcgaagtagggcgcgcactgggcgagttcatcgctgctgcgcacggtccatgaaaccggcatcgcacccatcgaacgagcgagcttgacttgcggcgaagtgccaccggtccagtcataggccacgaaatcaggacgagacagccagtcgaacgccagtaagccggcggcccattcagccgcaccattcttgctcagcttcgccggccagctcagctgaccgcggcacacctcagggtgatgctccttgtaccaattcaccgcgcccggatggaaggattcgatcacgtacgggccgtcatacgcctcaagcaaggcgtggcccttttccatgagctcttcgctacgctcatcccaagccttgttgtcgctgaacttgtattccacaatcagcggagcctggccggccaccacgtccagcacatcggagaacagcggcacatgctggtagtaccccttcggcgcggcggacggcgtgaccaccagcggcgggttcgcgtcggcacccggcaacggttcggccttcaagtcaccggacttgccgttcgggaacagcggaatacgggtcagttcgtcgtacgtcagatcttcgatgcggcgcggatcgccggccacgcgcagcaaatcggcgtcatggaccacgaccacttgaccgtcgagcgtaagctgcacgtcgagttcgatgccatagccagcctcgcaggcggcggcgaatgcggccagcgagttttcaggagcgatcggaccggtcatatccgcactgccgtagccggccttgacagccatgcgacgggcaagcgacacataatcatcgttttcggcgatggatcgctcagtggtatcggcttgggcgctgaccgaattatccccaccataatcagcgatatcggtatagccgaccaaaccagaacccgcatcgtgcaagccacgatgggcataccataccttcggaatggagggcacgaaattacgacgcttgtcattgaacgtgcgcggggccacggcccacacggcagcaccggcggcggccacgcctgccagcgccacgtttctccagagcttcgacgacattggaatccttcctgttgggctacctctagcctaacgcttctgccagccattgtggagtggttggatcgtccggtttcagcgcgcggtccaggtggttggcacgcagcggctcccagctgaaatctgccagcagatcggcgggtttgcaagggattggagtgggttgcagacgcagcaaccaggcgcagtatccgatgatttgctcgggggttacgttgcgggcgcgcaaggctcccatatccagcgaacgttcgcgcttggctaaacgccgaccggccgcattgtcgatgagcggcaggtgcgcatactcggggtgctcggcgagaggcttttccgtgttgccgcattccggctcaaagccgccagccaacagacactggcgaatccacatttgcagcgcggtggagcgcagcagatcacggccgcgcacgatatcatcaacatccatatcgaggtcatccacgaccacgaccagttgatagccgaacagtccatcggctcggcgaatcacggaatcgcctacctcgcgggccaaatcgtagtgctgtggactatagacacggtcgttaaagcatgcgacaccatcaacgattccggcatcgccctgctgttccggcggcacggctcccgacagcgcagcggaatcgtcaggcactgtacgttgcttttctcccgctgccggtttcggcatggcgatacggatggaatgctggtcgccgcgagacagacgggcacggacctcgtcgggatggtcgtgcagcaggcggcggcacgtgccggggtacaccatgaagccgtcgccctcgttgggggccgaggcggcgcgaatgtcggcacgcgagcagaaacaggggtacagcacgccctgcgagcgcaggcattcgagagcgtattcatatcgttcagtgtgctgggattggaacatcggttcgccatcccagtcgaggccgagccaatgcaggtcgtccatcatgagctggtccgcaccggcaaccacgcgcggcttgtccacgtcttcgatacgcatcagcatgcggtcgccacgcgaacgggccgaaagccatgcacccaacatggcgtacacgttgccgatatgcatgcgccccgacggcgtcggcgccaatcgtccggtcactggctctcccttcgtccgttaacactcactttcctaccatatgcgacagtgaacaccttgatgccacggttcttccactcttggggaacacaattgagacggatcggacagatacttccgtttcaaggggctgatttcgatgttgcaggaggtctacttccatttcaaggggctggtagccaagtagacacggcgcaacaatggcggaatggcgttgccataaagccgctgatactcgcggttcggcagaagagcagcccctcgaaacggaagtagacctccgaaagggggcaaatcagcccctcgaaatcgagatagacccacaaagacgaaaaagtgggtatgactgctaccatacccacctgtttaagagattttgcagagaaaaatcactgttgcgaaaccgcccgaactcccctcagtcagcttcgctcagagaggggagccagtgattgtcacttatcttcggtaacgttgtccacgctcacatccgggtcgtcggagacgatctggtcgctggcccaggcggaaagctccagatgctcgccgccggtctggtcgacgagcacggtgtcgccatcgtggaccttgccggccagcagcatacgggccagctggtcgcccacttcggtctgtaccaggcggcgcagcggacgagcgccataagccgggtcgtaaccggtgttggccagccattcgcgagccgagtcggtgacgtccagcgtgatgcggcgatcggtcagacgctgggccacgccagccacctggatatccacgatgccgccaagctcctcacgcgtgagcgggtggaacatgacaatatcgtccaaacggttcaggaactccggcttgaagttcatgtggaccgcatccatcacggcctttttcttggcgtcggcgtccatgtcctcgttcacgaggaactgcga

SEQ ID NO: 1711 - DNA, 4315 bp, Unknown
  MAG_14  MAG No. k141_12208
aaattcaccaaggccaacaaggacctcaccgagacccagctgttcaccaaccgcgtcatggcgttcatgatgccgttgatgaacaccgtcctgaacggcctgatgctcgccgtctactggatcggcgcttacctcatcgacgccgccgggctcaaggacaagctcaccgtgttctccaacatggtcgtgttctccaactactccgtgcaggtcatcatgagcttcctgctcatgagcatggtgttcgtgctctggccgcgcgccgacgtgtccgcgcagcgcatcatggaggtgctcgacactgagccaatcgtcgagaacggcaccaaaaccgccgccgacgtggccaaaaccggccagaggggcaccgtggaattccgcaacgtcagcttcacctacccggattcgcgcgaggcgatgctggaaggcatcaacttcaccgccgagcagggccagacggtggcgttcatcggctccaccggctccggcaagtcgtctcttatcaatctcgtgccgcgcttctatgacaccagccaaggccaggtgttggtcgacggcgtggacgtgcgcgactacgacctgaaggccctgcgcgacaagatcggctacgtgccgcagcagtccgtgctgttcaagggcaccgtggcctccaacgtgagctacggcgatcagccgggcgacccggcggaggtcgagatggccgatacctccaccccggccgggcgcaagcgcgaggccgcgttgatcgccgctggcgaggccgcggaaggtgccgatataccggccgagcagctgaatcgcgtcaaggccgccgccgacgtggcgcaggccagcgagttcgtggcgcgcatggacggcgggtattccgccgcgatcgcccaaggcggatcgaacgtgtccggcggccagaagcagcgcctgtcgattgcgcgcgcggtgtaccgtcacccggaaatcctgattttcgacgactcgttctccgcgctcgacttcaagaccgaccgcgaagtgcgcgacgcgctcgcccgcgaggccaaggattccaccaagctcatcgtggcccagcgcatcggcaccatcatgaacgccgaccgcatcgtcgtgctcgacgacggcaaggtcgtgggtcagggcacgcacaaggaactgctcgacaactgcgacgtataccgccagatcgccgaatcccagctcagccagtcggagcttacggcgtagggggggcagcggtagctccccatgtcaggggctgagccgtaaagggaacagcccagtgggctgttcccaggcgaagacgagctgataagcgagcgaataaaacagcacagctgactgaggggtagtcgcgtacggcttctctccctccggcgcttcgcgccacctccctcatcagagggaggtcaatacggacttttaaggagtaaaacaaatgccaagaggaccaatgggcggcaggcgtgccgtcgaaaagccccatgatttcggcaaagtcatgggcaaactcgtgaactactgccgcaactatcttcccgtcatcatcatcgcgctcatcctgggcgcggccggcaccgtctgccagatcgtcggcccggacaagctcaaggacatgaccaacgagatcgtcaaaggtctgcccgccatcgttaacggcagaccggtgatgaactcggtagatttcggcacggtgggccacatcgcctggactttggtggccctgtacgtgggctacgccgtgctcggctacgtgcaaagctggatgatggccaacgtcacccagcgcaccgcccagcgactgcgcgagtccatctcggtcaaaatcaacaaactgccgctcaaatacttcgacaaggttagctacggcgacgtgctgtcgcgcatcaccaacgatgtggacgccatcggccagacgctgggccagtcgctcggctcgctgattacctcggtgacgctgttcgtgggcgcgctggtgatgatgttctacaacaacgtgatcatgaccctgtgcgccatcggtgccagcctcatcggcctgatcatcatgatggccatcatgaagtcctcccagaagtacttcgcccggcagcagatggcgctgggtgacgtcaacggccacgtggaggagatgtacgccggtcacctcatcgtcaaggcatacaacggcgaggccgattcgattcgtcgcttcgagaagtacaactcggacctctacgagtccggctggaagtcgcagttcctctccggcctgatgatgccgctcatgaatttcgtgggcaacttcggctacgtggtggtgtgcgtggtgggcgcggcgctcgcgctcgacgggcagatcgagttcggcgtgatcgtggcgttcatgatgtatgtccgcctgttcacccagccgttggcgcagttcgcccaggccttccagaacctgcagcgttgcgcggcggccgccgaacgcgtgttcggtttccttgaggagccggagatggaggacgaatccggcaagtccgctttgcttgggaccaacggtcacgaagtgaagggcgacgtggaattcagccacgtacagttcggttacgaaccgggcaagccgatcatccacgacttctccgcctccgtcaaggccgggcagaaggtcgccatcgtcggcccgaccggtgccggcaagaccaccatggtcaacctgctcatgcgcttctatgagatttccggcggctcgattgcgattgacggcgtggacaccaagtccgtgccgcgctggaacgtgcacgaccagttctccatggtgctgcaggatacgtgggtgttccgcggcactgtgcgcgagaacatcgcctactccaagcccggcgtgaccaacaagcagatcgaggatgcgtgcaaggccgtgggcctcgaccacttcatccgctcgctgccggacggctatgacaccgtgctcgacgacaagtcgtcgctctcccagggccagaagcagctgctgaccatcgcccgtgcgatggtgcaggacgcgccgattctgattctcgacgaggccacctcctcggtcgatacccgcaccgaagagctgatccagaaggccatggacgcgctgaccgtggggcgtacgagctttgtgatcgcgcaccgcctctccacgattcgcgacgccgacatgattctcgtcatgaaccacggcgacgtgatcgagcgcggcacgcacgacgagctgctggcggcgggcggtttttacgccgacctctacaacagccagttcgcactcgctgactgacggattgtttcctgcgttagcggattagcggattagctatactcggctcccttctccgaggggagctgtcagcgtagctgactgaggggagcaacccatcggtccacccgagggatgtgacactgatgatttcgtacattagtgtgtgaaaaagccgccgggaaaattgggggattgggcggcggtgcggttggcgttgagaatggcgcattcgaaggggaagtgagcgcgcagctgggtggccggggtggtgaacagggcggtggcgaggccgtcggccagtgtgacagggacgtgtgccgcaacggtgttcgacgaatcgtcggtatcgcggtttgccgttgtcgaggcattgctgccatgcgtcgatgtcttcgtggttatggcgctcgatggcggcgtgacggccacccatgtggcggctacatcgtcaaccggtagtccgtcgatggcgttgagcagatggtgaagttggtgacctgcggcgtcagaccagtggcggcggctgggggagctcgcgcagaatgcgccgtggctgatttcgaccgtacctacggcgttggccggatcggcaggatcttcaagggcgatggtgattggttcgtccgtgtgcactagcaaatcacccccggcgtcgatgacgtattgaatgggttgagggtgacccgcgccatcacccaacatccccgcaagcaaatccaccaaataccccttaccgcacgcgccgaaatcgagcgcgaccggtccgcgcgtcaccagtgttgtgccatgccgctcaacgtcggctgaccaaatggctcgtccgtggatcgcgcctgcatgttcagcggcatctggcgcaggcgtaaacgaatacgactcgtcatagccaagccgaatcaaatcctcgcccacgcacgggtcgatcgccccatcggttgccgcaaacaggcggtcgtacaggcaaaacagacccgatgtccagtcgggaaaatcgaacgtgccgccatgtgtggccgtgcgcatccggccgaccgtcgaatcatccttaaaccgggacaatgcggcttcataggt

SEQ ID NO: 1712 - DNA, 3406 bp, Unknown
  MAG_14  MAG No. k141_12784
cggcgcggcacacacaaccgcgtggccatcgacaccatgccgcttgccacgcgcacgctgctggacgtcgccaagcgcgaacacgtgtgggaaggcggctttgaacccggctcccagattcgtctttccgtgcccgaaccgcgcggcgagatcgtcgataccgcggcagcagacgacaattacgccgtacttgtggacggcgaactgcgcgccggctcccagctgctcaccgaacaggtgaccatcaacggcacgaccttcgactatcaggttgacgccaacggtttctggcaagtgcatcgccaagcgccgatcgccctcggtacgcacgtgatcaacctggtcaacgggcagctgcagtcagcggcggacgccgtaatctgggatttgtattccggttccggcctgttcaccctgccgctggccacaatgaccggtgaacgcacccgcatgctcagcgttgaaggcgcgcgtgtggccgtcaagaacgcccagcgcaatctgcgcgccatgaacctgaacgacgtggacgcccgcgcgggtgacgtctcgcgcacgctggaccatgtgccggcgcatctggccaagccgaatgtcgtagtgcttgatccgccgcgtgccggtgctcgtgccaaggtctgccgccagattgccgcggccggcgcatccagcgtggtctacatcgcctgtgatcccaccagcctcgcacgcgacaccgcgatactcatcggcgaaggctacgagctcaaagacatccgtgccttcgatatctacccgatgacccaccatgttgagacggtggccctgtttacccgctgacaggtgagcatatgacacgacgaattctcggattgctggcctgcatggcggctgtgttgtccctggccgcctgcacgccggccggtagggcggtcggcgatacccaagacagcatgccggaagtcgcccacgattccacacatcccacggatgtcacagtcggctttgtggggtcgactgacaccgccgcagacgagttcgtcatcaatgcgctgtctgatgacaaactcaatgtctactatgcctcgctcgaaacatccgcaagctcggcaaacgcaactgatggcgtatccggtgaaaccgaatcttctgacgccggcactaccagcgaaaacggtgccgatagtatggatgctcatactggcgtcgacaagaatgcggccaccgcacagcagggtgttgccgatttcgtagctcgcgcggtcaaaatcgtggttatcagcggcatcgacgttaccgacgccaaccgggagagctggaaccagacgttgaccaatgcgcgtgaagccggtattccagtcgctctcattgatccaaagcatgcgcccgaagatgaactgctgtacgccgtcatccttcacctcaacaccaacagtgccgattctggcgacactgccgataccaagccaatgactattactgacgccgtgctcaccatcacgcgcgacgaaccccacgaacgcgagatcaaagtcaccgtttcctgagccgaatcaggcccttgaagctgagaaagcaccctgaatcatccctgagccttagcggattgcgaaacaagacgcggtaggctggggaatatgagtgcaacaacagccgtggaaatgcctgagatcggagcgaccggtcttacctccaaagaagtggtgcagcgtatcgaaagtggccaatcgaatgcggtgaaaacatccacctcgcgttcggttcaagatatcgtgcgagccaacgtattcacgctgttcaacggcatcatcttcgccgcgatggtactggtgctgatcaccggttcctggagggacgcggtgttcggtttcgtcatcatcatcaacacgggcatcggcatcgtcaccgaactcagggccaagcgcacgttggataagctttccatccttgtggcctccgaattcctcgtgcatcgtgacggcagggacgtggaggtgccccacaacgagatcgtgctcgacgacctgctgtggatccgtgccggcgaacaggtgccggccgacgggcagatcatccagacctggggactggaactcgacgaatccatgctcaccggcgaatctcgtaccgtgcgccacaaggtgggggagcaggtgtattccggcgccaccgcggtctccggcatggcattggtcaaggtcaatgcggtcggcagccattcctacgccgccacgctcaccgcgcaggccaaggtatacaagaaaaccgtgtccgacctgaacaagggcatcaacacgattctgaaattcatgaccttcctcgtgggaccgctgtgtattctgctgattctttcgcagattcatacggtcggcggttggggtacggcactctccaccggcgaatggcggcaagccgtggtttccgcggtcgccggcgtagtaggcatgattcccgaaggcttggtgctgctgacttcgctgaacttcgcggtggccgccatgcgtctcgcccgtcacaatacgctggtgcaggagcttgaatccgtggagacactggctcgcgtggacgcgctgaacctcgataaaaccggcacgatcaccgatggcggtatcgccttcaaccggctcgtgatgctcgattccgccaatgcggctgcggaacaggcagccacgcaggccctctacgactgctgcaacgaagagcagcccaacggcaccggccaagccgtactcgccgggctcaaggcccaaggatatggggcaggtgcggttgagtctcgtgtcccgttctcttcggcgcgcaaatggagtgcggtgcgtaaatccggcgagacctggtacatgggagcgccggaggtgattatttctgcgcttgagggtgactattcgtcggtgttgcagcaggttaacgagtatgccaatgacggcaaccgtgtgttgcttgttgcgcggtctactgctcccctcagtccgcgaagcggactgaggggagcagttgagggagccaatgtctcggacggcccgcaactggatgtgcaggctgagccggtggcgttggtgttgtgctctgagaagattcgcgaggacgccgagcggacgctcgcttggttccgtgagcagggtgtgcgctgtcgtgtgatttccggtgacaatccagtgaccgtgggtgccatcgcccgcagagtgaaactgacaggcgaccatgagccggtggcgatggacgcgcgcgaactgcccgaggacgtgaacgaactggcccgcgtgctcgaaaacgtcgatgtgctcggccgcgtgctgcctgaccagaagaaggccatcgtgcaggcgttgcacacgcagaaccacgtggttgccatgaccggcgacggcgtcaacgacgcgctcgccatcaaggaggcggacctcggcatcgccatgggcaacgcggc

SEQ ID NO: 1713 - DNA, 3219 bp, Unknown
  MAG_14  MAG No. k141_13219
atccgcaccggcgccgacatcatcgccatgtccttcgtgcgtttcgccaccgacatcgaccgcgcccacgagatcatggacgaggagggccgccgcatcccgatcgtcgccaagatcgagaagccgcaggctctggagaacctcgaagagatcgtcaagaccttcgacggtgtcatggccgcccgtggcgacatggccgttgagtgcccgctggaagaggtcccgctggccaccaagcgcatcatcgagctggcccgccagtatgccaagccggtcatcgtggccaccgaagtcctcggctccatggtgaactccccggtcccgacccgtgcagaggcctccgactgcgccaacgccgtcctcgacggctccgacgccaccatgacctccaacgagaccgccgtcggcaagtacccggatgtgaccgtggccaccatgtcgcgcatctccggctacgccaccgaccacggcttcgaccgcatcccggagctcaagaacctcgacatgtcctccaccggcgccgtctcctccgccgccgtggacctggccgacaagctcaacgccaaggccatcgtcgcctacacccagaccggcgccaccgtccaccgcgtctcccgtgagcgtccggccgccccgatctacggcctgaccagcaacgagcacacctaccactggctggctctgtcctggggcaccgaagccttcctgctcaaggaggactaccacgacaagtcccgcaaggatctgatgatctacacggacaaggtcctcaaggatgccggcaaggttgctgacggcgacaagatcgtcatcctgagctctgctcagggcgatcaccagccgggccgcaccgactccatctacgtgcacaccgttggcgcttgcgactgatttcaggccgctggtagctgctgacagctagcacatagcacgcgaaagccccccatccagaaagtggatggggggctttcgttatccgttatgttgcgattgtgcggtgattgcaatggcacgtagtcaccgcgatgatcgagcgtggtgactagtcgttgagatgatcgagcgtgccgctcttcagacgcagaatggcgaccatggtcttggcatccacaatcgtgccattgaccaccatctcataggcatcgtccaccgacaccatacgcacgtcggaacgcggagtctccgggccgatttcctgacgggaagccggggtaagtccggtggcgaagaagattgcggtgtgctgggtggaatagctcggcgtgttcataaaacgggtgaactgcgtaagcttggaggcatcgaaaccagcctcttcggccagcttgcgcttagccacatcggtcgggcgttcggacgggttgttggcgtggcctgccggaatctccaacgtccaacgatggttggcgatgcgatactgctcgaccagcggaatcatgccgtcatcggtgacggccagcacagccacagtgtcgccattgttctcctgaacaaagtagcgttcaaacgaaccgatctgattcgactcataggagacgtgatcgacattgaaataatgcgtctccacaatctgtctacgggaaatctccttgaccggagaggggcgccagggatcgaactgacggtaagtttcgttgctcataagccctcctaacaaaagcgatacatcgaaactacagcccattgtaagcggtgaaaccacgcagaagaacgggcaacacacgggtacgccgtccacgatatcgacgtgtttcgcctgttttaccggggggaatggaggactggcgcgtgtcttgtgtcgcaggagtcgaatcggtatgctactctcttcagagtgcttaggcacgccctcgtatcccaattggtagaggaagcagcctcaaaatctgcgcagtgtgggttcgagtcccaccgagggcactttagctaggagttcgctgaaattattacgaaccccattgttgggtaattcaagaaagaggttggcatggctgcaaggaagaagtccgaagaaccgagtatcaacgtcgatgaggtgctgaccgacgaagaactcaaggccgtagccgatgaaagcgaacctgctgagcgcaaggccgtggccgaggatggtccgcgtaccgtcgtcgtggccgaggatgaagccgtgaaccgcatggatctggtcgccatgctggaagacaacggttatgaggtcgttggtcaggccgccaacggcgaggaagccgtggaactgacccgcaagtatcgccctgatgtggtgtgcatggatgtcaagatgccgcgtatggacggcatcgccgctgccggcattatctgcgatgagaacatcgcccctgtcgtcatgctcaccgcattctcccagaccgatctggtgaagaaggccaccggtgccggcgccatggcatacgtcaccaagccgtacgaggaatccaagttgctgccgaccctcgaggtggccatgggccgtttcgccgagatcaacgatctgctggacaacgtggagcgcagcgaacgcaagctcaaggaaaccaccgaccagctcaaggaaaccgaagagaagctcaagaaggccgaagacacgcttgaggagcgcaagctcgtcgaccgcgccaagggtctgctgatggacaaggctgacttctccgagcagggtgccttccgttggattcagaagacctccatggaccagcgcatccccaagaagcgcctggctcaggccatcatcgccaagtacggcgatccgaagccttctgattcgggcgaacgctgattatcggcatcaccgtgctgagtcgtaaagcaacacaaacacactatgggagaggccagcgtgaccgtacccaccaatgaaacattgctggtggtggacggccactcgctggccttccgtgcatttttcgccctgccggtcgacaacttcagtacttccagcggccaggccaccaacgccgtctggggttttgccaccatgctcgcgcaggtgatcgatgcggagaaccccgaccatctgggcgtcgccttcgatgtgaagggcggcacattccgcaatgagatgcttccgcaatacaaaggcacccgtgaggcggctcccgaagagctgctcacccagctgccattgattcaacgcatgctcacggccctcggcgtcacctacatcgagaagccgggattcgaaggcgacgatgtgatcgccaccctcgccaccatgggagacaa

SEQ ID NO: 1714 - DNA, 5772 bp, Unknown
  MAG_14  MAG No. k141_13543
atgtcgttgggaccgaggcccccagggccgtctccacagatgccgcatcgaacggtgcatccgacgtcgttaccatcaccggtgccaagctgaatgcgaacaagcccgattcggccgtggcgcgattgctcgccaacccggtggtcatttccgtgatctgcggcatcgtgctgttcaccgccagcaccctgcagcagtatggcattctgtacggcaaatcggccggccgcgcgggattcctgaccgccatgtacatcgtgatggtgccgttgctggcctgcgtgttcctgcgccggcgcatcggcatgctggtgttcgtggccgtggtgctgtccatcgccggcttctatctgctgtgcatcaccgatggtttcggttcgatcggcctggcggatatcctgctcgtgttcacggccgtgctgttcgccgtgcatattctggtgatcgatactttgggcggcaccgtggacgccatcaagctttcattcggccagttctgcaccaccgccgtgctgagctgggcgggttcgctgatcgaaggctcggtcgactgggccggcgctgctcattcctggattccgatcctgtacgccggcatcggctcggtgggcatcgcgtacaccttgcaggtggtcggccagcaatgggtgccaccgacgcgagccagcctgctgatgagcctcgaatcgttcttctcggcggtaggcggtgcgttgcttctcggtgaagtgatgaccccgcgcggttacctcggctgcgccctcatcttcctcggcaccctgctggcccaagcgccggccaggctgccgaagtggctgcaacggtgaatgaatcggacgcaggccgattccatagcacctcagtccgaggtcttaggcgcttcacccacttgcggcgcgccgttgatgtcgcggtggatgttctgcatttgcacttcgatgttctgcagcgaacgggcgcagtcgagcagtgtctgtgaatgttcgctgagcttgttgtccggcaaatcggtcttgtagcgcagcgcatgctccagcgacgcccaataatccatggcgatggtacggaactgcacctccaccggcgtgtaatgcgcgcccgaggagagaaacacgggcaccgcgtagattacgtgcaatgaacgatacccgttctgtttcgggttcttgatgtaatccttgacgcgcagcacctgaatatcggactgcgacgacagatagttggacacggaatacacgtcgtcgcggtaattacagatcacgcggatgccggccacatcgaacagattgtccttaatcgaattgacactgattggcagattcttgcgctccagcttgccaatgatcgaactcaccgacttcagacggcgttccatatgatgtatcgggtcatggctgaaccgcacctggaactcgtcgtcgagaatctccagcttggtgctgatctcgtacatcgcgccttcatacacctgcatgaggtcaacgaatttaacgacctgttcgggagtgaaggtgcctcccggaagatccaacgctttgagacgggcctgtagatcggaggttttgagtcggctatgtcggtcaagtatcacgtccaccaatatactcggcggattccagacaatctggatgttcgcggggaatctttccaagaacccatatttaagatcgtgacaaccaatggcatacgtgaccggagcatgacgaaccccgccgatagaatcggtcgttatgaatgaagacatgatgaccgaggcagagcgtgcctcgattgcagccgatggaaccgatagcttgctgggggagcgcggcaagggcgtattccatatccacacgctcggctgccagatgaacgtgcacgattccgagcgcatcgccggcgtgctggaggccaatggctacgtccctgcaaccgaggaccagatcaatgacaatgacctcgatttgctggtgctcaatacctgtgcggtacgcgagaacgcagccgaacgcatgtatggcaccatcggccgattcaatcgcgtcaaactggttcggccgaacctgcagatcgccgttggcggctgcatggcccagcttgaccgcaagaagatcgcggatactgcgccatgggtttccgcggtgttcggtaccaagaacatcgaagatctgcccaagctattggatcagaatcgtgcgaccggccaggcgcaggtccaggtcactgaacaattgcggcagttcccgagccagcttcccgccgcccgcgcctcccgcatcagctcgtgggtggcgatttccgtgggctgcaataacacctgcacgttctgtattgtgcccaccacgcgaggcaaggaaaaggaccgccgccccggtgacattcttgatgagattcgccaatgtgtggccgatggtgccaaggaggtcacgcttctcggccagaacgtgaactcgttcggctacggcatcggcgatcgatacgctttcagcaagctgttgcgtgcctgtggcaccatcgacggtctcgaacgcgtgcgcttcacttcgccgcacccggccgccttcaccgatgatgtgattgcagccatggccgaaacgccgaatatcatgcatcaactgcacttcccgctgcagtccggttccgatcggattctacgcgcgatgcgccgctcctacaggtccgccaagttcctcgatatcctcggtcgtatccgcgaggccatgcccgacgcccaaatttccaccgatatcatcgttggattccccggcgaaaccgaggaggacttccagcagaccatggacgtggtgcgccaggcgcgcttctcctcggcgttcacgttcatctactcgccacgccccggcacgccggccgccgcaatggaacagattccgcgcgacgtggtgcaggaccggttcgaccgactggtggcgttgcaggagcagatcaccgaagagaacctcgccacattcgagggccgcgacgtcgaagtgatgatcaccggcaaactcggcaagaaggacaccgacacccaccgtgtcaccggccgcgagaaaaccggcgtgctggtgcacatcggcgtgcctgaaggcgaaccggtacctgaaatcggcgatttcgtcacggtcaccgtcacacacgccggccgccataatctgcttgccgaccccgatgtggccgctggacagacctattccgtgcgacactgagggggcgtatatgacgcaacgagtcgtctccatcgtcggtcccaccgcgtcaggcaagacggggttgggcatcgccatcgcccggcgtcttgccgaagcgggggagcgggccgaaatcgtgaacgcggacgcctaccagatgtaccgtggcatggatatcggcaccgccaaacccaccgccgaagaacaggcggccgtgccgcatcatctcatcgacatcatcgaccccgaagacacgatgagcgtggcccgattccagcagcttgcgcgcgagaccatcgccgacctgcaatcacgtggcatccggccgattctcgtcggcggctccggcttgtacgccagagcggccatcgatgacatcacctttcccggcactgatcccgatgtgcgcaaacggctcgaggaacgcgaaaaaaccgagggggcgggcgtgctgttcgacgaattacgggataaagaccccgaagccgccgcgcgcatggacccacgcaacccacgccgcaccatccgtgcgctggaagtcatcgagcttaccggcaaaccgtattcggccagcctgccgcgctaccggtacgtgattccgtccgtacagatcggactcgacctggaccgcccggatttggaccatcgcatcgacctgcgcaccaagcagatgtatgacgatggattcatcgaagaagtcgaacggctgcgcccgcatctgggtgccaccgccgtacgcgcgctcggctatcagcagatcatcgacctgctggacggcatctgggatgtgaacgacgccttcgcggacatcgcacagaaaaccaagcgactcgcccgcaaacagatgggatggttcggccgtgacccgcgcatccactggctgcaggccctgaacccgaaactggtcgacaacgcgatggccattatcgcgcacgccgacgccggcgactacgacccgatcgacgcccgagccgacgaatacacccagcatcatctgggcgatatcacggcgtaggaatcagccaaaggccggtgcaatcacccgcaatcagtgtgcaggcccctgattccagccggcgatcaagaacacgcgcgtcggattcgccgggcgtagtatcgcgtcgaacatcgtctccagtgcagacgtgtcgccccgatatgccgagtgcttggcggagcgatactcctcgcgcgtcactgagccccagtcgagatcccagccggcgtcatgcgccaagcgtgaaccgaatatacgcagcaccatcgcattgccgccacggaacggatgcagataaccgagctcatcataaatagaagcgaacgcgtgaacgaacacgtcgcgatccaacgcatgcaggttgcgcttgtccgccaactccatcgcgatgttgtgcgcgccggtctcaatgagcccagccgggaagaacgcctccggattcgcggcccgagcccggtcgttcgtcacctcgcgtgtggtgtttgaggtacgcaacttgcccgcatcctcgaacacgccttcgaacagccccttatgaatggcggtcaactcgtccaagtcgccagacggattccaccgacgttccgccaacaacacggtacgtgcgaacaccgcatccgcgcgatccgtggcatgatcatccagactgccggcagccagacgatcctttccggcagggtcggcggcggcgcgcagacgcatggcggtctgctcgtccgccacgtcgatgagatgggtcactggctccaagccacgttcgtaggcaaccgcggcgcgcatcgttgcctcgcccggcgtcatcgcttccagtgcgcagttcttgagtgcaaatgcgactgcgctcgcacgctctgcgggtgtcatgcaacccatgataaggcatattcgcgctccagcggggaatcgactcggacgaacctcgacgaaccgcggcgaatcggctgtcgggattcgtcaatcgaccatatcgtcacggtgtcgtcaccaaccatgcacccccgtactagtagaatcagacccgatatggcacgaacagcatcctccaacagcaccaaaccccgtaaatccaaagacaacgggtctacccatgatggcgaaaccaaggtccagcccgagcttgacctcgaacctgagccgttgtggaagaagatcctgctcgcgattccgcgcgcgttcggctccggcgtacgcgccgtcaccggcgtcggcgaatacgacccagcctaccgtcgtgacggtttgtgcttcctgctgctcgtgctcgccgtactgttctgcgcgtccgaatggttccgtgtcagcggtccattcggccagctgcttcacgccatcgcggccggtgtgcttggtctgatgagcgtcgtgctgccggtgttgctcgccgccgtggccttccgactcatgcgcaattccggtaaagggtccaataacccgcgtgtggtcaccggttgggtgctgttcatgtggtcgatttgttcgatcatcgacgtggcgatcgccgccgaccacaccggattcgacatcacgattctgcaatccgccggcggcctgttcggcttcttcctcggctcaccgctcgcctggggcctttccaacgtgttcgccatc

SEQ ID NO: 1715 - DNA, 7904 bp, Unknown
  MAG_14  MAG No. k141_13610
gccgttgcagaacgccatgccgaggaacagcacgccgatgaacttctggccgtcctgcgcgccatgcatgaagctcatggccgccgcgcccacgatctgcgcgtaggtgaagaacccgttggtgcggcggcggtccatgccggcgcagatcagggtcacggccttgcacaccaaccaacggaacgggggcaggctcatactttgcttcgatatgctcgtcgacatttcccgccatctaccgaggattcggtcatgcgtgtgcgaaaatggacacggtgtcaatcaggaggtgcacagtggttgtaagcacggattcgagccgcacaatgcccgattgggtgaagtacggggtgttctggcacgtgtatccgctgggcttctgcggtgccgatatcaggcccgccggcccgcgccagttccatggccgcggccttgacgcgatgatcccttggctggagtacgtgcgcgatctaggcgcgtccggcctgctgctgggtccggtgttcgagtcggcgacgcatggatacgacacgctcgaccatatgcacatcgatgtgcgattgggcggggatgccgcgttcgaccagctgatcgcggcctgccgggacatgggattgcaggtggtgctggatggcgtgttcaatcatgtgagccgcaatcatccggccgtccgggcggcgcttgacgagaccgccggacgcttgaatccggccgacaacccgtggcatggtctggtccgcgcgcatgtcggtgataatgacgaacccgctttggatgtgttcgaggggcacggggatctggtggcgctggaccattcggctgacgagaccgttgactatgtggtccatgtgatgagccattggctggatcgcggagccgccggctggcgcctcgacgccgcatatgccgtgccgagcccgttctgggcgcgcgtgttgccgcaggtcaaagccgcacacccgtattcgtggattttcggtgaggtgatccatggcgattacccgcgcatcatcgaggaatccacgatggattcgatcacgcaatacgagctatggaagtcgatccagcatgcgctggagacggagaacttcttcgagctggattggaatctcaagcggcacaacgcgttcctggattccttcgtgccgcagacgttcatcggcaaccatgacgtgacgcgtatcgcatcgcagattggcccggccaaggcggcgttggcattggcggtgctcatgacggtcggcggcgtgccaagcatctattacggcgacgagcagggctatgtgggcgtcaagcaggagcgtttcggcggcgatgacgacgtacgtccgaagttccccgactcccctgccgaactgtccacgctgggagagccgacataccggctgcatcaggcgctgatcgcgctgcgccgtcgcaacccatggctgatggatgcgcgtaccgaggccgtgaagctggaaaacaagcacttcgtctatcgttcgacgagcgccgacgcccagcattccctgaccgtggacctcaacatcgagcaatcccccactttcaccatccgcaacgccgacggcagtacagcgtatcaatactgagctacctcatcagagggagctcaccatttaccgccgaatgcctcggatcagcaggtcgagcaggtacccgtacgaccggtcgacccgttcgcggccacgtgtgcggggttgtgcggaacgcagttcgaattggatgaacccgtgtatggacacccagatggaggatgcaatcaggtgagggtcatcgtcgcggaacacggccgccgcctggccgtatcgaatgatctgcgtgatggcttccaggcaatgctgggccgagtccgacgcctgccccatccagaccagcgcgtaaatgccgggggcatccagcgcgtgttcacggtagatcatgcccgccctgcgcaggcgcagcacggggtcggattcgtcaatggcgatgagctgttcgcgcagatcggtgaagtatgcgtcgatgagcgcatcggacaccgcctgcttgccgccgatatgctggtagatgctggtgggcgacacgtcggcctgcgcggacagcgtacgaatggtcagaccgtccacgccgtcctgttccacgatctgcctcgccgcgtcaagaattcttccgcggatttcaagggttggcgtgcgtctggatcggggctgcgattgcgtcatatccgttattctagggtgcgtacaggccattaccgccgttttggcatggccacgatcgcaacgaccgcggcgataagtgcaatcgtcatggccgccaggcagacgctgtgcagcccgtccatgaacgcggatgcgaccgagtcatccagcaatctgcgcagggtgcccggcaggaagccggagatggattcggcagccatcacggattccttggatgcgccaaggatgccctggggcaggtgggatccccgcagcgcgtccgtcaggccggtggtgtacgcaccggcctgcagcgaccccatgatgccgacgccgagcgcgccaccgagttcgcggatcgtgtcgttgacggcactgcccatgccttcctcgccgaccggcacggccgtcatcagtgtgtcggtggcggtccctggacgagggcgatgcctgcggccatcactgccatgacgaccgcgaacggcagtgtggcaatcgccgtctcgagcgccgaatacccacgcagcgcctggaaccattgggttgtgaggaagatgaaaccgaacaggcacaggaaggcggcgcaaatggccaacgtgccgatgacggcgcacacccagaacacgctatcccatgcgaaccgttgcagcaggatgccgccgatgaccgggccgagcactatgcccaccccggatgtgccgacccacagtccgacggccagcccacgcataggcgatccgtcgaacaacccgatgatggatgacagcgtggctcccatcaagttgtgtattaatataacatatttatgaaacaatgatacacatcatgtcgggaacaggcatccgcatcgaaaacacccacctacaacacgatcaggcccgacgaccatcaaaggtcgtcgggcctgattcatacgcgctgtcggactaacggcgtccggacttcatacggaatggcgcattattgcgattcttcttggaatggcggcggttcgggccttccgtgttgccgtatttggcgatcatgcggcgttcgtgacgcttggccccttctgaacgctcgtcgcgtacgatgcggttctcgttcttgcgatggatgcgcttgtcgaattttccgcccttgccgtaccgatcattgcgacggttcttgccgtactcgttgcggccatcgtcctggcgctcgtcgtaacggtttttgccgtatccgccgcgacggccgcccttacggcggtcatcgccatgctcgaacagatagtcgcggcgctcggcctcggggttgctcatgccggcgcggcgttccgcacggttgcggttcttcttcacggccttcttgctggccttgtcgccgtgcttgcgctgcggctcgccttcggcaacaaactcgccgcctgcgttctcgtgctggaatccggtctcggcaacgttctgctcggcgcggtcgcgattgcgattgtgcttgcgcctgccgctgcggccggactcatcgcccgccgcgttcttggcgcccctgttcttgcccttgcgcgggttgcccacgggctgcgacttgtcgaggctccagccatccacgcgctcggcgcggtcgcccacaagctcaagcacttcgggcgaatcgtgggtcacttcgatcatcttggttttgatgccggcctggttcagtaagcggcgcgtctcgcggcgctgctcgggcagcacgagggtgaccacgtcgcccgccttgccggcgcgggcggtacgaccggagcggtgtacaaaggacttcgggtcagccggcggctcgacctgcaccacaagctccacgccgccgacgtctatgccacgggcggccacgtcagtggccaccatgacgcgcacgtcgccggaatcgaatgcggcgaggttgcgatcacgctggttctggttcaggttgccgtgcagctcggcggccggaatgccgttctgcgtcaggttcttggcgagcttcttggcctggaacttggtgcgggtgaacaggatgcgacggccttcgcccgaggcgagcacgcgcacgagttcgtgcttgtcgccgcgcgtggtctcgaacacgtggtgggtcatcaggtcaggttcggtggtggccgaatcgacctcgtgcaccttgggatcatgcaggaaggtgttcaccacttcatccacaccgtgatcgagcgtggcggagaacagcatgtgctgggcgtcgggcgaaatctgctcaagcagtcgcttgaccggcggcaggaagcccatatcggccatttcatcggcctcatcgatgaccacgacttcgacggacgagagcgtgagcgcctgctggcgcagcaggtcctcaaggcggcccgggcaggcgaccacgatatcggcgccggccttcagatcgcggatctggtggatgtacttgacgccgccgtacaccgtggtggtgttcatgccgaacgtgtgggccagcggcatcaacacgtcgttgatctggttcgcgagctcgcgggtgggggccagcaccaggccgcgcgggtgcggcaggaaatcgtcagcgcggcgctcttccaagctggccttcttgcgacgcttgatttccttgcggaactcctccatcgcgatttcgccaagcgaatcataggagccaagccgggtgaccagcggaatggagaaggcgagggttttgccggagccggtgcgccctcggccgagaatgtcgcggccggccagtgaatcgggcagggtgtcggcctgaatggggaatgcggtcttcttgtcatctgccgcaagtacgcgcaccagcggtccgggtacgccaagttcgccaaaggtaagggggcgggattccgcgctgtcgttcatctggaaatcagcggaatcgtcacgatcatcgaaattattacggggcacagtggcctttcatgtcaaaggttacgcaaattacgcaagctttccgagcttagcgtaagccccctactttgcttgatgctcgccacgctgtcatcccactctttactgatgaccccatggggcggtaactcgcccatgaggcggtaactcgcccatgaggcggtttgaagaaattgtgaaaccgcagaataaagccattttcacctaccgccccatgagggttttaccgccccatgggatgtttgccgccccatgggccaattaccgccccatgggttctaccaccacgtaaggcgagcaccgccccatggaacacgcaaatggcccctacccgtgaaggtagaagccattgtgcaaaagggctgagccacaatacggcccagtagccctaaaacacactacaaaatatccggatcgtctttggcgatagtgccggttgccttgccaatggccttcaggccgtggtaggccacaagaatcacgatcgtgccaatggcaatgccgttgaaggaaatgccaccaacagtgaacgcgaattggccgatggcaataatcatggtgatggctgccaccatgatgttcagcggcttgtcgaagttgaccttgttctcaacccagatgcggatgccgatcatgccgatcatgccgtacagcagcgtggtcacgccgccgagcactccggcggggatcgtgttgatcacggcgccgaacttcgggcacaggctcaggatcagggcgaaggcggctgcgcaccagtaggcggcggtggagtacaccttggtggcggccatcacgccgatgttctcgccgtaggtggtggtgccggagccgccgccgaagccggcgagcgtggtgcccaggccgtcggccatgagggcggtgccgatctggttgtcgtagtcgcggccggtcatctgggccacggacttgacatggccgacgttctcagccacaagcacgagcacaacagggacgaacatgggaaggatggaaaaatcggcctgcggcaggtggaacttcgggaagccgatccatgcggcgtcaccgatggcggagaagtcgacctggccgcggatgcaggcatatacatagccgatgattacgccgaccaaaatgttgaggcgacccagcaagcccttgaacagcacggccacgagcagcacggccagcagggtaaccagtgcggtgtccggcgcggcttggaagttggtccacacggaaggtgccagattgaaaccgatgatggccacaatcgcgccgttgaccacgggcggcatgatgatgtcgatccatttggagccggcgtaatgcacgagcacgccaatcagggccagcagaataccggtgaccatgatgccgaagctggcgaccgcaatgcccttgttggcggtggtgaccgcggtgatcggtgcgatgaagccgaaggacgagcccaaatagctcggcagcacgttcctgttgataagcaggaacagtgcggtggacatagccgtgaagaacagggtggtggacgggtcgaagcccgtcagaatcggcactaggaaggtggcaccgaacatggcgatgacgtgctgtgcgccgataccggcggtgcgcacccaagtcagacgttcatcgggctcgacgacctcgccgggcgccagcgtcttgccgtcgccatgcaattgccattggaagatattggacattactactctcctcgctctcgcttggggcacggcattcacaaccagccgcactacgcgccattctagctcacgaagattttgtgaagtctctcttccgggaaaggctatttgccgtaatactccagcaggtgcggatcgacggcctgcaccacatccaccaaatcgccattggacaggtacgggcgcttgaattcgcgccacggctccaccttgacctcccagcggccggtcgtctcgtcgagcacgggccgggcggtctgctcccagcgcacacgcttggaggtgcggccggtttccgggtcgcggcgcgtgtagtgcaggcaggtgcagttggtgatcttccagtcgtccgagtcggcgcgatgcaggaattcctcgtcggccagatcctcgatggtgagcatcagggcgagcatgaagtcgccgtgggtgaccatgaccacggattccgaatcggatttgcggctcagcgaggtcaggatgttgtgcacacggtcctcggccacatcggcaatcgactcgcctgccggcggacgccagtacagcggatcggtattcttgaagttccagttgcgtgcgtagttgtttttgaattcgtccttggtgatggtgttgatttcaccccaagaacgttcgcgcagcacacggttctcctcccatttggccttgggcagggccatggtggctgcggtttcgcgggtgcgcacgtatggcgagaccatgtaacggtcgaacagctgctgctggctgaccagccaacgaccgatgcagtcggcctgcttgcgtccggtggcggtgagtctccaggagcggtcgggtacggtgacgttgtcctgcgtatacagggagttgtcgccctgttcgcccgcctggacgatgacgttcgcttcggattcgccatgccggattacgtatagatcgagcggcatgctcatatggattcctctttcgttattggttacgttgtgttgttttctgctgtttcctacttgacctgcgtaatggtgttccccttgaccatgaacgcatgccgggccatgtcgatcatcggctgatcgaacttggagtcggtgtagaactcgtcgatgacggcgtccggaccgtacagttcgcggaaccgtttggccttgttggtgctgaagttgaggtac

SEQ ID NO: 1716 - DNA, 3149 bp, Unknown
  MAG_14  MAG No. k141_14584
atgaagcttgccgcccggcgtaaggcgctcgctgcggccgccagtggtgagccgggcattatcgtggccacgcacgcggcgttttccaagaccttccaagccccgcacttggccttggtggtaatcgacgagcagcaccggttcggcgtggagcagcgcgaaagtctcaacgccaaaaccgacgacggcaccacgccgcatctgctggtgatgaccgccacgcccatcccgcgcaccgccgccatgacttggttcggtgatctcgatatttcctggctcaccgaattgcccggcggccgcaaaccgattcgcaccgtggtggtcaatgaggccgacgccgccaccatggggcgtatgttcgcgcacattcgcgcgcgagtcgacgcgggggagcgggcctatatcgtgtgcccgcgcattgatgcggatgatgaggggaacgaaggcggttccggcgtttcggcagcagccggttctgcccgcggacgcgccgcagcatctggttccagtgcccgcacagctgcgggcggccgtgcaacgcgcgcggcggccgacgccatcggcatcgacgatccctacgaaaccttcgacgagaacggcgaaaccgtggctcgcccgccattgcatgcggtggccgaaatcgccgaccggttgcagaaactcccgcaattccaaggcattcggtttgcgactctgaccggccgcgacaaggatgacgtcaaaacccaggtcatggccgattttgccggcggcgagactccgattctggtgtccaccacggtgatcgaagtcggtgtggatgtgaaacaggccagctgcatcgtgatctttgatgccgaccgatacggcctctctcagttgcatcagctgcgcggccgcgtggggcgtggcggcaccaactcgtgggcgttccttgtttcccgtgcggaacccggctccccggccgagcaacggctcgaagtgattcaccactcgctcgacggtgccgaaatcgcccaagccgacttggaattccgcggtgccggcgatgtgctcggcgacgcccaatccggcggcaagtccagcctgaagctcctgcgcgtggtcaaggacgccgacatgatcgccgacgcccgcacccgtgccgagcagcttctggctgccgaccccgaactggcagacgaggtccaactcgccggtgccgtcctcgacttcacccgaggcaacgaaaccttcctgacctccagctgaggctagggctgcgccccccgtaatcgcacgatattgtattttcatctggtaaacagaagtaaatgcttgtgccagagacggattgcatatgcatgggtgcttcgtggaagctgattctgtgttccgttgctgagttacggacgtgctggcgatacgcagctttcgcgttcgacaagctgcgtgggaaaaatgaagtaattctgttccacctttccttcccgcgcttcgagaatcaggttgatgcattgtctggcgatgaggtcgaatggctgcctgatggtcgtcagggatggacacatgcttgccgcaggatagacatcgtcgaaaccgatgatcgataattgttcgggcagactgatgccgtgctgtcgggcggcgcgatagacgttgatcgcgccgagatcgttgaacgcgaagatggcggtcggtcggtcctgctccctcatttccaggagatcgcatgccgccttgtatgccttgtcagatacgtagtcgccaaccttgatgagatgcggatccgcgctgatgccgtttttctgcagcgccgccatgtatccgctcagtcgcgcctgcgaggactgtgaattagtagggccagtgatgacggcgattcgtcgatgccccaatgatatgaaatattgcgtggcgagcattcccccggtccagttatcaatgcccactcccaatgcgtcagcggagacctggccgaccggatcgacaatcacatatgggatgttcctcgtctgcagcagcgattcctcggccgatgagatattcgataagagaagtatgacgcctagtgggttgcgttcgatggcgttacggaggcagctgctggcctcgtttcttgttgcgtattctccggaatccggtccggcgcagcttacggtgatgccgaggccaaaatctctggcgtatgaagctgtctccttgaccatttccacggtgccgttgttggtcatttcgctgacgaccagttcgattgaccgtatggtttttgttgtgggaagttttttgcggaatccggcttcttcgaggagcagttccaccctatcgcgggtctcgtcggagactccatcacggccgttgatgaccttggacacggtagcgggggatactcccgccgcttgggcgatgtcggagaccttcggtctgtttgttgttttgattgtggccatgactcttctcttttcgtatgcgacgctgcaaaaaagcgttatatatagagtagcgaaattttcgctactctaaaacagcttttttatcggcgtattgctgtctatatagcggaaatgggtgttgtagacatggattggctgctgtttcttcgatgagtacgatttgtgcatatcgttgcaataaagcccttttaaggcgaaaaaacaagataaagaaaatttcgccacgcgcaacgaagttttatttgctcttttttgtaaaaccttgtatattgaacgtaccgatgaatgaaacggcaatggcaacgatgttgttggcgggctcattcagacgggttaagaagaaagagaaaaactatgacaaatgcaacggcgaaaccggatacttccgggatgcgcaagccgaagcgcgagtacataggcatgttatattgtcttccatacgtggtggtcttcctattcggcatgatcatcccgatgttctacgcgctttatctcagcttcttcaagcagtcccttcttggcggcaccacattcgcaggcttcgacaacttcatagctgcatttaaggatgaagcgctgtggagcggtttcagaagagtgctgatttatgcggcgattcagattcctctcaatttgatcctttcccttgtggcggcgctcattctggattcccagagaatccgtcatatcgcagtgccgcgaatcctgctgttcctgccttatgccgtcccaggcgtc

SEQ ID NO: 1717 - DNA, 5184 bp, Unknown
  MAG_14  MAG No. k141_15359
cactcgctgttcaacttcaagcgcaagttccagcccgccgaagcgccggtctacgggtgctacccggacccggcggcgttgccgcagatcgggctcgcggtggtgcgcgcctacgtgcccagcgtgacgcccgccgaagtggccggcatgctcagcacgctgcggtcgtgaacggcgcgcgccgtcatggcgtagtaacgtgggacgcatgagcgaacgtaacgaacacaatgacggaaatacgcaaaccgcatacttcgccggcggttgcttctggggtctggagcgctacttccagaacgtcgacggcgtcacggacaccacggtcggctacgcgcaatccaccgtcgaatcgccgacctacgagcaggtatgcgcgggcggcaccgatgcgaccgaaaccgtgaaagtcgagtttgacccggcacaggtcagcctgcggacgctgacattgctgttcctggaggtcatcgacccgttctccgtggaccagcagggcgaggaccgcggccggcagtaccgcaccggcatgttctacacggacgagacgcagcgcgccgtgtatgtggcggctctggagcagctggtcgaccgccagccgcagcgcccggccgtactggtcgaaccgctgcgcaacttctacccggccgaggcacaccatcaggactatctggtgaacaaccccggcggctactgccatgtaccgatcgccgcaatcgcgaacgtaaaacgccgtcaaaagtacgtggaacgcatctgggatctgacgctcgaacagttcgccgtcacgcagaacgccgctaccgagcgcccgttcgtcaacgagtatgacgaggagtttgagcccggcatctacgtggacatcgtcagtggcgaaccgctgttctcgtcgcaagacaagttcgattccggctgcggctggcccgcgttctcccgcccgattgccggtgacttgctgaccgagcatgaggaccaccgcattccgggccgcgaccgcatcgaagtgcgcacgtcggacacacagattcacttgggccacgtgttcaccgacggcccggccgaccgcggtggcctgcgctactgcatgaattccgccgccctgcgcttcgtgccgcgctcgcgcatggccgaggaaggctacggcgactggattgcggttgtggatggggatgatcaggcatgagcatggagaatatcgcgggcgctcgcaaacctgccaagcgtgaggatgagcggacggtcgccggcgagcatcgcatgatgcgccgtgcggaccgcgaggtgaccgatcccgagcggatcgccgcgatcatcgccgcctgcgacatcgttgaagtggcctatgcggatgccgagggcctgactatcgtgccgctgaatttcggctttgattacgacgaggcgactggcaagctgacgctctggttccactccgcgccgcgcggccgcaagctcgacgcgattcgcgccgccgccggtggccgactgcccgtggctttcaccatgcagaccgactgcgaggtggtggcgggccgcaccacgtgcaattggggtgaggcgttcaagtcgatcgtcggcaatggcacggcgtcactggtcgaggatctggatgaatgccgccacggcttgcagacgctgatggcgcagcaggcgcatatgccgaatgtggaattcactgatgcgcaggtccgcagcgtcacggtgtggaagattgagtccgactacttcaccaccaaagtccgcaccaaacccgtgcccgcacacatgcatcagcgttagccggggatagcgcgccacctccccactggcgggaggcagcgcgcagcgccggtggatggcccacgtccggacccgatagacttgccgccatggcagcagtgacagtggtaattaccagctacaatcagggcccgttgattcacgaggcagtcgagtcgtcattggccccagacggttcgtccggaacggatcatcatcgtgaacgatgggtccgatgaccacgcatccgtcgagatgctgaacgccactctcgacgattgccggcacggggcgatggatgcgaatggtgtggccatcgacctcatcggccaggcaaacgccggtccttccgccgcgcgcaaccgtggcatcgccgccgccgaaacgccgttcgtagtggtgttggatggcgatgaccgtttgcggccggccttcattgagcgcacgttgtcgatgttgtccgccgacaaaacgatggtcgccgcatccggctggctgcagactttcggtgtcctggaatcagtggtccagccgactggtggcaatgccgccgcgttcgtgtcgcataattgctgcccggccacgtgcatgattcgccgtgtcgcgtgggagtgctgcggcggctacgacgagtcgatgcgcggcggcttcgaggactgggacttcttcctgtcgttgttggagtgcggattggcggtggaaaacgatatctgcggtgctggggttactggcggtactgagcatgtcggaggttttgggagtgcctgggatacagagaatcccgcaaaagacgcggcccatatcggcatcgcccccgagccgctgatcgagtaccgcacggccccggcctcctcaaacgtgaccagcatgaccaagcgcctcgatctcatgcgcttcctgatcgccaagcaccgcgatctctacgccgcgcacatcgccgacgccatcctcggcgttgaagccatctccatgagccgcttaaccatgtgggaatcgttgatgcgcggtgacatcgccgccagccaagccttcatgctccaccccacctacggcgacggcggaatggccgccgccgtacgcttgcggagttgatggtcagccgggccggctcaaatcggtgtccccactgtcgtcaacctgccagtttttggccggcaaacgccgctgagagccttttggcggcgtcaagttgctagcacttggcgtaatggcgtcgctgccgtggttgcttgcggtccacgagaggttcggctcgcagacccttcaggcagtcaagaacacgtgtttctggtggtattcgatgaactcgtgtgagggcggatttgaagaaggcaatgtaatatagcgtccttcaaactgatacatccaataatcattgatatcgttgtgcgggacccgagcggatatatgtactcgataatcgtcgtcaatggtcatgtatccgcggtcaaatgccttgtcgtggaatgcattaagcaacaagccgttagccgcatttgttttctcgaacccggttgagaccttccagggcttgatgtggctggcgattagcagcggatcaatattgatgccagtcaggcagcaagtgtcgtgataattcgcgatcaaagcattgcgaaagtagctttgattgacccgcgataatgctgttgtctcatgttcagatccgagtggagctgtagtctgctgttgccccgcgacgatgggcggtcttggagcatcaatgagaaggctggttgtctcttccaccaacgatttctgcggagtgggagacgagtgcattgttcgacgattgcgcgcatcctgagtcggtagaggaactttctcaatgaaactgacatagacgttcaaagccagaatgagcagcttatcgctctgctcctgatattctttccagatttgtatttcgagtttcccgctatgggccaaacctgatacccctcgtgcgtgttcgttggggtcgtgagcccgaagattcatgagtttcatatagaccgagctagcggtacgattcagtccaacagcaagttgcgcgatatgagggttattcttgtcgttccgctgtcgctgattcaacatcatgtacaagccgaacgtggcaagagtctcgtcgtaagaccatttcggtccacgtgttctattgccgctctgcatattcatgatgtccaggatacctcctcggaaagttggcggactgatgatatagcaacttagggggtgctcaattttcggcatgctgtgatgcaaacggaaggcttgtcttgattaatggggtactcactcatctgtcaacggtgtaaggcggcggtcataaactaccttgcgaagaagtgtgtcgttatgtgttgattcggtgtggaagttgatttttttaagtaattttagaggatcttttgtgatcatttgtgagtatattagtagaaaaagaggattttgtgactatacgcatagccgagctttttgctggcgtcgggggtttccgccttggtctggatggctaccatgatgctgcgcaccccgagtttgatatgaagccagctggcgatttcaagaccgtgtgggcaaatcagtgggaacccaatgggcaagagtcgaagcagtttgcttggcggtgctacgaaaaaagattcggcgagggaagttgcgttaatgaagatatcgccgttgtgctacaagaagtcaaggacggtaagcggtcgattcctgagttcgacatgctggttggcggttttccgtgtcaggattattcagtggcgaagcctcttgcccttgcctcaggtattgaaggtaaaaaaggtgtgctttggtggagcatcaacgagcttcttgaaatgcggcacccgaaatatgtgctgctggagaatgttgaccgtttgttgaagtcgccaagctctcagcgtgggcgtgactttgccatcatcctatcttgtctgtatcggctcggttactctgttgagtggcatgtgattaatgccgctgaatatggaatgccgcagcgtaggcgccgcgtatacatttatgcagagttggatgccccgaaatgggatatggaagaccgccttttccatagtggggtagaggcccgcgcattcccgattgtggctgatggccgtttcggagtagagcgtttttgtattgagaaagacccctatgagatgactcatacatttggcaaaggcgtgaaagtatcccaattcaaggatgcaggtgttatgcaggatggtgaggtattcacctgtcgagcgacgcctgtgtatagcggcaagcattcggttctgggcgataagctcgtctcgattggcgaagtgccatcagagtttttcatcgaagacaatttgagttcatgggaataccttaagggtggtaaaaaggagcaacgaaccgctcgcaacggatatgaatacacgtattccgaaggaccggtgg

SEQ ID NO: 1718 - DNA, 3052 bp, Unknown
  MAG_14  MAG No. k141_15438
atacctcgtatgtgatcgtgagtggggcgtgatcggaccagcgtttgtcatacgtgggagccttgtcgatgacgaatccgcgtgcggtctccgccaactcgggcgtggcgaactggtagtcgattctccagccgacattgttgtcgaaagcgcgccctcgctggctccaccaggtgtatggcccctgaatgtcgccggccaacgaacgcatcacatccacgaactcgtattcgtccagccatttgtccacgtaggcacgttcttcgggcaggaatccggcgtgcttctcattggccttggcgttcttgatatcgagcggcgtgtgtgcgatgttgaaatcgccgcataatacagcctgcttgccgccatgtgcggcttcatcacgaagcgcgcccatgcgggccagcatagtgtccagaaaacgatacttctgttccattttggtcggatcatcggtgttgccggcatgtatgtacacggatgccacggtgatcgtatagccctcaggcgttttgagatcggtttcgatccaacgccccgaatccacatcctcgctcagacctggcagaccatatcgcttgtcaagcacttccaagtcggtgagcagcccgactcccgcgcggcctttcacccggcagacctcgttcatggtatggaggttggccggtgcctcgattttgccggcggtggcgtattcaaaaccaaattcatcgaaaatagaatcgacatcgtcctgaggcgcgcgaacctcctgtatgcaccagacatccggcgcatgcttgccggcccaatcctcgatgcccttgcgcttggccgcacgaatgccgttgacgttagacgtggtaatggtgatggtcatgcggccatactattgtggcctccctacgaatcgaaccggacaccggcggccgcgatgctcagctttctctaagcctgagtgctagtgttagcaaggttgcaaccgttacatgaaacgaggaattatgggactgttcggattcggcaagaagaagagcaagaaggaagccgagccggccgttgagcctgtcgatgaggacaaggtggccgccgcagaagcgaacgctgccgcaaaggccgagagcgcggagaccgtgctcgccgagccggccagcgaataccagggccgcggcgaagagcgaggcccgtgggatgtcaacgatgaggacgtgcccgattatgacgattatctggatctcggcgcctactacctgcccttcctccagggcatccagctgcgcatcaaggccaaccgcgccacccagcaagtgcttggttccaccatcaccttcggctcctccagcctggagatcgaagcctttgccgcacccaagaccctgggactgtgggatgacgttcgcggtgacctgcttgaagccaacaaggccgcttctgaagtggacggtgtgttcggcaccgaactgaagctgccggtcaatgtcaagggcggcaaaaccgtgaacacgcgcatcgttggtgtggacggcccgcgctggatgctgcgtggcatcttctccggcaaggctgctatcgatccggacagcccggagaccgaggcgctgaacaagttcttcgccgacatcgtcgtcgagcgtggcgaggagcctttggcgccgcgcgatctgatcccgatgcatccgccggtcgcccccgctgagcgtaaggccgccaaggccgcggccgaagccggcgaggagaacggcaaggaacacttcaaggacattccggacaacaagccgaagggtccgctgagccaggaccagcagaccgaagtgaagaccacgctgtctcgcggcccgatgttctccgaagttcgctgatttataggaagagacttggcagacaacaaacgcaccggcctgtccgctctagccgacgccggcaatgaaggcgaggatttctccgtcatcgacgccatcggtggcccgcgtggcgtcatcgaatccatgctgcctggcgtggtgttcgtcgtactgttcgtggccacgagcaatctgaatctcaccattgcggtttcggccgtgttggcggtattgcaggttattgtgcgactgattcagcgccagtcggtaatgggcgcggtctctggtctggtggcggtaggcatctgcctgatttgggcatggcagactcatgaggcccgcaattactacatcttcggattcattaccaatgccggctatgccgcgttgcttgccgtgtcgctgattgcgcgcgtgcccggactgggtttggtcgtcgaattcatccgtagcctgcccaccgagcatttcaaggcatggttccatgactggatggacgacaaggccctgaaacgcgcctatatgattgtcaccggcctgtgggtcggtctgttcctgctgcggctggtggtgcaggtgccgctgtatctgaccaaccatgtggctgcactcggcgtgacccgcctgctcatgggcattccgttctgggcattggcgatttgggtgagttacctcattattgccacgccgatgcaccggcataaggtcgcggctaggaagatacagactgaagtcgctgttgatgccgaactcgaaccgagcgcaaccggaaaggacgatgatgcaagctgaagttcgtatcgaacgatacgccgaccaaggccgctgcgtggcccatatcgacggtcgtgtggtgttcgtccgcttcgccttgcccgacgaactcgtgcgagtcgaacttgacgagccccacgaccgggacgaccggttctggaccggcgaagtcgtcgaggttctcgagccgtccgaagaccgagtcaccccggcatggccacttgccggtcccttggcgatgggcgggggagtgggcggcgcggatctcgtgcacgtctctttgcccggccagctcaagtggaaggccatcaccgtctccgaacagatgagccgactcggccatatcgacgtggccgttcccatcgagcgcatgcccggcgacaaggcagccggcggcctcaattggcgtacccgcatcgaaatgattgccgacgacaacggcatgccatccatgcgcc

SEQ ID NO: 1719 - DNA, 7554 bp, Unknown
  MAG_14  MAG No. k141_15809
caacgagcgactctcccgcgagttcggcctcgacctgatccagaccgccccgaacgtcacctacgacgtgaccgccgaggacggcagtcagcatcatgtgaccaacccgagcgaattcccggacggcaagatcaagaagattgtcgagccgatggttgccgccgacatcatcacacccaaggaatttatcggtgcggtgatggatctgtgccaggaccaccgcggcattatgggcacgatggagtacatctccaccgatcgtgtcgagatgcactaccgcattccactggccgaaatcgtgttcgacttcttcgaccagctcaagtcccgcaccaagggctacgcttccctcgattaccatgaggatggcgagcagtccgccgatttggtcaaggtggacatccttattcagggcgagaaggtcgatgcgttcagtgccatcgttcaccgcgataaggcgtattcgtacggtgtgatgatgaccaagaaattgcgtagtctgattcctcgccaacagtttgagattccgattcaggccgcaatcggttcgcgtatcatcgcgcgtgagaacattcgtgcgttgcgcaaggacgtgctcgccaagtgctatggcggcgacatcacccgtaagcgtaagctgctcgaaaagcagaaggccggcaagaagcgtatgaagatgctcggccatgtggaggtaccgcaggaggcgttcatcgccgccctgtccaccggcgaggactccaacgaccgcgacaccaaagacaagatccgcgccgctcagaagaccgagggctagtgttcgaggtctacatccacgtcccgttctgcttgcggcgctgcggttactgcgacttcaacacctacacggctacggatcttggtgcgggggcctcgcgcggcaactatgccaatatggtcattcgtgaaatggccctgaccaagcagtggcagctcgaccacggcatcgaggagccaccggtctccaccgtgttcttcgggggtggtacacccacgattctcgccgcccgcgatctggtcgccatgctcgatgccatccgcaagatctggagcatcgcgcccgacgccgaaatcaccaccgaagccaacccggacacggtcaacgaatattacatcaatgagctcgctgccggcggcttcacccgcgtttccttcggcatgcaatctgccgtgccgcacgtgctcaaaaccctcgaccgcacgcatacgccggccaacgtggccgcaggcgttaatgccgccaataaggccggcctgcgctccagcgtggatctgatttacggcgcaccgggggagagccttgacgattggcgcacctcggtcacgaccgccatcgacctcggcgtgaaccacatctccgcctacgcactgaccgtggaacccaccacgaaaatgggtcgtcaaatcgcggccggcactctgcccaaacccaatgacgatgacgaagcagccaaatacgaaatcgccgacgacctgttcgccgccgccggcctcgaatggtatgaggtctccaactgggcccgccccggatacgagagccagcacaacctcggctattggcgcaacgtcgattgggccggtctagggccaggtgcccactcccactacaacgcggtgaccgaggctgaccacccccagtcggcttcgctgacagcccccgccagcgggggcaagtccgaagccattgcctctgcctcagctgatggacaggccaacgccgaacttggagaaaccaacgccgaactaggtatgatcaacgcgcatgggaacaactcccaagaaattcatgcccccgctggcgggggctgtccggcggatgccggactgggggtggtttctgtctcacacggtctgcgcagctgggacatcgcgcacccgcgtttgtggggcacggccatcaacgagaaccgtgtgccgtgggccgatagcgagacgatcactcccgaggaaaacctcgaagagctcatcatgctcgggctgcgcctgcacgagggccttggcctcgaccgcatcaaccgcgccatcaacgatgcaggtatgagcagcacgccccagactctccgaaccgtttcggttgaccaactcgcccccatgatcagcgaaggcctgattaccgtatccgataatcatcgagtggtgcccactcgtcgtggccggttgctcaatgactcggtaatcgaacagttcttcgattacgtcggtgtatgagtcggtggtatggtgcgcggcagtcgccattacccgttcgctagttgtggttacaccgtcagagggagcttttttgttttaccggcgggggagggaaccgcgtaggactacgtccggggcgctttgcacgtagatcaggcggttggcagtgccgccggtggcctccgcgtcatcgcggttggacaggatgctgtccacggcggcctggcccatttcggccagcggcagatgcacggtggtcagtggtgggaacacgtcggcggagtaggggatgtcgccgaaaccggtgacgccgatttcctgacccggctcgatgccgttggtgcgcaacgcggtcatcgcaccgatggccatcacgtcgttgagcgcgatgattgaatcgatgcctttgccgtcgtacagtgcgccttcgcccggcttcagcagtccggatcgggccatttgcatgacggccgcatagccgtcggtgcggctgaacttaccgtttgccacggctttcgggtccacggtgatgcctgcctcgtccaacacttccatcacaccggccagtcgttctttggaggagcggtgtgcgtcatcgcccttgagaatcgcagggcgcgtatacccggaatcgacgataagctttgcgatggcacgcgcgccgacgtcgttcgccacgtccacggccgggaagggcaggttgcggttgagtacgaacacggcatgtccgccggacgattcgtactggatgagttccgtctgcaacgcctggcgttccggcgcgtcggtgtattcgctttcggagatgatgatgccgcgcggcctggtggatacggacttacgcaccgcctccaactcctcgtgcggggtggctgccacgccgatggtcacggagatgccgcgttcagccgccgccttgaccacgccttgcgacacggatgcgaagtagggatcggagatatcggagaccagcagcacgatgttcggtgcagtgcctttggccactgcctgagcataggcgttgggacgatagttgagcttggtggctgcttccatcaccttgacatacgattggttgcgtaccttgcgggtgctgccgttgagcacacgggatgcggtggcgatggagacctgggcttctttggcgacgtccatcaatgtcgctggcgattgcgccttatcgttctgtacagccacgatcgaatcggtccttttcttccctgaaacggaaaacatgtctaaacgcttaccgcaatgataccgcagttttgcttgcaatagtagcattgtggattggaaagcctgaattttgaacaaaaataatcacgcgaattacggaaagcgattaccgttccgcgtatcgtgcggtatgctcgaagcatgacgcgatacttatgtgcccctgactccttcaaagagagcctgaccgccatggaggcggcccgggcgatggctcaggggattgagaatgccgaccacgatgccgaggtccgttgcctccccatggccgacggcggtgaaggcaccgcacgtgcgcttgtcgacgccactggcggatcgatgcacgccgtgccggtccacgacccgctcggccgacctgtcgaaggccacttcggcctgctcgccgacggcacgaccgccgtggtcgagacagccgaagccagcggcctcgcactgcttgaagccaaaaaacgcaacccgttgattgcctcctcctacggcaccggcgaactcatactcgccgccgttcgttccggagccaagcgcatcatcgtcgggctcggcggcagcgccaccaacgacgccggtgccggacttctgcaggccctcggcgttcgtcttctggacgggaacggcaacgaccttaagcacgggggagcggccctcgctgatctggccaccatcgacatcagcacgatggacccggctctcaagaacgtctccatcaccgccgcctgcgacgtgaccaacccgctgaccggtcccaccggcgccagcgccgtgttcggaccgcagaaaggtgcctcccaggccgacgtcgccacactggacgccgcgttggcgcacttcgcgcaggtcatcgaaagccggctcggcgtcgctgtgaacgacgtgccgggcgcgggcgccgccggcggtatcggcgccgcgctgaaaggcttccttgacgccgaattccgtccgggcatcgccatcgtcatcgaacaatccggacttgatgcggccgcgcaatgggctgacgtggtgttcaccggcgaaggctccatcgacttccagaccaagttcggcaaaaccccggccggcgtggccgaaaccgccaagcgccacggcaagcccgtgatcgccgtcgccggacacatcggcacgggcatcgacgaactgcatgaggtcggcatcgacgcggtattcggcatcgcccccggtgccgccagcctcagcgaactgctggccgacgcggccgccaacgtgacccgcaccaccgaacaagtcgtacgaaccctacaactgaagcagcttcacaagctccctctgatgggccgagccgtgaaggaaacgccggaggcgtttccaggcgagggcttgacgacagtcaagccagccgaaggctccataattgcgggacgagctgccgcggcaaagccgtgactgagggggagacttgtggcgcagccgcaaaaaatggcatcggctttcagccgatacagtcattcgtctgcttctctccctcagtcagctgcgctgacagctccctcgtcagagggagccacacaattcggaaaggaagatatgcgcaccatgctgtacaccaaggtgaccagcatgctgagcaccacgggcatcgccagcgagaaatacgccttcggaatcggcgccttttcgaagagttcgttatccatttccgtcccttggtgttttcgttcttcagtcactgcgcgggatgccgttcggcgtgcatcacaggcattgcagaggcaacagtgtggacaacgggcggggggagtatctcatgatgcggtgagggcgttgatgatgacgcatcgtgtattggtggccgtgtgcatcgtatgtgaacctgtgctggcacggcgtacacacgatgggaaaagaaagaatatatggaccccgttgtcccggttattgttcagttattactgtgttgaattattgcgttattcaattattgtggtgtgccggccgattgcggcctgcgggggattgccttcgtatgtgtcgtgcaatctcatgaatgggatcgttcgctagattcagcgagcgtccttgttggcggcgttgatgatgtcggcgaacatcttggagtcggcgtagccggcgcgggcgatggcgtccataccggagagggtgaaaccgcgaatcatggaatccatgaatgacataatgtgttccttgtcttgacttgcaaagccgtgggctttgcgatgtgttgttgtttacgttatgagacgggccgtatgtgagcggcgagtcagggaagaggctcagcgagcgttcttatcggtgtcgttgatgatgtcgagaatcatctgggagttggcgtgaccggactgggccagggaagtggcaccgtacatagccagaccgcgaatcatggaatccttgagagacatcatgtttcctttcgttggtcaaaaccttgtggctttgagttttgtttatcggtttctttctgaaaccggtttcagaataacgcagtccgatgacaaacgcaaggggactattccgctctcggcgtttctggcggaatatcgccgttctatagataccgttcggtagttaagaggctgtctagtcgactttctgacggtcttgttctgggcgcatggttttcacgaaatggcctcatgtcgcggaaatcgtacgctgagtcgtcgtaagcgtacggtcttcacgaaatggggtctcatctcgtgaagaacgtacactgagtcgttctgggcgtacggttttcacgaaatggggcctatcttcaccggattttgggcacaccggccttgagcagcttggtctcaagattgatggggcgtagcagatcctcatagaacacatggacgatttcggtgacgccctgttcccggagatgccgatcacgtctgcggtcgtactccattttcgcctggaggcttgcgcgattcttgttgctggtgtcggcgtatttggccatgccgtcgtattctgccacgatgatgcggccgtctgcgagcttccaacagaaatcgacgcgatatggcattgcgggattgtcgggattcatgaactgcacctgcagcaggggaatgccgaaagacaattcggtgatctggccacgcatcaatgattcgccgccgttttcgctcaggggatccgcgtacttcagcagcttggtcacggagacctcgtcgcagacgctttgaatcatcagcgactgcacctcttcgatggtcgtcagggactttctcagagccgaatcgtatatgggcagcgcctgtgggaatgggaatgccgcgcagtcgagcagcgttcgcgccggagtcgtcaagagaatgccattatgcttccgcgccggaatccgattgatatagatgcggttgagacgcgcctcgtctccgccgccgatgccggacttcgaggcgatgtgcactgtgccgtcgtgcagggaatagttgtgctgcagtccgtatacgcacgccgcactcaaccccgcaaatacccactgagggtggattgcggacagcgcacgtatgacctgcaatgactgttgctctctggtcatggtgttccaaagtattcggtcggcgtacaggttcttatacggtgacaccagctccccggcatgcaggcgacgtttcagggcgcgccgttgcgcatcactggtgccatagcagcagcgacgctcctgcttcgcctgctgcagcagtgcagaaacttccttgtgttctttcatatctcgacgctaagggtgattttgattgttgcacaagctcaaccggcaaatgtgaatactatgtcacgcgaattgttggtgtggataacttgaatcgacgtcgacggctttgccgacggtcttgtcggaggcgatattagcctaggacaccttgctgcgccgccttccataccgagaacagtcatcagtgacaccgagggcatcttcagcgtatgttcttcacgaaatcagctgccatttcgtgaaaaccgtacgctcagaatgactcagtgtacgttcttcacgaaattagggatgatttcgcggaaaccgtacactcaccgcaactcagcgtacggttttcgcgaagttattgatttggatataggttccccgtcatgaactacaatgaatcgcggcgaaaaacg

SEQ ID NO: 1720 - DNA, 6472 bp, Unknown
  MAG_14  MAG No. k141_16042
cggcgagaaccgtccccaggaggtcaccgtcaaggccccgggcttggcgaagcgtctggccgaacgagggtatgcgctgggcgtggtccgcgacgccgcttcgggcgatgacaccttggccggggccggacgacatgtcccgttccatctcatcggccaattgcaagccaataaaatcggcaaggtactgccggtagtggacaccatcgaatccgtggattccatcgaactggcggaaaagatcgcccgccgtgccaccatgcgcggcatcacggtcggcgtgttgctggaggtgaacgaatccggcgaggaatcgaagtccggctgcgcacccagccacgccatcgacttggctcagcgcatcggtgcgatgggcggactgcacttgcagggattgatgactattggtgcccatgtggatgatgagcgcacgattcgtgcgggcttcgcgcatctgcgccgcactcgtgaccagattcttgcctccggtgccgaaggcacggccgactgcaccgaactgtccatgggcatgacccacgacatgacctacgccatcgaagaaggctccaccatcgtgcgcgtcggcaccgccatcttcggcgagcgcgctttcatctgattggagctatacgaaaaaacgccgcttgatcaatagccaagcggcgttttttcgtaaggattttcggcgtatcaatcacgcatagatattgcgcggacgcatgtcctcgggcaggccgtcgagcagaatcgccacggaaccttcctcgaacacggagcgaatacccgcggccagcagcggtgcgcaagacagtacggtcatattcggcaggcgcttctcttcgggaatcggcacggtgtccataaacacgatttcatgcgcgccgcagtgagacaggcgctccacggccgggccggagagcaggccatgggtggcgaccagcgtcaccgacttggcgccggattcgttcagggtgcgcacggcttcgcagatagtaccggcggtatcgaccatgtcgtcgatgaccacgcagtcgcggccgtcgacatcgccgataatgccatgtgcctcggcatggttcggacgagtaatatcacgctgtttgtggatgaatgccagcggcagattgcctagcttggcggcccactgttcggacaccttgatacggccggcatccggggacacgatggtggtgttgcccagatcaagggtggaacgcacgtaatcgagcagcaccggcatggcggttagatgatcgaccggaccatcgaagaaaccctgctcctgagcggcgtgcagatcgaccgtcataatgcggtctgcaccggcggcgtggaacagatcgaaaatcagacgggcggtgatgggctcacgaccgcggtgcttcttatcctggcgcgagtagccgaggaagggcgccaccacggtaatcgacttggcggaggcgcgcttcaaagcgtcgatcatgatgagctgttccatgatccacttgttgatatcgcccgaatgacactgcagcacgaacacgtccgcaccacgcaccggttcggtgaaacgcacgtacatctcgccattggcaaagtcataggacgtggtttcgaggatttcggttcccaaacattcggccaccttctcagctagctcggggtaggcgcggcccgtgaccaatacgagtcgtttatccggagtgccttcaagaatcgccgacatgcgttcgcatcctttgtttgagtcgctgtgtgatttacgccttaaccagtgtacaagcaccccgccgcagcgaacgccacggcggggtgcctatttcgtaagagtgttgagattgccgaaattattcggagaactcgacactgaccttattgtctttgatggtgaaggtgccgtataccgagaaagtgctggaatcgtcttccggttcccagccatcgctgtaacggtactcgtaattcgccgtcacatcaccttcgtcggtgctgaacgagctatccgacaggctcacgctggtgaccttcggataaccgtcaatcgtccacttgaagttgcggtatcggctggaattggaggtgtagtagccgaacgggcagccctgcggttctgcatcgatggaagccgcgcattcatccagcttgctcttcaccgccgtgtcgatttccgacgtcaacttgtccgtaggctgagcgtcaagagtgccgctatcggagctgttggtgctcagagacacggtcttggcggtgtaatagtcggacttcaccacgccaactttgtagacgccggggtacaccttgagccggtagttgccggtttcgtccgcgtcgttgttcacggcgttcttgggcgttacggtcacgccattgacggtgatgctgcccagcgagcttggcgcatataccgaaatggtcttgaccaacggttcggcgacggtccagttcttgaagatcaggaacttgctgccgttggccaccatcttgatggaatcgccggtgacctccttgccttcaagcgtgtacgtcagctgggcgctcacggtgccatcggcattgttggaagtctgcgagatgcgcgcgttggtgatgtgcgtgttctcgcccgaggatgccttgctggtcagcagtgcgcgctggttcgtatccacgtgaggatcggcgatggtgttggccttgtcgtagtcgccggaggagatggcggccacatagctgttcgccacgctcttcgcgctgaacacggcggaagacagcacgccatacacgataccgaacagtacgaggaagccggccacggcaccaacgatgatgaagatcttcttctgctgctcattcatggtggtggaggtcgcgccaggtgcggctaccggtgccgctccgggagtggtgggagccgcggttgcgaatgtggtgcccggagcaccgggggttgcaggggcggccggagcacccggggcagcgggcgcgggtacaccgacaccagcaacaggaggctggccggcggacgtcggcgtgacgttgacgtgaggctgcgcagcgtttgcgcccgtacccacgccggcgcttggcgtgccccacgtgggccacttgccgaccattgcgccgctggcatagatgtagtcgaccaccggctgaggcgtagcacgcacagtgccgcctacaagcagtgcccgcagtcccggcatggaaaccaccatggtcgggccgaacgtcagcgcaacgacctcaaccaggaatgcccacaggcccatgaccaggaagtaccacatggcaggtccggtggtctgaacttgcgtgacggaggtgcggttgcccatagtacccatcagcagcgtggcaatcgcccagaacaccatgatggcgatcggggctttccagcagtgctgccagcccatgtaggcacggtcgtacaggttgcgtgcggagacgcgcaatgccgtgtagaaggtgaggaccaggaacacggcgaacaggatccaaataggccatacggtaacgctgaggttgatgctgaacaggctgagatcctgcggcagctgaccggactcggtcagtgtaatggcgccgaaggttccccaggtaaagaagaactcgccgatcatcagcagtgtgaccgggaacgtcagtatcaggattccctgacctgaggagaatgccacggcgaacagggccaccaggccgacgatgaagagcaaagccagctggaagctcaagacgctgaccaccgtgcgcgtgtatccgcgaacgcggtgtgcccactgccaagtagctccgaacacattcttggaatcggaagcatattgggccagtgcatagccggccagagcgccgagcgcggagagcaggtaggccataaagaacgtacgcactgtggcgccggtcaccttggccacgatggtggtgccactggcgagtggtgccgccgcgatggccgcaagcagcgtgatgaccacggccggcagcaatccggtgataaagccggagatcaggccggtgaacttgaatcgaatgctcttggaacgggccagcatgaatgcgccgaatgcggtgccgaccagcaatgccaagccggtgagccccagtgggtacgacatcatgttgctggcgtccatgctggaggatgagaggtcgacgatgtcgaaatgaataccgccagacaggcccatgaccaacgataggaacaggtagtggaagaagttcatgccgttgccggtgatgaacatgccgccaacggcttggttcagtgttgaatcggccccgaggctgggtgctgcggtgctcatggaattcattgcgattgcagggaaaatcgaaagcaccaaggcggctgccgtaccgatgccggccgcaatgccgatggtctgcatgttgggggcgccgaacagttccttgaccagtgggctggaagagatgggttgtgccggagcggcgggagccggcgatgggccgggctgccctgggttcggaatggccgtggtcggtgcggtgaatgccggtccgcctgcgggctgggcctgcggctgtgcagcgggctgaggcgtcggctgcacagccgctgcgccgggcaacggaatcgatggtgcgggagccgcgggctgtgcggtcgtgggaacggcgccggtgggttgaccgggcgtgggtgcggcgggcgtcgctgctgctggagctgacgccgcggcaagatggttgccgcaggaaccgcagaattgcgctccttcgcgcacagctgcgccacaattaggacagaacatatagtccccctttcttctgatgcttcttcgagcactatcgtacccgcaaaatcagcgccatgaccatagggcgaggctcgaaatggacaatactgggtgatggcgcgcgggcttggctgcgcgggcttggctgcgcgggcttggccaaaatggtgggcatcgcgaaaccggcaggaatatggccataccctgtcccgccttatatatagactgtccaagttgcccgaagatgcggtgccggtttggtgctgcgtcatgggctaacacgcatacacactcctgccacggaacgtccgtggccgaatagtccgaaggaggtgggtgatgtctgcgcacaagtacgaactgatgttcatcgccgatcctgagctggatgagcgcggtctgaagaagctgaccgagcagtatctggaactcgtcaccaaggaaggcggctctttcgatgagcccgattactggggccgtcgcaagctcgcctatgagattgccggtaagaccgaaggcaactacgtcgtggtgaagtacaccgccgagcccgctaccagcgatgagctcgaccgtgttctgaacctcaacgaatccgtgatccgtacgaagatccttcgtaagggctgaatcaagcgtttagtcagctgaacagctggtattcaaggtaagtaagaaggaccgttatggcaggcgaaaccgtcatcaccatcgtgggcaacctcactgcggaccccgagctgcgcactattggcagcggcgcgaccgtggcgagcttcacgattgcttccaccccgcgaacctggaatcgtcagaccaaccagttcgaggatggtcaggcgctgttcatgaggtgctccgcttggcgtgatctggccgaccattgcgctcagtccctgaagaagggcatgcgcgtgattgccaccggccgcctccagcagcgttcctatcaggcacaggatggttcccagcgaaccgtcgtggagatgcagctcgatgaaatcgggccctccctgcgctacgccaccgcacaggtgacccgccagtcgtccggtcagggcggcttccagggtcgttccggtggtttccagggtggtcagcagcccaatcagggctatggcaaccagggtggccaaggcggttatgccggtggccagggcggttacaacggtggctatcagggtggtggcgctggatactcccagcagcctgccgctcccgccaacccgtccgctcctgcggccgacccgtggagcaatgccggtgcatctgatgccggtagcttctccacgttcggcgcttcctccgatttcggcggcggcgacgattccgacccggagttctgatcagtacttacctccccgctgccagcagcaatcaatatcaagatttataaggagaacatcatgtcacgtaagaggccgcaaccgccggtcaagccgttcaagaagaagccgaacccgctgaaggccgccaaggtcaccgagatcgattacaaggacgtcgcgctgctgcgcaagttcatctccgatcgcggcaagatccgttcccgtcgtatcaccggcgtgtccgtgcaggagcagcgcgagatctcgaaggctatcaagaacgcccgcgagatggccctgctgccgtacgccacctcgggtcgctgagttagggaggctttgaacaatggctgaaaccaaggttattctcaccaagaccgtgtccaacctgggccactccggtgacgttgtcgacgtgaaggccggcta

SEQ ID NO: 1721 - DNA, 10476 bp, Unknown
  MAG_14  MAG No. k141_16205
ggcgcactgttgttattgagaaccgttctctgcgcactgagccaaggggaggggtgctacttgaatgggcaactatgagtgttgagacgccggatatggacgagttgctgcggctggtgcccactgtgggctatggggatgacgccccggccgatcggcgtgggggagcactgcacctgtccgccgtgctgcccgccttgtccgccgcgattgggcatccgactcccaccaaggtccacgccgatcccaaggcctgccagcgcgcgttgggactgcccgacgccgaatcggccatcgtggtgctcgtggacggcctgggcttctggaacctcgccatgcgcctcggccacgcgccctatctgcgttcgctgatgaacgaacgcgccaatcagcgtcccatcgccacctgcgctccaagcaccactgtggcggccatggccgcattcggtaccggaacctgcccgggactgaccgcaatggcgggctatacgcagctcgaacccgccagccataagctcatccaactcatccagttcaaagacgcgctggcacccaaaccagccaatccgcacattcctgtgccacccatggtcgatccgctcgaccagcagcgcgaggagacggtgttcgagaaacttgcggctcaagaggtgcgcgtcacaagctcggggttgcccaagttctccaaatcgccattgaccgaagccgcattgcgaggcaccgactatcaaggcaacgtcaccccacgcgatcgtgtgctggccgcctcacgtgcctcccgtacccccggcctgacctacctgtacatccgtgacgccgacaaagtcggccacaattacgggtgggattccgaacactgggtggccgcattcgaacatatcgacgcccagctcgcgctcctgaaacgcagcgcacccaaaggcacgctgatcgtcatcgtggccgaccacggcatggtgcaaaccgacatggaccagcggattgacatcgccgttgaaccgcagctcacccgaggcgtgtcactggtcgggggagagcctcgctcgctgatgctgtatgccgagccggatgaacgacctgaggatatagcttgccggtggcgcgattacctgcaagaccgagccttggtgcggaccagggatgaggccatcgcggacggattgtttggaccggtctgcgagcgagtccggccgatgctcggcgatgtggtcgtgcaggcagcgggagccgtgaccctcgtcgattcgcgtacgcaaggagacaaagccacccacctgccgagcgtgcatggctcccaaacggcattggaaatggatattccctgcctgatcgatatggcctgattcggaaattcagtctccgaacagaatctcgtcccagcttggtacggccgaacgtcctgatttacgcttggccggtttggctggtgcctcgtgtttggtggcggcggattcggccgcccgctcctgctcggtggctaccagctgtgcattggggccacgccgtacggtctcgtccgaaatattgtcagaaccctgctctggtgccgtggcaggcgattgctgcaatcctgcggcagatgacgaaacaggtccggcggtctgcgaagagaccgggctgggggccgtagcgtcatgagcctggttcgtggccggtgagatggacgtggataggtccaccgggggcatggaacctgtggaagtgacggagggccggatcgcggcaggccgtgcggccggaatcgaaggcgtaggcgccgcccaagcagacacggcgcgctcgatacgcgcggaacgtacggagtcgccgggcagttcaggaatcgtcggcttgagtttggaatccgtggctgattccggattctgttcgccgagcagttttcgagcggcattgttcaggctcatcacggaattgtcgtgcatattccacgtccattcggcatggatctcacggcccgcggaagtgaatatcgccacgatgcgccaaggctcaagtccgcgccgggtggatttccaggtcactgattccatgccgattccagcagaggccagcgtgcgttccaccagttcgctgatggtgcgcaccctgctgtctttgggtgccgccacggcaaggaactgttcgatggcgtactgtttctcggtctccacggccatggagaaacgacgtaccagcgtttcgctcagatgatatttctccgcgacacgggccggatcggcgccggcgcgaatcagcgactgtatctgggaaatcggcaaagtggactgctgatgcggctggggggcctgtcgcatctcgcttctgacctgcttggcctcaagaatcgcccgttcgagcgtgtcgtccacgctcacggccatttccctgccgccaatggagaatacgaggtcccccgtcttgctcacgcgcacgaaacgggctttttcaagccgatcatctggcatattcgcaccactttccgtcgcaaagacattacttcttttaagtatgccccacgtgtcgaactttacgagtatttcaaatcgtgtatcctatgggcgagtacggcgctgaccgtgctatatatatcgacttacgaaccaaagacgacgaaaggaccatgatggctcaggattatgattccccccgcaataaggatgaggacgaggaatcgctgcaggcgctggggaagtcctcgcagaacgcctcgagcgacatcgacgacgatgagaacgccatcgccgaagactacgaactgccgggcgccgatttgagcaacgaggattcctcggtgaccgtcatccccatgcagggtgacgagttcatctgctcgcagtgcttcctggtcaagcatcgtagccagctcgcctacacggacgaggatggccagccggtgtgtgaggagtgcgccgcctgatggcgttcgacgagacctacaacgagcccgaatccaccgaggtcctggtcaagagcctcgaccccgaacatccggcccagctgcactatgcccacgcgggcgatgccggtgccgacctcatcaccaccgtcgatgtgacgctgaagccttttgaacgggtactggtgcccaccggcgtggccatcgccctacctgcgggctacgtggcgttggtgcatccgcgttccgggctggccgccaagcagggcgtcaccgtgctcaacgcgcctggcaccgttgatgccggctaccgtggcgaaatcaaggtgccgctgatcaacctcgatccgaagcacaccgccgtcttccatccgggcgatcgcatcgctcaattggtgattcagcggtatgttgaggcccggttcatcccggccgaaaccctgcccggatccgatcgcgccgaacgtgggttcggttcgacgggagtggcgtcctgaccggattgggccggttgaatgaccaaggtgatgacggcaacgacggttgcggaaccaatgatggcgaacaggtgcatgcataaggctccggttcgcggttacaatgaacttcatgacgagggaggtgactggcatggcagagattgatggcgagcagtacgccgcccgtaagttgggttgtgagatcagtgccgatccgctcaatccgctggatccaatcaagaaggtatgcaagtcccatcatcccggtgaggatttgtccatcctcgaccgcgcgtaccggcgcgccgtcatccagcattgcacgcaacggcgcaagtcgggcgaaccatacatcatccatccgttggccgtttcccagattctcgcggatctgggcatggggccgattgtggtggcggccggtctgctgcatgatacggtggaggacaccgactacacgttggatcaatgccgtgccgagttcggcgacaccgtggccggtctggtcgatggcgtcaccaagctcagccagcttgaagtgggcgactccgcccaagccgaaaccattcgcaaacttgtggtggccatgagccgcgacgtgcgcaccttggtggtcaagctcgccgaccgtgtacacaacgcccgcacctggcgctatgtgaagaccacgtccgcccagaagaaggcgcgtgaaaccctcgacgtgtacgcgcctttggccaaccgactcggtatgaacgccatcaagacggagctcgaggaactgagcttcaaggtgctctacccgaagatctacaacgagatcgtggtgctggtggctcgccgagccggccagcgcgatgtgtacctgaagcagattctggcggagatcaacgaggatctcgacgagcagaacatcaaggcatacgtcaccggacgcccgaaggactacttctccatctaccagaagatgatcgtgcgcggccatgatttcgcgaacatctacgatttggtcggtgtgcgcatcatcgtcgacaccattcaggattgctatgcggcgcttggtgccgtgcatgcgcggtggaacccggttcccggccggttcaaggactacatcgccatgccgaagctcaacatgtaccagtcgctgcacaccacggtggtgggccccggtggcaagccggtcgaaatccagattcgcacctgggacatgcaccgccgcgccgagttcggcatcgccgcgcactggaaatacaaggaaaacggccaggccggccgcgccctgagctcgccggacaagtccgaccgcaggcgtgacgagaagaaccaggagctttccgaagccgacaatctcaaatggattcagcagcttgctgattggaccagcgaaaccccagattccaacgaattcctcggttccctgaaggaagacctcggctcgtccgaagtctatgtcttcacgccgaagggcaagatcgtctctttgccggcccatgccacaccggtcgatttcgcctatgccgtgcataccgaagtgggccaccgtacgatgggcgcgcgcgtcaacgggcgtttggtgccgctcgacaccacgcttgataacggcgatacggtggagattctgacttccaagtccgatactgccggtccttcgcgcgactggctgagcttcgtcaagagcccgaaggcacgaaacaagatccgccagtggttctcgaaggaacgtcgtaccgaggctattgaggaaggccgcgacgaactgacccgcgctatgcgcaaacgtaacttgccggtcaatgcgctgctgaccaccgaggcattgatcggtgtggccgacgacctcaatttcccgaacgccgacgctgtgttcgccgccatcggtgatgggcagatctccacgcagaacgtcatctcgcatctggtcaaggatgccggggccgacgaggtcgatgaggaggtcgagcaggaggctctgccgctcaagcccgtggagcgcaagacttccagcagctccaccggggtatccgtcaagggcgtgggcgatgtgtggatcaagctggcccgttgctgcatgccggtgcccggtgacaatatcatcggcttcatcacccgtaatcagggcgtatccgtgcaccgcaccgactgccagaacatgatcgatctgaaaaacaagcagcctgagcgtgtggtcgaagtcgaatggaccagcaccaagggcctgttcatggtcaagattcaggtcgaggcattggatcgccgcaacctgctgtcggatgtgacgcgcgtgctttccgaccatggcgtgaacatcatttccggtacgatcgccaccggttccgatcgcgtggccaccagccagttcagcttcgaaatggccgatccgcagcatctcaactcgttgctggcagccgtgcgcaagattgatggcgtgttcgacgtgtaccgcatcaccggtgccaaggaatccgccgaacctcgactgcgcaagatgaagtaggccgttgcttggctcccctccgggaggggctgtcagcgaagctgactgaggggagcagcgcgggcttgcggaactcccctcagacgtctgcggcgccagctcccctcagagagggagccaagaatacgaaaaggtcctgactggaataccaatcaggacctttgctgtatatgtgtcggtcttactcggccacgttcacggacagaattacggccggctcgagcgggcgatccatcggatcggtgtccagtgcttcgagcttatcgacgaccttcttggagtcgtcatcggcgacctcgccgaagatggtgtggtgaccgtccagccacggggtcggcacggtggtgatgaagaactgggagccgttggtgccatggaccttgccgtccatgccgcgacgcagaccggcgttggccatagccagcaggtatggcttgtcgaacttcaggctcgggtcgatctcatcgtcgaactcgtagccagggccgccggtaccggtgcccagcgggcaaccgccctgaatcatgaactgcttgatgatacggtggaaggtcaggccgttgtagaacttgccatgggaaggctggccggtgtacgggtccgcccattccttctcgccggtggcgaggcccaggaagttggccacggtgttcggggccttgtcgtcgaacaggttgatggtgatatcgccctcagaggtgcgcatgatgatggtagtcatggctccaagtgtctcatgggcttgagaccggggaagagacgtgattgcgggaatggcgcggagagctgggaatgggcgtgggcaatagccgggacaacatgccgcagcgtgaagcgtcatacgagttgtctcgcgatggccaacgcgccggcaacgaccatgagcgctgagaagagaacgcaaaagagtccttttgcgttctcttcccggtttttggatccgatcacgacggatatcaggaccaatccgacggccagcggcaccaaggccagcagaagcagtggcttttccatggcgcctcctttctgaacgctgtgattcagagatatctttagctaatcatgggatatgggcggcttggtgccgattggtgatggggctcgatcctgatgttcgtcggtgccggaatatggtgcattccgtcaaatagaggtgggcacttggatacggtgtcgctttattggatttctttgtttctatggtttgattatgccacgagtccaacaaaacgttaccggccccagcggctattgacaaacttgtcagtttggacgtattgcgtgtcgaacacgctgagccgcgacaaattagatgcctgctgctcggatgcgggtctattggaagtcatatttatcggcacatttcaatgcttgctttggaacatattactttggtcgatcatgatgttgtcactgtagacaacatttaccgtcaggattacgtgcgaacagacattgggaagaaaaaggttgatgtgctgaaatccagggcgtcaagatgtctttctatagatagcattgataaaatgataacttgtcatagtgaacttgatgaattaattgaccgagagaaaatcaacttagtaattcaagcggcagacgttccaagcaccaccgaagtcgcaaggatgattaactactcatgtgataagaaagatatagcgttcattgttaatccaggctattttggtaattcggtaagtttgcctgaattctattatccgaacaataaatatgactatatttcttcacacttggcaatcaaaggcaagctattgctgcaccatgagtccggtaagcttagctatcgattatgttcaacattgggatcgttggtagcggaacaggttgaagattatcgatgtcattgctgtcctgctcattatggagaaaagggttacttcgatatatatatgattatgcttggcatactgagcaagtttgtaaagaaccagtgccgcctaatcttctgtaggattccagtactggtagggtaaggataaattattagatgagtaattcgttaaagctcgtttctgctcctgtgcgcgaaagcaggttgtgggatatcccaggttacgtgccatggttcacggcggacagcgcgacggccatcggcgtggccctgcggtatctggcggtctctctgatcggatacaagctcaccggatcgaccacagcagcgggttggttgggctcgctggccgcgatcgcacagcaggcggccgccgtgttcggcgggacattcgccgaccgtcacgatcgcaagacactgatcatcgtgaacgcgacagcgggcgtcatctgttgggggtcagtcgctgcgctgctcatggccggcaagctggtcttccccgtgctgcttgccatcgcggtgttcgagtctgcggtcaacgggtttctcggccccgcctcggatgcgatgctcaaatccatcgtcgatattcgctcatatccgaaagcgcgcagtctcaacgaaggccgtgacgcgaccatcaacatggccggcagcccagtcggcggcctgctgtacggcatcgccccgtggttgccgttcctgtcggctgcggtcatgtacctgctggcaggcgtggctgcgacacgtatccgagtcggcggaaatccgcggaacggcagcgatagcggcaacggcgatagcgacgatgacggtgggaaagcgggcggcgcgtcatttttccgtgatttcgccgaaggatggtcgtggtcgctgcaccgcaggatgctggtgttgacgatggtgtcgtccgcgctggcgaatttcggggtcaatggcttccagtatgcgattcagctgcatctgatgcgcaccggcgtgaacgcgacgctcatcggattcgtgaatacgggcgtattcctcgcgatgctggcgggtgcgttcatcgccggacggatcagcgataccgcaccggtcgggccggtgacatgctgcggattcgtgttcatctgcatcgcttcgctgccgatgctgctgaccgacaactactgggtgctgcttatcgccaacgccgtgatgtgcctgccgttcccgatcatcaacgcgttgcagctcgggttcattttcggtaagacgcccgacacgatgcaggggcgtatcaccgtgacgcttaccgtaccggcccaggcactgtccgcgttctgctcagcgacggccggaagtctgttgcccgctttcggattcagcgggactatgctggtgttctgggcggtgatgctcgtcagtatgctgctaatcgtcagttcgcgcagcctgcgcaccattccacgcgccgaccagtgggatcgcacaccgctggagtagccgcggacggccaccaaccatggggactatgcaccgctgcgcgctgctctccgcacacgtcttccattccgcaaaccggctgcgctgacaggacgatgagtgcggtcagtttgcggcagtcagtttgggaagaactcaaaatctcgattcagcaggctcaaatcacgagttttcagattgtggtctggaaaactcggtggaagaggctgatcccgggagaaattgagaaatccggatgtccgtttgcgcgaccgattctatgaaaacttccggatgcgcgcgggagtttagcgcgaaacatgaatccggcgaagttctcccgggaacggcttcaaggtcgatttttgagaatcgcggaattccaacgtttttgttgagagattatgcatgagagtaccggattctcgtaaactcccgcgtccggcacgggagttcagcggcgaattcccgaagtcagcgtaaactcccgcagaatctgggagattatggcccgacgaggtctaccagaacgaactcccagattggccgccgttcagccagacgaaaacgacccagcaccggcggaatcgaacaaacaagcgccacaaccaccatcaagcagtcggcaacgtcattatgagctgataggaaccaaccttcttgtccgtcatcccagtaaacgttgcgttagttgacatgtcagggtattattctcgaacagtgtgtaaacacactattcacgtatacctctggcgtgtccggcgatgggatgcccgcggcggatatcggacacgatcttcccgatccggcactgttcccggaccacgcagtccgcgaccatgcacgccaggggaaccggattgccgtacgcctgccactgctcgagccgtccggcgcaggtgctgccggcatcatgcctgatggcgatgggctcgtaccccgcctgcatgagcatcatgttgaggatctggcgtccggtacgcccgttgtcgtcggcgaacgggtggatgttctcgagtgcctccgcggaggcgcgctccgacggggggtactatcatcggaaagtccgccggaagcggcggacttttccatatccgcctccgcatcgtccgaaacgcccattctcctcatcagagaatcatcaagaagttgttccgtgcttactttcaagaatcttgatgcattaaccaggtcgtatacagaccagcctgttttccccgacatctttagggacatggccgaacggccaattcccatcgcttcggccaagctggactgcgaataaccataagccgtcaatagcattttgacattgaaggtgattgtcgactccagctgcttttgataa

SEQ ID NO: 1722 - DNA, 8916 bp, Unknown
  MAG_14  MAG No. k141_16256
cacggtatgacggcaatggtgccgcaggtttttcgacgcgatacacccgcaacgcaagaccagaatcgacaatctgctgaatcgcggattcatattgcgccgcccgagcgccacgagcgatgtggccaaaaataaatttataccgcaatacacacttttcctagggttgcaattcgcgtattctacatttttcctagggttgcgattgtccaaaattacatttttcctagggttaataatgcagaatactgcacttttcccagggttagtaccctgaccttccctaatcacacggtgttgtaaaggcgtcgcggtattggccgggggtgagtccggtgcggcgcttgaagacgagcataatagaatatctcaagcatcgatgaatacggagatgatcacaatggctgattacatcggaacagtcaacaaccaatcttcaacacagcccaacggtcacagttcacatagcaacaccaccgagtcgctatggcgcggcacggattatggcaaatggttcgtagcggattcatgcacgtcgctgtcatcaagtatccaaggtttcgcaatgccactcatcgcgcagaccgtcacgggctcaccggcacaggcgacgctgctggattcaatcatgaccataatatcgtcggtattgcggctgccaggtggcgtggtacaagataagtacgaccgcaaaaaacttatgattgcgttcggcctgattggtttcgcactgttcggcatatgcgcggccctaggatgggcgggattactcatatacccggtgctgatggtacttgcgatatgcctcggcatacgctcaggcctcctaggaaccacgagcaacacgatgctacgaggcatcgttcccgatcaattgctgcccaaggcgtcaagcctcaatgatggccgcgatgccgccctcgaactcgccggcgcaccagtaggtggcgtattgatcggcggcggtctatggctgccattcgcagtcagcgcgctgctgaatctattggaaaccgcggcggcgatgcggatcacaaaatactggcatcgtggcgggcggaccaatgcggagggccgcgcccttgccgacgatgaggccgatgagaatggcgatgcggccaacatcactcaggccgctgacgagcaggcaacgaccacgacaccatccgcgtcacagtattggcgtgagatgttttccggattccgctggcttcttagcgagcgattcgaacgtcgcctgattttgtcgagcgcgctggcgttcgcgtgcttcaactcgttcctgctgattacggtgctctcgatcggctccgacccatcacatgtggtgtcagccagtttcatgaacgtttctgtgtctgtgggcgtcatcgttggctcgctcatctcttccgtgctggttcagcatgtgcgcggcggcatagtcgccgtatcgttctacgtgctgatgagcatcggcgcgctcggcgcagcgctggctccgtggattcttgcgcgtatggcgtttctggcaatttcgctgctggccctaccggccggcaatgcggtaatcaacggattccaatcattgctcatcaacaaggagcatatgggccgcgtattcgccggcatgggcatgattgagacgattgctgccccggtgatcacatttctgtccggcatcgccatgcaacactggggttactcagtcacgtccgtggctttgggcttgtgcatcgtggcggccgcgatccctgcagtgacaatgagggaactggtcacactgcctaagccggatggctgggaggaccatatccgcaaatccgggctcaccaagttctgacaacaagtaagggcgactatctcccggatttgtgacgttcggcaaccgtcagcgtcacaaatccgggaagaggaaggtggatacggtttcagccgcgcgggcagcaaggtggacaaatcgttgccggggtggaatcgcggcaagtatgcaaaagcctcccgttcgcgcgcgacgcataagcgcgcaaacgggaggcttcccaaccgcagcatcatatgcagaaataaggagagtaaggcatatgctgccgcggtcacaccccgccgggaacctgccgcaggccgcgtccggcatcgaaagccatgcagtcgatgcgtgcggccggccgttcccggcgcggtggccatgtcagacgtcagtcagacgtcatcacttctgccagccgatgtcctgcggcaggttgccggcgaagccggacgggccgtagttggccaggcccttcttcgcaccgaggtacgaagccgggttggagaccgggatggtgccgtacagcttgagggcttccttctcggcggcgttgacggccttggtctgctcgtcatagtcggagaggctgccagccttcttgacgagctcgtcgatcttcttgctgcccacgtaggagaagttggacgggccgtcggaggtgtacagctgcggggcggacgtcacgaaggtcatggcgctcggagcctgccaagccatcggcagcacctggtagttgccggaagacacggtgtcggagaacttggactcggccacgttcacgaccttgaccttgatgccggccttcttcatcatcgcctggtaggcgttggcgagggcctgctgggtggcgttgtcaccgaagaaagtgaaggagatctcaagggtcttgccgcccttggcgtagtagccgtccttgcccatcttgtagccgtcggcctcaagggttttcttggcgttgtccacgttgtacttggcctcggcgggcaggttgttctcgtagcccttctggaacggcagcagcagctcggagcccggctgctcggccttccagttcaggccctggaactgcacgttgttgtaggtgttcacgtcgaaggcctgagtgatggccttacgcacctgcaggtcgtcaagcggcttggacttgctgttgtactccagcacgcgggtcttggtgctgtagccgatgcgcagctgggcgtccttgacggaacggatggccttgatgtcgtccttggtgttggcctccacggcgtcgatctcgccgttctggaaggcgttgagggaggcggtgtcggccatctgcttgtagacgatcttgtccagcttcggcttgttgccccaccacttctcgttcggcacgaaggtgacctgggagtcggagaaggagtcgaccttgtacggaccggcggcccactcgttgtgcgggttcttcacccagccctgggtgaaggtcttcgcgtcggcggccttcgggttcaccagagcgccgaagacttcctgccacgggtagtacggggtcttgtaggtcaccttgacctgcttcgggctgtcaccctgctcaacgctagcgatacggtcgaagccgtcggtgctcggcgggttgtagtccgggttggagccgttgttggcttcccacgtggccttgaaggcggtccagtcgatgtcggagccgtcgttccacttggccttcgggttgatgtcgtactgcacgaccatcgggtccttgctcacgagcttcatgtcggtcaggaagtccgggttcaccttaatcggggagccattgacctggtcggtcatgagcaggctgggctggtaccagctccacagctcggacatgtagccggtgttgccgtcggaagacaggtagttccagttcgggccgatttcgacgatggacagggtcagcgtgccgccgtccttgacgttgtcacggctctggtggttgtcgtaacgctcggtgaccttcggcatgggcaggtcgccggtgtacgacgaatcgatgccggccggcggttcggtggcgctcgaggcattgctggaaccgttgccattgcccgcgccgcagccggcaagcagcatggcaagcgccgcagtggccgcggcgagcgcggtcagcttacgtgtcttgttcattgttatttcctcctctatatggttccgaccgtcatgcgaaatggcatgcaacctgatggccgctcggtcgggaagtgtcatacggccgcagcgccgggcgttcgccgcggcagcgggcctgttgttcggcgctcagcttgggcatgagcgggcagcggcccatgaacgggcagccttcgaacgtctcggtggggctgggcacctcgccctgcagcacgatgcgctggcgggtgcgttccgccttcgggtccggcaccggcacggcgctgatgagcgcctgggtgtacgggtgcaacgggtgctcgaacacgtcttcggtgtcgccggattccacgatgcggcccaggtacatcaccgccacgcggctggagatatggcgcaccaccgacaggttatgggccacgaacaggtaggccacgcccagcttgttctgcaggtcctcaagcaggttgatcacgccggcctggatggacacgtccagtgcggagaccggctcgtcgagcagcacgagcttcgggttgaccgacagcgcacgcgcgatggcgatgcgctggcgctgaccgccggagaactgcgtggggaagcggtccacctggtcggggttcagctccaccagacgcatgagttcaccgatgcgttcgcggatctgctctttggagtagtgctggaccttcatcggctcggccaggatgtcgtagatcggcaggcgcgggtcgagcgaactcatcgggtcctggaagacatactgcacggccgaacgcagctcgcggcgcttctcgcgcggaatcttgtgttcgagcttggtgccgaacatctcgatctcgccgtcctgcggctgcttgaactccatgatctccatgagcgtggtggacttgcccgagccggactcgcccacgagcgccacggtctcgccttcgcgcacgtccagcgtcacgtcgtccacggccttgacctcgccgatcttgcgacgcaggaagccgccggcggtcagcgggaaggtcttgcgcatgtgcttgacgtcgagcaccatcttgcgttcgtcgcgcgggatgccggcgaacttcgacttggcggcctcggccaccgtgtacacgtcgtggaaggtcaggcccttgtccacgatctcctgggtgcggtggcaggccacgaactggcccgggcggcccggcaccggctccatggccggctcggtggtgtggcatatgtcggtggccagcgggcagcgcggcgcgaacgggcagcccttgggcatgttgaccaggttcatcggggagccaggaatcggcaccaggcggctgttgcgttcgcggtcggaacgcggcacggcacccagcaggcccatggtgtacggcatggccgggtggtcgaagatggagtcgacgtccgccttctcgaccgggcggccggcgtacatgacgacgatgtcgtcggccacgccggcgatcacgcccagatcgtgggtgatgaagatgacggccgcgccggtttcacgctgggccttgcgcagcacttcgagcacctgggcctggatcgtcacgtccagtgcggtggtcggttcgtcggcgatgatcacgtccgggtcgttggcaatggccatggcgatcatcacgcgctggcgcatgccgccggagaactcgtgcgggaaggacttcaggcggtcctccgggtccgggatgccgaccaggttcatgagctcgatggagcggtcgtgaatctgctgttcggtcatcttcggattgtgggtgaccagcgcttccttgatctggtcgccgatggagaacaccggggtcagagcggagagcgggtcctggaagaccatggcgatgcccttgccacggatctcgctcatctcaagatcggacttgctgagcaattcctcgccgtggtaggtgatggagcccttgacgctggcgttcttgtccagcaggcccatgatggccatggaggtcacggacttgccggagccggactcgcccacgatgccgagggtcttgccggggtacaggtcgaagttcatgccgcgcaccgcgtgcacggtgccggcttcggaggcgaagctgacggtgaggtcgcgtactgaaatcaccggttcggatgccatgccttgcgctcctgtggtgttggggttggtgttggttgttacgttgcttgcgttgcgttcgtcgctcatgatgcccgtctcccctctcactcggccttgccgccggaacgggagtacgggtcgatggcgtcacgcagtccgtcgccgatcagctgcacggagaaggtcaggacgaccagcaccacggacgggaagatcagcacccatggcgaggtctgcaccacggactggccggcgttgagcagcgtaccgagcgaggtgtcgggcgccttgatgcccaggcccaggaagctcagcgaggtttcgctgttgaccgcaccgatcacgccgagcacggtgttgatgaccagcaccgaacccaggttcggcaccagatgacgcacgatgatggtgaaggacggcacacccatgaacttcgccgcgcggatgtattcgcgatcgcgcaggctcagggtcagcgtgcgcagcgtacgggcgtagccgatccaaccgaatgcggtcaggccgatggccagccacagccagtcgctgccgccggccgccatgccgacgatcagggcgatgagcaggaaggacggcacgacgagcagcatatccagcagccacatgcccacgcgctcgaaccagccttcgaagaacgccacggccgtgcccaccagggcggcgatgatcgtggtgccgaacgagctgaagataccgatggtcaacgaacggccgaggccgcggatgatcatcgcgtacatatccgagccaccgaccgtggtgcccagccagtgctgggcggacggcggcgaggcgagggcggcgaaatcgggctcatcgtagctccactgggagaatttcgagccgaaaatcgccaaaagaatcagcagaatcagcaccaccagacccaccacggccgaggggcggcgcatgaagcggcgcacgtacagctgcatgcggccggtgcggtggaagtcgtcggcgctggaagcctcctgggcgttcctggcgtcggcggactgcggttcgctgccctgcggatcggtgagttccatatcctgggcggcggcgtcggagaccatgttttcgttgtcgttcatcatgttagatcgtcctttgcgcggggctcagctcagtcggatacgcgggtcaagccaggcggagaagatatccgccagcagcgcgccggacagcgtgcacacgccaccgaacgcggccacggccacggcaccgttgatgtcgttgttggcgatggtctgggtgaagtacatgcccaggccgttgatggcgaacacgttttcggtgatcacggcgccggtgaacacgccggcgatggagaaggccacatccacggcggtcggaatcagcgaggtgcgcagtgcgtggcggcgaatggccgcgttgagcgtcaggcccttggcgcgggcggtgcgtacgtagtcggcgttcatggtgtcgagcagatacgtacgctgggtgaggtggtagcccaccatgcccggaatcgtcatcacgatggtgggcaggatcaggtgctgcagatagtcaaacacccaaagcaccgggttggagccttggtaggagtgcaggccggtcacgtagaacgcgcggctgcccacgatgttgttgaagttgatggccagcagcaccaccatcaggcccatgacggcggccgggaccaccaggaagaacgttgcggtggtgttgagcacgcggtcctgccacttgtactggcggatggccgtgtacacgccgatgctcacgccgaagaggatggagagcacggtggcgagcgtcaccagctgcagcgaagcggagatacgggaggcgatggccggcgccaccggcgactggtccgggctcaggccccagttccactgggtgaggatgcccttgagccagcggaaatagcggatgacgaccggcgtctggtcgttgatgttggccagatcgagcgaccggttaatcgacgcgatcggcggatgcggattgcgcgacatgtagttcgaacgcggatccatgaatgcgctggccaggaaatacgtcatcgatactgccacgaacagcatgatcacgtagttcacaatgcgcttgatgatgtacttgaacacccaaccacctcccagataactgggaaagtgatacccccccccgctcaaaaccacaaattgagtccaatatatggaatatgggtattgacttttccgactttttcctgtacggaaaaccgcgaaaacacttactgtatattgggcaaacatccgtttgttaattttgtatttcctgagcctttgctggacatgccttatactttcgtgtcagcagtccgccggcccggatggtgacagtccccgccgccggcaacggattatccatcagcatcatcagcatcagacaggggcatcatgacgacagacgccagcgcacgggccatcaaacccgaacttctgcgtacgtacaccgaagacttcaacaaggaccgcgccaacctgatcgcggcggacgcggcggtttcggccggcgtactcaaggcggccaccgactatcgcggcgtacgtgcgctgccgcgcgacttctccatcgaacttaagcaaggttcgatcaccaatcaggagcgttccggccgctgctggatgttcgcctccctgaacacgctgcgttacgaactcatgcatcgctggaatcttgaggatttcgagttctccgagacctacctgttcttctgggacgcgatggagaagtcgaacacttatctggagaacgtgctgcgcacgctcgacgaggcgaccgattcgcgtctgttcgaagccatcaactggggcccgtccgacgacggcggctggtggcagatgttcgccgcgctggtgaacaagtacggtctggtgcccaagagcgcctacccggagtc

SEQ ID NO: 1723 - DNA, 10051 bp, Unknown
  MAG_14  MAG No. k141_17146
agcgattcccaagtcttacgacccataatcaccggatgggagacggtcagctccttgaaatgcttcatatcctcggcacagtgccaaggcatgccgccattgaggccgatggcaccggcgcgaccttccttgtcgcgggcttcggcccagataagattcaccgagaaggtcttgggataatcgtcaccccagtcttcttcagtggcagacagcccggcagatccgggctcgggttcgtgatagccgctacggctactgtcatgctccatttcgcttactcctcctggattgcggaactgggccttagtgtagtggacagcgaagactcgaggcccgtcgcctccacagtcttcgctgtccacgaaatggtaatcagcatcagaccgcaacaggtgccttaatagtggggtgatgctggtagccgacgaccttgaagtcctcatactggtagtcgaacagggaatcggccttacgaatctcgatggtcgggtacgggtagggcttgcggcccagctgctcaaggaactggtcgacgtggttgtcgtagacgtggcagtcgccgccggtccagacgaattcgcccggcttgagcccggtctgctgcgccatcatcatggtgagcagcgagtaggaagcgatgttgaacggcacgccgaggaacatgtcgcaggaacgctggtacagctggcagcttagcttgccgtcggccacgtagaactggaagagcgcgtggcagggcggcaacgccatcttctccacctcggccggattccacgcggagacgatcatgcggcgcgaatccggatgatgcttgatgaggtcgagcacattggagatctggtcgatggtgcgattcgggtcctcgggggtcggtgcgggccaggaacgccactgcacgccatagaccgggcctaggtcgccgttctcgtccgcccactcatcccaaatatgcacgttgtgctccagcagccagttgatgttggaggaacccttcaaaaaccacagcagctcgtaggccaggcccttgaagaacacggtcttggtggtcagcagcgggaagtacttcgacaggtcgaagcgcatctgctggccgaacagggaaatcgtgccggtgccggtgcgatcggacttcagcgtgccttcggtcaggatcttgcgcaccaggtcctcatagggcatcggaatgtccgtttcgggacgtgcggggatacgggagcgaatatctgcgagttgttcttcggtcaaagccatgtgcaccagtgtagcttaggggcataatagagaagtccgatgatgcgggagagcggccaggtgccgcgctcccccgctggcatggcgatgggccagatcgccggcggctgaaaataaaggagcagctatgggtaagcgactgtgggttgaacgcaacaaggacggttcgtgggatgcgttcagcgacgatggcgcgcacattaagttcggcaaggatcgtggccagttcacgccgggcgatctgatgaaggtcgcgctggccggttgcgccgcgctgtccagccagttcgccatcgaacatacgctgggtgagggcaagggtgccaagatcgtggtggatggcacgtacgaccccgagaacgacgcctacaccggtttcgaggagcaggtggtgattgatgcttctgacgccagcctgtccgaggaggatgccaacaagctcaaggaacgcgtcacccgccatatcgacaagggctgcacggtcaagcacacctacgtacaggagaccccggtgcgcatgaacgtcaccgtcaagcactgacgtactaataaaccgacgtactaataaattgagctccctctgatgagggagctcattgtatacccggactttactgcctgtcgggatcgatggtcttttcgatctgctgggcgacttcaggctcggctgcggacaccggaatctcctcgacgccggcaatctcctccagcgacttggtaggcacttcggcgggcgagctcggcacggtgtcgagacgcgattccgcagcctcaacatacttgcgtggcaccacgtacaccgggccggccgcatgctgcagcagtccctggctggtggagcccagcagcagaccggtgaagccgccgcgaccacgggagccgacaacaacaacatcgtgatcgtagctggccttggtcagtgcgctgacggccgggccggaaacgatctgcttgttgattttcagatcaggatgcgattcctgcaacggcttgatacgcacctcaagatcgtccttgtaggactccatgatggcatcctcgccatccacgcccttcaggttcggcacagcggaaatcacgtccagttccgcaccccagcacgtggcgaagtcggcggcaatgtccagcgccttcagaccccacttggattcgtcggagcctacggccaccttggtaatcgtgttgttcaggtgcatcaggttgccgtcatcatcggtgtacggcaccactacaatcgggcagtaggcgtatgccggcagcgacgaggacgtggtgcccagcagacgctcggccagaccgcccttgccacggttaccaatgacgatcagattgtagttacgcgacaattcgacgaacaccgatgccgggtctccggtaacaatcagtgtggcggcttcgacgccctgctcgtctgcgatggccttggccttggccagaatctcctgagcatcggaatgcgcggcgttatcgtcccccatcgccgtgtaagttgcatcgaacgaaacggcggcatagctcggcagggaatatgcgcagacaatctgcagcgtcagccccgcgtgctttgcataattcgcggcccaccatgttgccttgtaactggcatgcgacccgtcaacgccgacgagaatggccttgtcgttaatcatgacgacctccttgaagttattgtggcacgaataccgcgtacctccaacaataccccgcgacactcggtttggccggtatcctccgctcaaaaagaaatccgcgtatacgaaaaaaggcacatcccaaaggacgtgccttaatacgaattcgcttaccgcataattcttgttacatcacgcggcgaatggaatatccagctccaccgaacacggaaacgttgcttattgccgttccctgcaccgggttcatagcattcatcacctgtccgttaccgatgtaaatggccgcatgagtaccattcgcaagaatgtcacccggcttggcatccgccaagcttgcgaccggagtacccacagtggcttgagcaccagaggttcgcggcagggaaatgccaaactgggagaagacgtactgtacaaaaccggagcaatcccatcctgccggagtgttgccgccggcaacatacggatagccttggaacttcagtgagaagctggcaagctcagcgccagtgccagtcattttacccaagtcaacctgtggaatcgacgcacgctgttcagagcggctggctgcagcagcagcagcggactgggctgccgcagcttcatcagcggctttctgagccgccgccgcagcagcagcttccttctcggcctgagactcggtctgtggcacatcaagagtctcgatgccaccccatttagagttctcgtcaaccgaagtggaggtggattcggcgaacaaattcttcttcaccgaactcgccttcgggaaagaacgtgaggacaccatagcactcgtctgcgcggaatcggcagaggcaaacggggctacgcatgcaaacatggcacccgtggcgataaccgccactgatgtggaaataatattcttaacgttcgtcatcagcgccttaccttagcacacatgggtcgatttcataacaggaatgtcttttcgaagatgatgtcgcgggtgtatcactcggcaggagaacgcaacgggcctcggataccgattggcatccgaggcctgcaatatatcaatcaataagactgcatcacgggatacgtaccacgatggtgagtttttcggtcatggcgctagcgagagccacgctgtagccgttccagccaccatggaccgcctgaccgttgccgacatacagcgccacatgatcgtagtgcgcgccgccattccatccaccggtgttggcataaatcagaatatcgcccggctgcagggacccgtctgtaactacgtggccaccgggaacattgacgtactcttcaggccaaccgtggaagttaataccacgggccgccaacgcttgactgaccaatgcggtgcagtccatgctctgtccgatcaaagaatacgcacggtcgatagaggcaccggcaccagcggaaaccgaaccactggcatcggaataagtaacagaagagcgagactcattacggctcgcggcgttggcctgcttctgggtcgcctgagcctcggcctccgtctgcttcttggcctcctcttcggcagccttcttggccgctgcggcatccttttccgcctgagattccgtctgcggcacgtcgaggttctcaatgccgccccaatcagcattgtcctcaacattcgtggcagtggcttcagtcgtcagatctttgcgcacctgggtgtacgaggggaaggacttggtggaagtcacagtaacaccctcagctgcagtcgctgtaggaacaaacataaacgagcaagcacaggagacaatcgcggcaacaatggaagaagctacagttttggtcttcatagaaccatcaccttacacggtgcgcattaactcgtacaggatggaagaaataaaacaccccggagctattgggatatatcggcgtgtcggcacaggtcagttcggactaatacgcggtcgcaacacttgaaatgtcatttcgcgcgaacgattgccgatagggcgacgtcacatccgaacagtaatcaccgaatgtaagccaatgaaatgaatcagtagtggacgtactggaacttaccggcttcggcggcgctgaacgtacgggtcgaaatcacacccaatcccttggcattggattcggagatctcaatggagccgtcggcattgatcttttccagaacggcaacatggccgtatgtgccatcggcattggcctggccaggagcgaacaccacagcatcaccgacatggcgaggagtgttgtccacccaatagcccagagcggaagctgacgccgcccactcgccaccattgccgaagttgccgctggaaggcagtcccagttcggcacgacgctggtacgcgtaccacgtgcactgaccccacggatagttgttggagttggtgccaacggcatggttcgggttgaagccagccggcacagcatcgccatcggcatccatgagagccgacaccacaggattgttcgcattattgcgattcatcagcttggcgtccaaggtgctgtctgaattgctcagcccccaaccgccttcattggtggactgtgcggtaacggaggatgaactcagatcagtacgtgcttcggaacgagaagccgcagtcacatcgctgatgcgcttaatctgcgtggtcgtcgtggccggatcagccacgaacgagttcgtggcgtctttattgttggaaaatgcgagagcacctgcggccgtgccgaccagagcggccagtgaggccgaggcaagaatatggctacggcgttcagcggcacgagcggcctcacgaatggaacgacgagtctggggagcgatttcattgatcttctcggcaatggccggatcaagccccaaaacaacggcgtcgctgccagcggattgcaccgcgcgcacggcacgaacggaatgagaacccttgccggaggcaaacaatgccttcgctaagctgaacttctggcgcgagaccgtggtcgctttatgcgaagcatgcttcatactacgttaactccttggatgggttcggcggggtcctttcaacgaccccgtatgaccggcacaattgagtactgtacaacgaacagaggtcaatcctcaatgcgatcccccaccatccgggcatgtcaaacgatttacgtaaccgtgcggcagggtgaaaaactgccttgtttccgcccgttcacgaacctcactatccggttatcggaagaatcactaactcatgtcattccgacacaccgtagccatgatgtgctgcgtacattctgcactgcattccgcattgccgctactaccgcccggcaccccggaattccgcagtagccccgcagcaatcccgcacaccgagcattatccgcgatattccccaacactggtctacccttgaaaccatgactatcacactgagtattcccgagtcgctgaagccagaagatggtcgcttcggctccggtcccagcaaaatccgccccgaacagatcgccgcgctcgatgccggcgccaccaccctgcttggcacatcacatcgccaggcaccagtcaagcaactggtcgcttcgattcgtgaaggtctgcgcgagttcttccacctgcctgaagggtatgaggtggcgcttggcaacggtggcgccagcgcgttctgggagattgcctgcgcttcgctgatcacccgtcgcgccgcattcggcacgtatggctcgttcagtgccaagttcgccgcgtccgccgcgaacgcacccttccttgaagacccggtgctgttccccggcgagccgggcacttaccgtctgcctgagctcaccaagggcgtggacacatattgctgggctcacaacgagacctccactggcgtggccgccccgattcgccgcgtgcccggcagtcgtgaagccggtgccctgaccgtcatcgacggcaccagcgcagccggcgctttgcccgtggacatcagccagaccgacgtctactacttctcaccgcagaaggccttcggtgccgatggcggtctgtgggtcgccatcctctcccccgaagccatcgatcgtgcggcaggcgtcgaatcaagcgctcatctggaaggcgcacatcgctgggtgccgccgttcctctcgctgaccacggcactgaacaactcccgcaaggatcagaccctgaatacgcccgccgtggccaccctgatcatgatggaaaaccagattcgctggctcaacagcaacggcggcctcgcctgggccaccacgcgttgcgccaagtccgcatccatcctgtactcgtgggccgagcgctccgaatacgccgctccgttcgtcgtcgatgcggacgcccgctcgaacgccgtggtcaccattgatctggacgagcgcgtccaggccgcccagatactgtccatcctgcgagagaacggcatcgtggacgccgccggctaccgcaagctgggccgcaaccagctgcgcgttggcgtgttcccctcggtggaaccggctgatgtcatggccttcaccaagtgcgtcgactatgtggtcgagcacctgtgatggcggtctatgcctcgcatggccgaccatatatgccatgcacattgatcggtctcaactgataccgattgaataaatcgtagggagaggtgtttgacgcccctccctactcttactacagtgcatgagtatgaagttcgcgcctctcattgaccctgccgtccgcaaacccgcgcccaagcccgtacgggtggacctgcgtaaggtgtttgccatcggtaccggtctatggattgtggcgttgattgtcgtgctgattctgctggccgtgggctacagcgtaatgccgttggtgattatgtgcgtggccggtgtcattattggcttgctactgctgatttgggaatacttcgaccgctgggactaccgccgcctcggacagtaataaagttcactgcgccaacggcaacgtcaggctgaacgtactgccttgcccgggcgcgctccatacggtcacatcgccatgatgggttagcgccacatgcttgacgatggccaagccaaggcccacgccatccgccgtgcgattgctctgttccgcaccccggtagaaccgctcgaagatgcgcgcctggtccttcttcgcgatgcccgcgccctggtcgatcacgcgaatcaccgcacggtcgccatccttgtctttggatgcggacacactgaccacaccattttccttggaatagccgatggcgttttcgatgagcttggtcacggcgctgtcgatctgatccgcctcaccattgatgactagatcatcgtcgcccttgatgttcagctgcacgccagccgcggccgcctgcggctccagtcgcgccaccgtggcctcgagctgttccataacgttcagtcggttggcggaagacggcgtaatcggctcctgtgcgcgtatgagcagcagcaaatcggacaccatatggttgagcttgctgcagctggaacgcacctggcgagcatcggcagccacctgctgttcgtccagattgccggactccagcgaatcggcgagtttggccagagcttcagtggggcccaacaattgctcggatacattggtaataaacgagtcacgcacttgagcgaaacgaatcacgtcactgacatcggtaatcaacacgatgacgaactgctcgttgatacgccctacagtcaccttcagccagttggggcggtggacggactgcgtggcgacgtgatcgcccttgttctggtctgcgacgtaccgctccggagtatcggtggtcaagtcgaactggcgcttgccaccagacttgcgcgcctcgtgaatggcatccagcacctgctgctgggcgatggcgtcatctgacaccacacccaggcggtaggcggcgggattgcagcggaccacctcgtcgtgctcgtcgaccaccacggacgcacccggcagcatggacagcagcgtggcggtgtcgtcggacagatcgtcattgtcgtcatcatcggccagcggcgattccacggacactcgatgtgtcgcaaatcccacgatgagcgtgatgattcccaccacaaataaaacagccgcgacaataagagcaatcgcggcgacgagcggcatctgtgtcatgcccccattctttcacaccacacgctgggattgcggtttgccggcgcgccggtaacatgaatttcaggtgaacaacccaatgaacagtagaacaacttgaggttgccattacctacgttgaagtggggaacaagtactggaataatacactggtacaggttgcaataagcaagcatgaaaggctagagaaatgcgcgttattttcaacgaggagctgaagcaggttgctgacgacctcgaccgtatggcgcagaacgtgcgcaaggcgatcaaaggcgctggggaagccctgctgaatcaggacgttgaagccgcacagactgtgattgacggcgacatcgagattgatgccctggagtcctctgtgatcgaccagtgcgtcaagctgctcgccaagcagaacccggtggccaccgatctgcgtgtggtcgtttccaccatgcgtctggcttccacgttcgagcgtatgggcgatcttgcccgccacgtggccgaggccgctcgccgcacctacccggccgccgcgattcccgaatccgctcagccggtgttcgccgagatgatcgacttcctggacaacaccgctgaccagctggtggccatgctctccgatcgcgatgccaagaccgccgaggccatcatcctggccgacgacaagctggacaacctgcaccaccagaccttcgatctggcgctgtccgatgacatcacccgtcagcagaccgtggatatcgtgctgctgggccgcttcctggagcgtctcggcgatcatgccgtgtccgccgcccgccgtgtggtgtacatcgtctccggcttcgaccccaccaaggagccgacccgcgacgagggcaccgacatcgactgattggggcttgtcctcacattgggcgaataactgaacacttgtcctcctatggtttgaggaggatgcccgaaagcggcgatccggctacggctggacgccgttttttgttgcttctgggcggtacaccggcgtatccatggggcggcaaaacacccatagggcggtaacttgcccatggggcggtttgaa

SEQ ID NO: 1724 - DNA, 3499 bp, Unknown
  MAG_14  MAG No. k141_17848
atccgtggttcgaaatatccgaagtgaatgacaaggcccgtcaatcgtatggtgattgacgggcctggtcgtattggacttgactgtacttggtacgggcgtgactctccgtcttttagccgtggaattccacgctgatccaggagatggcgggaagcgttgccgtgcaggtgccggtggcgttcattgcaatgtcgagcggttgcggcgtgacggcttcgggcgcttcggcggtgttggtgcggtacggatcgtcctcatgcaacagttgcgccttgctgagcgcgagcgtgccgagaccgggcaggccgggcagcccggaaaggtcgatggtgagcgtgtgcggggtgttggcgtcgcggttgacggcaagcagcagaccggtgcgggcctgttcatcccacgtgactaccgcgtcgatggccggcacgtcgccatatgcctcggtatggatggtgggggagctgatggccggagcgtaggcctggccgcgcgcgtgaagggcggcttcggcgaacgggtagaacgtggtctgccgccatgccgggccgtgttcctcggccatgatgggggcgatgacgttgaccagctgggcgcgcgaggcggaacgcacgcgatcgcagtgcttgagcagggtgatcatcagggaaccttcgaccaccgcgtcggccgcggtgtagatgtcttccagcaaatgcggagacttaggccatggctcgtggtgcaaaccctgcgcggcctccgccttccactggtcttcctgctcgttccacttgtccgaataccatacgccccattcgtcgaaggacagggcgatgtctttggtgccgttgttggcttcgcgcgcctgatcggccgcgtccgagacggtggcgatgaacttggtcatgtcttcggaagaggccaggaagtcctgcatggaggcggcggtccgggttttatggccgcggtcgaagtagtaggcatggcaggagacgaagtcgagattctcgtaagccttggtgagcacggtcttctcccacgtgccgaaggtcggcatataggcacccgaggaaccgcaggccacgagttcgagaccggactcggcgagcttcatggcgtgggccaccttgtccaccgcgctggcatattcttccgggctcatgtggcccacctgccacgggccgtccatttcgttgccgatgcaccacatcttgatatccatcggctcctcgatgccgttggccacgcgctgatccgcccaagcggtgccgggcgcgccgttgacatactcgagctcgtcgagcgcggctttcagcccccgggtgcccatgttgacggcaagcatgatttcggtgccggctttctggctccagcggtagaagtcgtcgatgcccatctcgttggtttcggtgcaatgccaggccaggtcgcggcgcacggggcgattctcgcgtggaccgatgccgtcttcccagttgtagttggatacgaaattgccgccggggtagcgcacgcaggtgacgcccagctccttgaccaggtcaagcacgtcttggcggaagccgttttcgtcggcggtgggatggctgggctcgtagatgccgccgtagacgcagcggcccagatgttctacgaatgagccgaacagacgcgggggaacgtcggctaccggagtggcgtcggcgttgagggcgatgctggcgtccggcgtggcgttgccagttgtggagacgttactggccgtggtgccggcggcggtcggcgccgggctgctttcctgcttgtcgggatgggtggtttcggcggaatactggctgttgtgagtggtcatgagcgggatgcatctccttcggtttgcggttagtcaccatggtgcgacatgtcgtgtttgcgtaaacataaaacatgtggtaccgtttcttaaaacgatacaagacttggaacaaaacgccaagtcccgtcgtttcccataacaaggaaggaaagaacgatgaagttcggcaagaagacaattgccctgattggtgctgtggccatgctctcctctgtagctgcctgcggttccacctctgccggggatagcggaagcaccggctcctctgataagaagatcgagctgaccgtgtggtcctgggattccacactgcctcgtacggtcaagggattcgaggccaagaacccgaacattaaggtgaaggtgaccaatgccggcaccaacaaggacgagtacaacgcactgtccaacgccatcgaggccggctccggcgctccggacatcgcccagatcgaatactacgcactgcccgaatacgtgattcgcggccacctcgagaacctttccgatctcggcgcctccgatttcaaggacttctataccccgggcacgtggtcctcggtgaacatcaatgacggcgtctacgccctgccgatggattccggcccgatggcctggttctacaacaaggacgtcttcgacaaggccggcgtcgatccgacccaggtgcgcacgtgggacgacttctacgaggccgccaagaagattcgcgccgtggactcctatatcacctccgattccggtgacgccggcttcttcgactccatgacctggctggccggcgcgaccccgttcgagacctccaaggacggcgagaccgtgaccatcaacctgaccggtgacaagaacgtcaagaccttcaccgacttctggcagaagatgatcgacgaagacctcatcgacaccaagaccgtcggctggaccgacgattggaacaagggtctggatgacggctccatcgcatccctgctgaccggcgcttggatgccgtacaacctgctttccggcgctccgaacggtgacggcaagtggcgcatcgcccagatgccgaccgcagacggctccgagaccaactccgagaacggtggttcctcgctggccatcgtgaagtccgacgacaaggccaaggtcgccgccgcctacaagttcatggaatacgcctgccacgacgccgagggcatcaagacccgtgttgacggtggcgccttcccggccgacaacgacaccctcaagtccgatgacttcctcaacatgacctccctgaccgactccgacggcaaggcccacgagtacttcggcggtcagaagttcaacgaggagctggccaaggccgcagccaatgtgtccaccggctacaagttcctgcccttcgaggtctacgctcgcggcaagttcggcgactacgccggcgatgcctacaccggcaagaccacgctctccgatgccgtggcttcctggcagaaggacctgcaggattacgccaagcagcagggctaccaggtgaagtaacggcaatcacagcagacttcctcctgtggtttctgtagcgggaggttgcgataacaggatcgggcactcttcggagcgcccgattttcttatgccatgggagcagtggcgcgcggattgcgataccaagatggcgtgttgccgaagaatgtgtataataaaagatgttatcgca

SEQ ID NO: 1725 - DNA, 4746 bp, Unknown
  MAG_14  MAG No. k141_18488
caggcccgtggcgtgatgcggctgcgctccaagtcccatggcggcgtgttcgtggccatggccaatgcgcgcaccccgcaaagccagtgggaaaacaccggcccggatacggtggagaccccggtgagcggctattccaccacaattcatccgctcgcctcgccgctgaaggacgccactccttgggtgcgttggctcaatcgcgatgaacttgcgcgtcttgccgacccgtccatcggggcgcgcgtgccgcatacggccgtccgcgtgctatctaaggctttggagagcggccccgtgctgctgtccattccgcaagacagcgtcagtgagactctgagttgtgcgaaatgccatcgtcaggtgcgctgcgccaagtgttccggaccattgcaactaccggccgaccgccgggactccacaccgcgatgccgctggtgcggggctgccgccatcaactggaagtgtccgggctgtgggcatgaacgtatgcgcgtggtgcgcgtgggtgctgcaggcactgcggcggagctggccggattgttccgtggcgtgccagtagttttgtccagcaagacgcagggtctggtgcgcgatgtggcttgccagccgatgattgtcatcgccactcccggtttcgaaccgcgcgtgcgtccgatcagtgccgagcagggaacatccggtcatgagtatcgcgcagtggccgtgctcgacgcttggaccagcctgtatgcgttgggcgtggatgctcggttggatacgttgaccgcgtggatgcgtgcggtgtcgttgtgcgcgccgcgttcccgtggcggccaagcgttgattctcggcgaaaccgacccggccatcgcccaatcgctgatgctctgggattcgaggattcttgcagccaaggatcttgaggagcgtgtggagaccggtatgccgccggccgtggccgccgcctgcgtgtggggccgccgtgatgcggtgatgacgctgatgcagcgtatcggcgcgctgggcggcgattggacggcctgcggcgagctgcccggcatgttgggcccggtgccgatcgcgcaaccggacacggtcgacgcccgggagctcgaagccacggccgaccgggtgaaggcagtaatccgtgtgccgcagagtcggcgagccgagctggcggcccgactgcaccgggaaaccgctcgtcatgtggcgtcccgcgaacccggcgagcttcgcttccgagtagatcccaaggacctgatctaatcgtcttcaacacgtgaaacgataattacagaatgaacatcgctagaaggaggacactatgaagggttggcctggagagccggatatggattacgacgtgctggtcgcggatggcgaggccgctgcgaacgccggcaagccgatcaccgacgtgatcttcgatttcggcaacgtgctgatttactgggatccggtcgccgtactcatcccccgctacagccagaagaccatcgacgaattcctcgacaacgacatctccggcttctacgatgtcaacgacctgatggacggcggcaccagcaccgacgaggccatcgccatcatgcgccgtgacaagggcgataagtgggcggacatcctcgactactacatcaagaacttccgcgactccctgaccggcatcgtgccgggcgcgcgcgtgctggtcaatgacctgaaggctgccggcatcggcgtgtggggcctgagcaactgggaatccagtctgttccacgtggccgaggaacagtgcgatattttgcagcagcttgatggcaagctcgtctccggttttgtcaagctgcgcaagccacacaaggaaatctacgaggccgcgttgaaccagttcggcatcaaggccgatggcgcgttgttcatcgacgacaaggccatgaacatcgtcggctcgaatgcggccggcatccgtggcgtacgtttccaggatccggtcaagctgcgtgaactgctcatcgccaatggcgtgaacattccggccgtgcagtgagcatcgacatttcaaggaggaccatgctcaaactcgtgttcgccggcacccccgacgtggcggtgccctcgctcaaggcctttgccaccgatccacgttttgatgtggtcggcgtcattacccgccccgatgcgcctaccggtcgcggccgcaagctcacgcccagcccggtcaaggctacggctctggagctcgggttgcccgtcatcgatctcaaaccccgctcccccgaattcatggaggcgttgaacgacctgcatgcggatatcgccgctgtcatcgcctatggcaatatcctgcccaagaacgtgcttgatgcggtgcccatgggctggtacaacctgcatttctccaacctgccgaagtggcgtggcgccgctcccgcccagcgtgcgatttgggcgggcgacccgaccaccggcgccgacgtgttcaaggtgggcgagggtttggatgatggcccgatcgtcgcttccctgaccatcgaactgaccggccgtgagacttccggcgaactgcttgaccgtctggccgaggaaggcgcgcccatgtatgtggatgcgctggccgccgtaggtgaaggcaccgccacattcaccgcgcagccggccgaatgcctggaatacgcgcacaagatcacggtgaaggacgcccgcatcagttggacggacgaggccgaggccatcgaccgtcagattcgcgcctgcacgccacatcccggggcatggaccgaactgtttgcggaagggccaatcgccgataatgacgagtcaaccgctaaatccctcgccctgcatattctcgccgcacaaccggccgaccagtccaatcccaacactccggccgagcttcagcccggcgagctgaaggtgggcaagaagaacgtgtgggttggtaccggcagcacgccgctggaactcacccaagtcaaggcgcaaggcaagaaggccatgcgcgccgccgactgggcccgaggcgcacgcctctcccccgccgcctgcgtgcgataacaagcaatatcgctcccgccttcggaagcacagtaaaggcccggcatcttcataaagaagatgccgggcctttcagctatgcaatcggcgatcagttgagaccggagagcttgttgatcagctccgggtcacgcgtcgcacccttgtcggccgagcgggcgaaggcggcgtacgccttcagcgcctgggagacgtggcggttgcggtgagccacgtagccgtcgccagcctcaagctcgcgacgacgctcgtccagctgctcgtcagtcagttcgacgttcacggaacgggcttcgatatcgatatcgatgatgtcgccgttcttgatgagcgccaccgggcccttgttggcagcctcaggcgccatgtggccgatggccagaccggaggaaccgccggagtagcgaccgtcggtgagcatggcgacctgtttgccgatgcccttgcccttgacgaaggaggtcgggtacagcatttcctgcatacccgggccgcccttcggaccctcgtaacgaatcacaagcgccatgccaggcttcagggtgtcgttcagaatgacctcgatggcctgctcctgggagtcgaccaccagagccggtccacggaacttccagatctccggcggaacaccggcggtcttgaccacgcagccgtcgggggccaggttgccgcgcagcacggcgaggccgccttcgtgaatctccgggtggttgatgtcgtggatggcgccgttggtgcggtcgcggtcgagcgagtcgaacagggtggtgtgcgtccacggctccggggagatgatgtggccaggagcggccttgtacatctgctgggcttcctcggtgcaggtcgggcgcatgatgtcccaatcggccagcttggcttccagcgtcgggtagtcgatggaatgcacgttggtgtgcagcttgccggcgcggtcgagctcgccgaggatgccggtgatgccgccggcgcgatgcacgtcggaaatctcccacttgccggacggcgaggccttgcagatgcacggcacggtgtgggaaatacgctcgatgtcgtccagggtgaagtccacgtcggcggactgggccatggcgaggatgtgcagcacggtgttggtggaaccgcccatggccacatccatggtcatggcgttctcgaaggcttccttggtggcgatggagcgcggcagcacggaatcgtcggaatcgtcgtagtactggtgagcgatcttgacgacttgcttggcggcacgcttgaacaggtccttgcggtaggagtgggaggcgaggatggtgccgttgccgggcagagccaggccgatggcctcggtcaggcagttcatcgagttggcggtgaacatgccggcgcaggagccgcaggtcgggcagacggtcttctcatagttgagcagttcctcatcggagacgctgtcgtcagcggtggcgtacatcacgtcgataaggtcggtgctcttgactgtgccgtcggcgagcaccgtggtgccggcctccatcgggccaccggagacgaacacggtcggaatgttgaggcgcagggctgccatcagcatgcccggcacgaccttgtcgcagttcgggatgcagatcagggcgtcggcacagtgcgcattcgcctgatattccacagtgtcggcgatgatgtcacggctcggcagggagtacagcatgccggtgtggcccatggcgatgccgtcgtcaacggcca

SEQ ID NO: 1726 - DNA, 2657 bp, Unknown
  MAG_14  MAG No. k141_18796
ggcgactggctgaccatcgcaaccgccgtcatcttctcgttcaacctgactttcctgggcatctataccaaacggttcgacccgatcgccgtcaccttcgtgcagttcggcgtcgccggcgtattgttcatcgcaggagcggcgttcaccgaacccgcgccgaacgccggttggctggcgccctcggtggtggccagcgtgctctacctgttcctcggcgccacgatgagcgcccagatcatgcagaacatcggtctggcccacgtgcccgcctcgcaggcctcgatcatcatgtgcacggagagtctgttcgccgtcacgttctccgcgctgttctggggcgagacaatcatgtggacttcgctggtgggctttgcgctgatcttcgtcgccgtgctgatgtcggtgatcagaccgaccgggcagtcgctgcatcgtaattgacgatgtcccgcggcctgcggcgacgcgaaacgcacgtgtgtgcgccgcagggcgtgtccgacctgtacgaaggccgattttgaaggtctcgtgtaggcctcgccccgcttccatcgagtctcaggcaacctgtcagcccgacaccctacggtcgtgcattgtgaagaagttttttgaaggaatctccctctcatccatcgtggcgggcacccttgccgccgtcacctcgttcctgctcgcatcgaagatcggcatcggcggttcggtgatcggagcggcggccagttatgtcgtctccgccgtggccaccaagatctaccagaacgtgctcaccgcctccggcgaaaaactccaatcggcctcgtcctccggcaacgggatcacgaaggacgccgagaacggcgatgccgatggcggcaccccccgaacggccggcagccggaccgacgttcgggacgagcccgatacggcgacgggcgtgaccgccgatgatgcttcctccacacgcagaccgcgtgaaatcgtgttcagccgggcgaacggcaggacgtactcggtcgatgagctgcgcaagtcccgcttccgcgcttcgaagcacaccgccatgatcgtcaccttggtgtccggcctgctcgccgtggcggtgacggccggcgtcgtgatgctggccacgcagggacgcggcacggacaatctcgtatcccccaccacgaccacgcccgcgcgcaacgacaccggcacgcgaacgggcacccccgatcagaacaacgctctgccccagacgggcaccggcgatgattcgaagggaaccagcaaggattcgaaaaccgacgccccctccaccgacctcgacgccaacggcacctcgggttcgaccggcgccggcgcctcggattcgaaaaccgacggcaccgccaacggttcgaacggcaccggcacctcaaagaatccgaccaccgaagacccgaccagccaaggcgtcggcggcagccagaccggttcgaacggcaccggcaccggctcgacgcaaaaagatccatcgggatcgacttcaaccagtaccggcaccagcggcaccagcggatcgccggccaccggcccagacgcgggcctgtctcgttaagtgtgtaactggcgttttcattgttgtgttccctcgcttggccggcggtcggcgaaggtgatggcaaaggcgttgagcgcgggcttccggcgcgcgctccatcgtatccgtcccttgccggtggggtccagcgagcggacggtcaggtacatgcacttgagcacggcctgctcgtcggggaagtggccgcgggcgcggatggagcgcttgaatctcgcgttgagcgattcgatggcgttggtcgtgcagatcacgcgccggatctccacgtcatagtccaggaacggtatgaaccgttcccacgcgtccacccacagcctgcggatcgcgggatatctcgcctcccacttgtccagcatcgcgtcgcgggccgccgccgcggcggcgggcgacgtccagatgcccagcacgtcgcggtcgccctccagatccacgccaacggccacgtagaacgcgcggttggcgacctgcccgtcgcgcaccttgacgacggtcgcgtcgatgaacacggccgcgtacacacgatccaggggacgcgagcaccattcgtccttctcggccacgacccgctcggtgatgcgactgacggtctccctggacacgtccgccccgtagatctcctggaagtgggcgctgatctcgccggtggtcaggcccctggcatacagggacagcaccacctcgcccaccccgggcagccgccgctgccgtttcctgacgacgaccggctcgaacgagccatcgcggtctcgcggcacctcgatcccgaccggacctaccgaatcggtgaccacggtcttggcggtggtgccgttgcgcgtgttcgcggccctgccgtccttggatttcttgtgcttggcgcggcccaggtgctcggtcatctcctcgtccagggccgtctccagcacgcttttggtgaactgtttgagcagtccgtcgggccctgtcaggtccagtcctttttccttggccatgcgcacgaatgtgagcgctgcctcccgctcggcgttgcgtttttccgcgtccggcttcttcgtcggtgtcatgtttcccattgtcccagcacacatcgtccaccagcctttccgac

SEQ ID NO: 1727 - DNA, 22910 bp, Unknown
  MAG_14  MAG No. k141_19104
cgacgtgcagtcctcgatgatcgattcgatgatcgacgacctgggcgccaagaagtgaccgtgaccatccgtaaccagaaagggaggtgaccatgcgaggagaggcatcacgtattgcagaccgcgagtcgcgtgattcgctggccccgaaactgcgcgacacccgtgaggacgcgtggcggatcggcaacgaactgttcacgatcaccaaggtgctcgatgacagcattcagctggaacgcgcactgaccgacccgtcccgcccggtcgccgacaaggtggccgtcctgaagggactgctcggtgacaacgcgcatcctatgaccatggagatcatgaccgacttggtctcccgccgttggagccgtgcgcgcgacatcgccaacgcggtggaggacttcggcgtggacgccatgatgtactacgctgacgccaccgacgccacgctgcaggtatccatcgagctgtccgagctgcattccgcactgctgaacctgccggtcgtccgctccaagctgtacgactgccaggccaccagcgaggcccgtgtgaagctgttccgcgaggtgttctccggcaagaccctgaacaaggtcaccatgaggctcgccgaacacgccacctgcaacctgcgccgccgccgctacttggagaccatccagtggctgatcaacaagttctcccgccacatgggcgagtcgatggtcaccgtgaccaccgccaccccgctgaagaaggagcagattgagcgactggtcgaggtctactccgccaaggtgggccgccaggtgcacatcaactcggtggtcgatccgaccgtactgggtggcatgcgcattcaggtgggcgacgaagtcacggacaacaccgtggtcgcacagctgcagaacctgcatcgcaaggtgcagacggaggcgactccggcctgaccggccgagccaatccgtccaacaccacacacaagcaaagacttgactgaacaataaccaatagaaggagtgatcatggcagaactgaccatcgatcccgcctcgattcgcaaggccctcgacgacttcgtgtcgtcgtacaagccgagcgacacccccacccaggaagtgggctatgtcgccacggccggtgacggcattgcgcacgtgacgggattgcctggttgcatggccaatgagctgctgacgttcgaagacggcacgctcggcctggcgttcaaccttgacgcccgtgagatcggcgtggtggtcctcggcgatttcgcaggaattgaggaaggccaggaagtgcgacgcaccggcgaagtgctctccgtgcccgtcggcgacggctatctcggccgtgtcgtggacccgctgggcaagccgatcgacggcctcggcgagatccagggcattgagggtcgtcgtatcctcgaagcccaggcccccgacgtgatgcaccgccacccggtcgacgagccgctgtccaccggcctcaaggccatcgacgcgatgaccccgatcggccgcggccagcgccagctcatcatcggcgaccgccagaccggtaagaccgccatcgcgatcgataccatcatcaaccagaaggccaactgggaatccggcgacccgaagaagcaggtccgctgcatctacgtggccatcggccagaagggctccaccatcgcctcggtgaagcagagcctggaagacgccggcgccatggagtacaccaccatcgtggcctccccggcagccgattccgctggcttcaagtacatcgccccgtacaccggctcggccatcggccagcactggatgtacaacggcaagcatgtgctcatcgtcttcgatgacttgtccaagcaggcagaggcctatcgttcgatttccctgctgctgcgccgcccgccggggcgtgaagcctacccgggtgatgtgttctacctgcactcccgcctgctcgaacgttgcgccaaggtctccgatgatctcggcggcggttcgatgacgggtctgccgatcgtcgagaccaaggcgaacgatgtgtccgcctacatcccgaccaacgtgatctccatcactgacggccagatcttcctgcagtccgatctgttcaacgccaaccagcgccccgccgtggacgtcggtatctccgtctctcgagtcggtggcgccgcacagaccaaggctctgaagaaggtctccggtacgctgaagatctccctggcacagtaccgttcgctggaatccttcgccatgttcgcctccgatctggatgcggcttccaaggcccagctgacccgtggtgcccacctgaccgagctgttgaagcagccgcagttccacccgtactcgccggaacaggaagtcgtgtccgtatggaccggcacccacggcaagctcgacgacctcgacctgaaggacgtccttccgttcgagcagggactgctggactacatcgaccacaacaccgatatcctcaagaccattcgcgagaccgaggaattcaccgccgacaccgaggctgccctcgataaggccgtggacgagttccgttcgacgttcgtctcttccgccggcaagccgctggtcgagaagaagccggacgttgacaaggccgcgccggttgatcaggaaaagatcgtggcgggagaaaagtaagccatgggctcgcaactcgcattgaaatcacgcatccactccaccgagtcgttggcgaagatcttcaacgctcaggagatgatcgcgtcttcgcatatcgccaaggcccgtgatgtggccctgaacgcgaagccgtacaccgatgcgattttcgatgccgtgcaagcgttggtggcccacacccatatcacgcatccgatcgcggtgaaggacgagaagaacccgcgcgtggctgttctcgccctcacctcggatcgtggtatggccggcccgtacacctcttcgattatccgtgaaacggagtcgctgctgtcccgcctcgatgcggcaggcaagcagccggagctgttcgtgtacgggcgtcgcggttcgacgtactacaagtaccgtaatcgtgacatcgcggcgacgtgggaaggcgacaccgaccagcccggcgtggaaattgctgaaacgatctccaacactttgatggatgcctacatgaagccggctgagaaaggtggagtttccgaactctacatcgtctacaccgagttcatcaacatggtggtgcaaaaggtgcgcgtgctgcgcatgctgccggtcgaaatcgtgaaaaacgagaccaaggtgcccgatcctgatgaagaggcaccggctactgcggatgtcgctccgctgtacactttcgagcccagcctcgaaaaggtactggacgcgattctgccgaagtacattcagtcccgcatccacgagtgcctgctgaccgcggccgcgtcggaaaccgcaagccgccagaacgccatgcacacggcaaccgacaacgcacgaaacctgatcgacgaccttacgcgcaagctcaacgcttcccgccaggcctcgatcacccaggaacttaccgaaatcatcggcagcgctgacgcgctgaccaagaaggaagagtaggaacgcatatggctgacaaccagaccactgcggccgagcctaccaacggtcgcgtcacccgcgtccagggctcggttatcgacgttgaattcccggtgggtcatctgcccgacatctacaacgccctgaaagtaacgatcgtcaacaccggcgccaaggaagaaggcgaggcgaaggagaccgagatcaccctcgaggtcgaacagcacctcggtgattccacggtccgttgcgtcgctctgaagcccaccgacggcctggtccgtggtgcctccgtctccgacaccggcgccccgatctccgtgccggtcggcgacgtgaccaagggccacgtcttcgacgtgtccggtaacatcctcaacaagaagccggatgagaccatcaccgtctccgagcgttggcctatccaccgcaacccgccggccttcgatcagctggagtccaagacccagatgttcgaaacgggcatcaaggtcatcgacctgctgaccccgtacgtgcagggcggcaagatcggtctgttcggtggtgcaggtgtgggcaagaccgtgctgattcaggaaatgattcagcgcgtggctcagaaccacggtggcgtgtccgtgttcgcgggcgtcggcgagcgtacccgtgagggtaacgatctgatcggcgaaatggccgaggccggcgtgcttgagaagaccgcactggtcttcggccagatggatgagcagccgggtacccgtctgcgtgtcccgctgaccgcactgaccatggcagagtacttccgtgacgtgcagaaccaggacgtgctgctgttcatcgacaacatcttccgcttcacccaggccggttccgaggtgtccaccctgctgggtcgtatgccttccgccgtgggttaccagccgaacctggccgatgagatgggttccctccaggagcgcatcacctcgacccgtggtcactcgatcacctcgctgcaggccatctacgtgccggccgatgattacaccgacccggccccggccacgaccttcgcccacttggatgcaaccaccgagctgtctcgtgacattgcctccaagggtatctacccggctgtggacccgctgagctccacctcgcgaatcctcgatccgcgttacgtgggccaggctcactacgactgcgccaaccgcgtcaaggcgattctgcagcgtaacaaggagctgcaggacatcatcgccttgatcggtatcgacgagctcggcgaagaggacaagaccaccgtgaaccgcgctcgtaagatcgagcagttcctcggccagaacttctacgttgccgagaagttcaccggtcgccccggctcctacgtgccggccgacgagaccatcgaagccttcacccgcatctgcgacggcgtgtacgacgacgtcccggagcaggcgttctccggtatcggcggcatcgatgatctcgaagagaagtggcacaacatgcagaaggaactgggtgcgtgatggctgcggaaaaaaccacgatgaaggtcaacatcgtcgccgctgaccaccctgtgtggcacggcgaggcgacgagcgtgaccattcccgcctctgagggcggcatgggcatcctgcccgaccatgagcctgtgctcacggtgatcaagcagggtacgctcaccgtggttgagcccgatggcgatcgccacatgttcgaggtgaccgacggattcatctccttcgactcgaacaaactcaccgtggcggtcgagcgcggccacgacgtccagtactccggcaccgccgagtgatctgaaccaactcctcaaggggctctctggttttccagagagccccttttgctatgtatgccatgtgttgcgctacagtggtggcctatgcgagttattgttgccgactgttcggccgagtattcgggccgcctcaacgcctcactgcccctggccaagcgtgtattgctgatcaaggctgattccagcctgttgattttctccgaattgggctcctacaagccgctgaactggatgaccgcgccctgcacgattcgtgagatcgacccagccgccaaatccgcgcaacattcccgggaaagtgtcgctggtggggctgtggatggtgattccgcgacgcattccccggaaagtgtcgccgctggtgagccggaaaaggtgctacgtgtcagcgccgacaagggctctgacattcttgaagtgacgctgcaacacatctattccgaccaaacctatgatctgggcgaagatccgggtctcatcaaggatggcgtggaagaccatctgcaatgctatctggccgagcagatcgagcgtatcggcaagggagccaagctggtgcgtcgcgaataccctaccgccattggtccggtggatatcatggccgtgaatgccgagggcgagcatgtggctgtggaaatcaaacgtcacggcggcattgatggcgtcgagcagctgactcgctactgcgaactgctcaatcgcgatccgctgctggccccggtgcatggcatcttcgccgcacaaaccatcacgccgcaagcccaggtcttggccaaggaccgcggcttcacctgcctcatcctcgattacgacgatatgaaaggcaccgaggacgacagtctcaggctgttctgattgttcttggcttccctcttgaaggggagttttcgaacgtacatagagagactgaggggaggcctcacggtatattccgtgaggcctcccctcagtcagtttcgctgccagctcccctcttggggagagccatcgagattgtttagtacgcggcgagaatatcgattacgaagaccaacgtggagttggcgggaatcgaaccttgctccttatctccataggcctgatccggcggaatcaccagcagaacctgagagccgacggtctggccgaccagacccttctgccagccctcgataacctgatgctggccgctggaatcgctgaacagatcggcgtcgattgtggaatcgcgatcccaggacgaatcgaactgcttgccatccgtaagccaaccggtgtacttgaccaccacggtgttcttgtcggtcagcttggcgccgttacccttgatcagcgtctgcgagatcagcgaatcaaccgaaccctgaccgttcatgtcaatggacggcttgccattcttggctcgcgtcaccttcggcagattggccggcacatccttgacttcctcgccagtggccttcttcaggtccttggacttggatacaaacgtcatcgccaaaatgtaagagtatccggacgaatcctgagcgttgacgccaaagccgatcgtggtgttgatcttggcacccttgatctggttgtagtaggtcgaggagagggtcttggaatccaccttcagcgagcaatccggcgtgttcttggtccaggtgtccatgagctcggtgccgtctttaacgttgagcgcgatgccttgggcgcagacgcggtcgccctcctcgatcacgtcgccatcgcccttttgcagcaccacataggagccgtcggacacggtcatcggcgtattaaaggagatggtcggcttctcgccgagcttgcccttggcggtcacgccggcaatttgccccttcttgtcagaagagtcggaagaggatttcgagtccgagctcgaactggagcaggcagccagcgatacgcacatcgccagcgagcaggcaagagcaacggccttgccgagaggggataacatagatttaacagacttacgcatgacacaccaccctactggtgaaccttgattttctgcgctcctaggtaataaacaggtgaagattgtagaatggttaagttatgagtgctgaagaacagactacaagaccggataagggcgccaagcgtccatcccgtcatgccaagatcatgcgtggagtggtgacgcctatcttcggtctattggccgtggcggctgtggtgttggggtacatgaatgccacgatatggaagccctccactgaaatcaccgcttccgcaaccatgagcggctcccggtatgccgtcactgatccgaatgtgctgaccttgttggatcagaacgccacgataaccgtggactcgggatcctctcaggacgaggcgtgcgtggcgttgggtccgtccaaggatgttgccggatgggtcgcgtccgagaagtcctatacccgtatcaccggattggcgtcatggagcgagctgagcacccagaagggaagcagcacgagtcagggagcgcctgccagtgccgatgacgcggtggcgttcaaggattccgatatgtggactgccgtgaaatgcggcaccgggtccgtttcgctggagagcaagaagaccggcgcctcgacggtggccattgtggatttgggtgaaaatgccaccaacgccaaggtgcagctgcactgggtgcgctccgaagtgccggactttgcgatgccgttctatctgtccggtggattgctggccgtgctggccgtattgtgcgcctccgtgttcgccatgccgccgcataagcgccgcaagcgcatggtggaaggcacggcaagcgccgtaattgaggaagaggcacccgccagcatcgcagtgtccgggaagccggatggtgcaagtcgacgtaatcgtcgccgccacgccacaaatcggcgttcgggccgtgcgtcctcgcaatctgaagccaccgaaacaccggttatcatcgacccaagttcacgtaacctggtcgccgaccagcagactggtgccgagagcggcgctgagaccggcttcagcgccggcgataacgaatcgacttcggtaatcacccctgacgaactgcaggcctacttctcccgcttggcccaagaggtcaataccggagacgactcggccgatgacggacaggaggaaagctgatgaacaagcgatggaacaaactgtgtgtggccgccctcgcctgcgtggcgttggtcgtgccgttgaccgcctgtgaaggccggctgccgacgccggctgctgatacctccaccaaggttgcgccggatttgaccgaggcacaggagaagaagattcgcctgaagattctcaagacgatcgatgaagccgatcaggccaagaatcccgatggatatgcggccgttatgggcgggccccagctggacattcgcatcagccagaccacgatcaaccagcgcggcggcggtatgtccaaatacgcgaccattcccaaggacatcgcccagacggtgattcccatggacgacggatggcctcgctcggtgttcaccatcacgaccaccaccgaagatcagcagtccaagcgtttgctggtcttcgatcaggaatccgcccggcagaattacaagctgatggccatggctcgactgtttgaaggggccaagctgccgaagttcgagattccgactattggctcgcagatgggcactgcaaaggatgagaagctggtggccactcccgccgatgccttgacccaatacgccgatgtgctgcagaacggctccaagagccaatacgcttccaagttcgcagacgatttgctgcgccaggaactggccaataccacggccaaggtgcaggaaggtatgcaacgcaacaacggtacgcaggagcagaaattcaccgttgtgcctgaacagatgtgggtgatgcgtgctgcagacggtgccggtgatttggtggttggccgtattaacggcgaatggactcgcaaggcgggggatggccgcgaatcgcagccggcttccgacgacgagaaggcgctgttcaatagcgacaagtacaccagcaccatgaaggtcacgtatgtgaacgtggtggccttgtacattccgttggcaagctccggtgagcaaatcaccgccgtgggtgccgaccgtcagccggtaaaggtcgaagcgctgtagttgttgccgccgcccaccgcgcggttaacgccccaccacgatatgattcatccaccacgatgtcggtaagttttacctttcgcacaatggtgccgttttgagtcacatcgtggtgggcgttttgctacgtggtgggaatttcaccgcgtagtggaagaatccctacgtggtgggaatcggcattacaatcaatgtcagcaaatgtgattgttgttgtacgcgaatcgcgtggaatcgggaggcattatggcagagcagcagttcaatccgggagtctcattggcgggcgccgtcgatttggaggcgctgaagcatcaggtcaaggccgagcccggccaggcgggtggcgctcctgccgctggtgggtacgtgatcgacaccaccgaaaacaccttccaggcaatggtgcagacttctgcgaccttcccgatcctgctgctcctgtggataccgaccgatgaccgcctgttcccgatggcccgtgcgttgggcgacgcggtgaacgccctgaacggccagattcagctctcccgtatcgatatctcgtccaatccttcgattgcccaagcgttgcaggtgcagggcgcgcccgcactgttcgcgttgattgccggccgtccgatgccactgttgcagggccttccgggtgacgacgagctcaagcaacttaccgacgaggtgattccgaagatcattcaggccgccgcgcagtctggtgtgaacggtaccgcgccgtactcgggtgatcctgattccgatgccgccaagagcgctggtgccaccggtgccggcgtgggtgctgagcaggtgccgccggagcatgccgaagcccatcgtttggccgaggagggcgattacgccggtgccgccgccgaatacgagcgcgtgctcgaatccgacccgtccgatgcactggccgcccgcgaacgtgcgaaggcgctgttgctggcccgctccgggtccgctgatgtacgtgacgtgcgtgccgctgccgccgcagcgccggacgacgtggaagcgcagttggctgtggctgatatcgacatgatcggtggccagattcaagacgctttcgaccgtttgctggactttttggccgccgggcacaaggccgatatcgagccggttcgcaagcgtctgctcgaatacttcgccatccccgaacccaccgacccgcgtctggctcgcgcccgccgtcgcctagccaccctcatgtactgattggttttggctcccctctttgaggggagctgtcaggcgtagatgactgagggaagcgcgcgaacgtacttgattgcttcccctaaaccatccgattcttcccgaaatattgctggaaccttggcccctccagcgccagttcctcctcgaaatcatccgcccacttgcagaacggacggttggcgagaccatcgttattgaatcgcgcctgatcggtgatttcggtgatgcagaatttcggaatcgtcagattggtaaccggcccggatcgttcggcctcggctacgatcagcggcgcgttcggcccgccgaacacgtccacgctccagccgtcttccgcaatccacacggaataccggttcttgatgattaccgagccgccgcgcttgatgagttcggcggcgatgcgcgtgtcgatctcgcgctcgacctcgtagcgcgtgccacccacggacgggcctttgacggtgacatacgcttccgagaaccggtcgcggtattcgtccagcacggccaccggatttacgtcggacgtcatgtcgacgtgaaccttgtgcgagaccagccgcacgcgcaaggcgtaattgtcggcatgcacgtagtagctctgaataatgagggtcggggcgtcgccgtcgtcgtattccgccggcagctcgcggcagaagaagcggcgttcgtattcgaagtcatctgtaggttccgacataacctcattgtagagccgatgatggcgattttctcgttattttggcgacgtatgtgcctcatgcagcgtgatgtggtgtacagtaaagaagttgctcgggtttgtagctcagtggatagagcgtctgtctccggaacagaaggtcgtgggttcgatccccatcaagcccaccagcatggctttcggctagccgtcggaagccttttgcatattcggcgcgtgatattaagcgcgtgcaaagctggtgctggtgctggtgctggtgctggtgctggtgctggtgctggtgtcggggtcggtgatgccggctcgcttgggtcgtggaaaaaccgcccggtttggcgagaacggtagtcgaatcgtctggaatcgtctggaatagcaaggaatagtctgttgatggccgtatgccgggcatcatgcgcgctaaacgcgacttcgctcagtagactgctacgtaatcggcattgccaatcgttgctgatcgtgcgattggtcgtagccggtggtgatgtgtaccggcgccggccgcagcaggtgggcgcccccaagatgagaaggagcacaatatgagcgaaaagatggaagccgtagccacttccgaggcgccggccgcgctgggcgcatacagccaggcggtgaaggccaatggcttcgtgttcgtatccggccagctgggcattgatccggccaccggcgaactggcgggcgagaccgctggagagcaggctgcacaggcgctgaagaatattaagcacattctcgacactgccggtaccggcattgagcatgtgtgccgcgccaccatctacctgaagaacgtcgaggacttcaaggaagtggacgcacgttacgctgaggcgttcatcggctccgtcaagcccgcccgcgtggcctttggcaacaacatgattcccaagggtgcgctcgtggagattgacgccatcgcggtggagtgattcgaacgtttccccggcggcccgtctgcgcgcatggtgtgtgcagacgggccgccgcgtattgtgcgacgcattccggggaatgtttcgctgggcgtggggtgcgaggtgtggttccgcggcacattcccgggaatgttgcgctggaatcgttgggcggtggtccgtgccacaatagagaccatggcatccaaaggaaaaccgtcgccgcgttcggccgtaagcccgctgagtgatgagcaggtcaagcgtctggccgcccgccacacgcttgtggactcgacacagtattacccgaccggccctcgcacgcccaatcagccggaaatcgacgcccagaatcccaaggccaccaaacgactgctgggaggggtgtccattgtgttccgcgccagctgcaagaccaaggcctggggcttggaacaggtgccggaaaccggaccgttcatcaccgccgccagtcatatcaccatgtttgatgtgttcgtgccgatgatgagcctgttccacatgggccgccgcccccggtacatggccaaggccgagatggcgaagtggccattgatcggcaagtggttccggttggtcggcatgcagccggtgcagcgtcattcgggcaaggccaagcagatcgaagagacctcgattgatattctgacgtccggccgcccgctgacggtctggccggaaggcaccgtgacccgcgacccgaaaaagtgggtgatgagcattaaggagggcgtgggatacatcgcccttgaatcctcgcgcagactggggcatcaggtgccgctgtacccggcggtgacgtggggtgccgcctccatcaaccactggtggccatggccgcgcaaaaacgtggtgatgtgctatgaccatgcgctcgattactccgatctgcttgccgacatggactcatggggtgaagagccgcctgccgaggccgtgaacgagctgatgtggcgcgtgctcaaacgcatgaacacagtactggaggaaattcgtggcgagcagttccccgctgaaggctactgggactaccgcagcatgagtcgtaagccttggccggaagccggcggcccgttcccggctgagaagtagccgcaccggttcccgtacggggagcctaggcgagtagcatggcacaagattgtgccgatgaagttgcgcgacaagcgaaggtaggaatctgatatgggtaaaaatataacggttctcggtgcaggagcatggggtaccgctttcggccaagtgctggcggacgccggcaacacggtgaccatgtgggccaaggagcagcggattgtcgaggacattcgcgatcgccaccacaacgccgtgcgcctgccgtccgtcgaaaagttgccggacaacatgaccgccaccggggatcgcgccgaagccgtcaagaacgcggacatcgtggttgtggccatcgccgcgcagttcgcgcgagtggcactcgtcgaattcaagggactgattcccgatcacgccatcgtcgtcagcctgatgaagggcatcgagcgtggcaccaacaagcgtatggacgaagtcgtccgcgaatcccttgacctgccggccgaccggttcgccgccatttccggaccgaacctgtccaaggaaatcgccgatcgtcatcctgccgccaccgtggtggcttgtacgaacctcgataatgccacgaaggtggccgaggcatgtaccacctcctatttcaagccgttcgtgaccaccgacgtcatcggcctggaaatgtgcggcagcctgaagaacgtgaccgcgctggccgtgggcatggcccgtggtgccggctacggtgagaacaccgcagccatgatcgaaactcgtggactggccgaactgaccgcgctgggcgcagccgctggcgccgatcccaagaccttcttcggcttggccggtgtgggtgatctcatcgccacctgtggctctccgctgtctcgtaactatacgttcggcgcgaatctcggcaagggattgacggtcgaggaggctaccaaggtcagcaacggtgtggccgaaggcgtgcccaccacggatgcggtggtggctcttggcgagcagcttgatgtgccgaccccgttggcgtatcagatgagccgcgtgctgaacgaaggcatttcctgctcggagatgcttgccggactgttcgggcacgaggttaccggcgaataacgagagaagcgacgtatacgtggcggatacgtcgtacgtgcaaagtcgtgtggcgtatacgtcgttgacgtgcgcgagtagactggtgtgcgtctcttgtgcgcggcggtccgagcgcggttcggtccggttggcggtgcaaagcataggcttgaaaacggttgtagtttcaataaaaggatggttatggccaagaagcgtgttgtggtgctctatggtgggcgtgcagacgagcattcgatttcctgcatctccactgccggtgtgctgggggccatggacactgaacggttcgagccgattccggtcggcatcaccaaggacggcaagtggatcatcaacggcgaagatcctcgtggctggaatctggatggcggcgagctgccgaccgtaaagatcaccccggaatcgcgcccggtgatgcttgacccctctcgcggccaggacggtttcttcatcggcgagcccagccgcatcaattccgccgattccggcttcggcaccagcttcgtcagcatgtccgacccggaaatgcaccatgcgctgacctcccttggccatgtggacgcggtactgccggtgctgcacggcccctatggcgaggacggcacggttcaaggcctgctggaaatgatgggtgtgccgtacgtggggtgcggagtgtttgcttccgccgcctgcatggataagcattacaccaaggtggtgctgggtgccgccggcattcccaccgcgcccggtgtgacggtcgatgcgcgcaacttcaccgccgccgatgtgcttgccaagatcgaggacgccggtcttacctatccgctgttcatcaagccttcgcgcgcaggctccagcttcggtgtgaccaaggtcgagaaagccgatgaccgcgagacccagcaggatcgtctggccgccgccatcgccaccgccggcgagcacgattggaaggtgctcgtcgaacaggggattgatggtcgcgaaatcgaatgtgccgtgctgtgcccgaaggccggtgacgagcccgaggccagctggcccggcgaaatcgtgctcgatcatcagaacgacgaccagttctacgatttcgactccaagtacatggatgcctccgccagccacgtggaagtgccggccaatctgccggtcagcgtgcttgaggacgtgcgtgacgtggcccggcgtgcgttcaaggccgtggatggtgccggcttgagccgtgtggacaccttcgtgacgcctgatggcacggtgatggtcaacgaaatcaacaccatgcccggcttcacgccgatttctatgtatcccaaggcttgggatgccaccggagtgagctacaccgaactcatcacgcgattgattgagggcgtgctgaggtaagtgtggtgcggaatcggctgccaaggaagaaggcgcgctgaacgtcatcgccttgccgcatgattggtccaactacggcgaggtcatcgagggcttcaagaagaagtacccggagatcaagatcaccgagctgaacccgaacgcctcctccaaggaggagatcgacgccgccaagaccaacaagggtaccgacgccgcccccgatgtcttcgacgtcggccaggccatcgccgccacctccaccgactacttcgccccgtacaaggtgcaggcctgggacaagatccctgatgctgccaagaacgtcgacggcgcctactacgccgactacaccggcatcatgtccgtgggctggaacgccgacaagtacggcgatgtcgcctccctgaacgacctgctcgatccgaagttcgccggcaccgtgtccctgaacggcaagcctaccgaggccggcgcggccttcaacggctatctgatggtcaaccagctcgccggcggcgacatcaacaacctgcagcccggtctcgacttcttcaagaagctcaaggaagccggcaacctgaacaccatcgatgtgaccaacggcaccatcgactccggccagaccggcgtggtcttcgactggacctacaaccaggcctcctacaagaaggaactcaagtccaagggcgtgaactggaagtacaagaccttccccaaagcccaggtcgtcagctactacaaccaggccatcaacaaggacgcgccgcaccccgccgccgcacgcctgtgggaggaatacctgtacaccgccgaaacccagaacctgtggttcaagggcggcgccaacccggtgctgctcgactccatgaaggccgacggcaccgtcgaccaggccaccctgaaggacgccatcaccatcgaaggccagccggtcacctacagcaacgatgactccacccgcatcaccgagtggcttcaaaacaactgggacaagacgatcggcaactgagagtccacgatgaccgccgcaatcgcacccatcgcaccggacggacccgccgcctccaaggccgcgggtccgtccgccgcaacgacccccgcttcgtccgcactggcgaagcaccgtcaggagcttggcacgctcaccaccacgctcccgttcttcgcctacaccgcctgcttcctgctggcacccaccgtgatcgtgatcatcggcgcgttccaggatcgcagcggcggtttcacgcttgcgaacttccacaagatgttcgaagccaacaccatcgccgcgttcggcacgtcaatcctggtgtccgtggcctcatccctgatcggtgccgtggtgggcgcgctcgcctcctacgcgctggtgatcggcgccaagccgaacggaccgctgcgccgtatggtcgccgccatctcatcggtgctcgcccagttcggcggcgtgatgctcgcgttcgcgttcatcgccactcttggcatcaacggcatcggcaccatgctcatcaaaaccctgactggctataccgtgaacccgaattggctcagctccctgccggggctggtgaccgtctactgctacttccagattccgctgatgatcatcatcttcctgcctgcggtcgattccattcgtccacagtggcgcgaagcctgcgagtcgctcggcggcaacaccgtccaatactggacgcgcgtggcctgcccgatcctcgcaccccgcttcatctcggcgttcctgctgttgttcgcctccgcgttctccgcctatgcgaccgccgccgccctgttctcccagcgttcgatcctggtgccgctcatgatccagggtgccatgcgcaatgagatggaccccaaccagcagggcttcgcgcaggtgctggcattcgcaatgatcatcgtcgtggccatcgtcatgctgctgagccacgccgtggaaaagagggccggacgttggcaatgaccgaaacttccacaaccaagccgccgcagctgcgtgccgcccgcgtgcgcaaacagagcatcatcaaattcgtgatcctgttcgtcaccctggcgttcctgttcgtgccgctgctggccatgttcatcttcaccctgcgtcacccgttgtccggtcgctggtcggccgcgccgtggacggcgattttcaccggcaacggcgaatcgttgggcgccgatctgagcgtgctatggcagggcgtcggcatctcgctgtcgttgagcgccgtcaccgtcgtgatcatgctcatcctgctggtgcccaccatggtcatcgtgcatattcgctccaaagccttggagcgtgcaatcgaatgggtggccacgctgccgctgaccattccggccatcgtgctggtggtgggtcttgggccgatctaccgttggctttccgccgacgtgttgagcaccaacccgatctggctgtgcttcgcctatgtgattctcgtgatgccgttcgccttccgcgcgatcgccgtgggcctcaactccatcgacgtcaagacgttggtcgaagcctcccgatcgctcggcgcctcctggcccaaagtgttcttcaaggtgatcatcccgaacctgtggcagtcgatcctctcggcatccttcatctccatcgccgtggtactcggtgaatacaccgtcgcctcgctgctcggccgtatgaacctgcaggtcgcgctctaccagctcggccaatccaatgcccaaatttccaccgccatgtcgctgctggctctgctcttcggcgtggtgctcctcgttgcgctcgacctgatctccgacgcaatgcgtaagtcaagggaaggtaagtgacccgatgaacaacgattcaactcccacccgtcaggaaaccggtaccgcagtggacgccgccccggcgtccccggccattccggcagccgtgtcctccactgccgaggacgccttcaagaacgatcccaccgctaccctcgagggcgtgcgcggcaaggacgtgaccaaggccgccaaggccctgctcaaagacaccgccaagcgcggcggtggttccattcagatgcagaacgtcgtcaagatctatcccggctccaccgttcacgcgctcgacgacttcaacctggacatcaagcccggcgaaatggtcgtgctgctcggtggatccggttgcggcaagtccaccgcgctgcgatcgcttgccggtctcgaagacatccaaggcggacgcatcatggtcggcggacaggatgtcaccggtgtgccggtgaacaagcgcgagatggccatggtgttccaggcgtactcgctgttcccgcacatgaccgccctggagaacgtggaattcggcctcgaagtgcgcggcatgggcaaggccgaacgccgcaagatcgccatggaacagctggagctcgtggggcttgccgatcaggccaagaagtacacgcagcagatgtccggcggccagcagcagcgcgtggccctgtcccgggcgctggccatcaagccgcgcgtgctcctgctcgacgagccgttgtccgcgctcgacgccaaagtgcgcgtccagctgcgtgaccagattcgccgcatccaactcaccaccggcaccacaaccgtcttcgtgacccacgatcaggaagaggcgctggccgtggccgaccgcatcggcgtgatgaacaagggcaagatcgagcagatcgccgccccgcaggacctgtaccagcgccctgccaccgagtacgtggccacgttcattggactcaccaaccgcctgctcggcgcatccaatggcgacgaggccgtggtcttcggccagcgcgtgccgctgctcgccggctccgccacgggcgattccgtggccgtgctcgtgcgcccggagaacctgatgctggccttggctggcagcagcgattcgcacgtcggcgaacgcgcccgcgtggaggtcattcacttccttggctctttggttcgtgtggacacggtcatcacctccggcgaataccagcgctggaacaaaggtgaacagctcaaggccaccgtgcagctgcccgccagcgagctgccggccggtctggcggtgggcgatgacgtgattgtcgccccgcgtccggtcgccgcgctcgcctgctgaatggcgttgcgatgatcgtgcggttctgttctgttttgtgactgtacgatcgtcgaatggcttatcggcaatgatatgtgtgggacggcggcgatttttgggcgattatcgcgtgccgtcccacgccggtgtgggatggcatgaacgtcaaacgatgtacattcgtgccgtcccacagaatgtattgaggaatcgttgcaatgacgccatttcttcgtgcggcgtcatcagtcatatgtggagtggtgtgggccgccgcgaaaaaatcgggcaaaatcgcgtgccgtcccacaacaatcccgcagagtagaggactctctcggcatggggattgattgacgtagatcattccttgcccattgatgattttccccattcccaatgcaatcgaaacgccgtgccgtattcttgaagagtattgcacgtgtgatcggtccgtttgcggccagtgactatgggggataagtatgagcgaaccaatgccgtcggcgcagcagccgcaacaaaccccacgcgattggtggttcacggcccatcgccggttttcgacaatcggctcggcgctcgccattatgatggtgttctggatcgggctgaatattctggccactgaagcactacgaacgctgcttggcgccgatgtgcccgcttgggctgtgctgctcgcctcctccgggccgctgtatgtggtggccatgccgctgagtatgttggccttcactcgcgtaccggttattcgcacccggcagtaccccatgaaggcgggggagttcattcggattttcgtcatgtgcattccggtaatgctcttgggcaatatgatcggcaatatattgtctgccggagccactgatggtcaggccaccaatcgcatcaacgacgtgattcttggcagcgactggcgggtgaacgcattgttcataggcctgttggcaccggtttgcgaagaatggatttttcgcaaggagattatctcccgcctgcgccggtacggagaaaagaccgcaatcatgttctccgcattggcgttcgcgctattccatatgaacgtgttccagttcttctacgcctttggcctaggactgatgttcggatatgtatacacacgcacctcccgcctgcggtattcagtggctatgcacatgctgatcaacctgaacggggcagtgctcgccccattggtgatacaacagatcgatccccgcatcctcgacggcacaatcagcgaggccgaaatcatgcgtatggctgaaaccggcaacatgggcggcatgggcatcatgatgttgtacggcacagtgatgttgggcctctgcattgccggtatcgtgctgcttatcaccaagcgcaagaactgggagttctatcttgcgccagaggagttgcctgcggggcttaaaatacgcaccgcctatgccaatcccggcgttatctcgtacctactgttgactgtgattcttaccggttggatgctgttcgcatgactgtcatagccggacccagagaggcgagccgggagatatcacagattgtctgacgagccgccatcttcaacaaggtatttagtgcccgaaccggcgatggcgcgcgcggccatatctttgatggtggagggcagcacaccctcgcgcgcgaacacaagcacttggccggtcatgccgtaaggggagaagccggtgaacttgaccagcggtggctggccctccagtgccacgtcggcggtggctttggttacgcggtcgagaatatcctgactgatagcggacgggtcgccggaggccttggccgtgaattcgagcgtggccatgccttcgctggccggcgtgagcttggtcaaggcggccgtattgagcaccgaattgggaatgaccatcatgtccccggagcgggtgcgcaccacggtctgtcgccaggtgatgtcatgcacggtacctgtgacgccttgaatggtcaccagatcgccgggttggattacgcggcccagcatcaggccgaagccgccgatgatgttggcgatcgtatccttcagacccagcgagatcgccacgcctccgacgccgagggcggtgaccagggtggtcggattgatgccgaacaccggttgcagcaccatcgccgtaccggtgacccagatggtcacgcgcgtgagattcacgaaaatcgaggcgctgggaatctgcgaactatccagaaccctgcgcagcacgcggctgatcacgcggtcggccgcgaacacgacggccagcacgacggccagccagatgagtttgccggcgttcacctgaaaccagcgtgcgatgtcttgtgcatattcggtcatatgccctactgtatcgaccatttctggtgaagtcgtaaacatgcgggcccacgtcgggttttggccgttgcggtggtgccgatggtgcgataccggtggcgtgccgtcggcaccaccggcaccaccgcggcaccgcggtgcagcatcgtcgtggtgatgacgtcgccgtgacgcctagtcccggtgctcgcggcaggtctggccgaggccacgggccagacgaatcggatcgagaatctcgtccagctgctcggcgggcaggtcggtgcgttcgccggccacctcgcgcacggtacggccggtgtgcacggcttcggcggcgatgtcggccgcgtgctcgtagccgatgtaatggttgagcgcggcggaaatcgacggtgaggactgggcatatgaacgccccaggtcagcattgatttcgatgccttccacgcagttgacgcggaacgtctccatggcgcgcgtcagcaacgccatgccggtcaacagctcgtgcaccatcaccgggtcgaaggcgttcagctgcaactggccctcggccacagcccagttcacagtcacgtccatgccgaagatc

SEQ ID NO: 1728 - DNA, 15272 bp, Unknown
  MAG_14  MAG No. k141_19182
ccaccatcgaagagacgatgaccacgctgtccgatcagggcgaatgcgcgcagcgtctggtgcagatggcactgcgggcaggcagcaccgataatgtcacggccgttattgcggatgccacgttggcgttggatgccgatgcgttcgatctgccgcaccaaacgccgttggtcggcggtgccgccagccgtaatcttgagccgatcgccgacatcgtcaacgagccggtggctaccgcgcccgcgctgcgtgaggatgattcccccgcccagcgcgccgcagcattgattcagcccgccagcgcgcacgagacggaggccgcgcaaacggccgaaccgtcgtccacacgcgtggtgcagccgtccaccgtccgcgaggagaccggtgaacgagccaatcccgataccggtgagattccggtggtgcaaaagccggatgggcgcctgtccgccgaccccaacgacccggatgtggccaaagccatccgcgatgagcaggtcgagcagaagaaggccacgcgcaccaagaagcgccgcaataagcttgcggtgattattacctgcattcttgccgtgctggccttggccggcgctggctggggcgtgtacacgtggagccagacgcactactacgtgggagatagcaacggcaccgtggccatttatcgtggcgtgccgaccaatctctttggacttgagctttcgcacgaagtgcagaccaccaatatcgccaccgcggacctgcctcagacatggcgtgaccagctgagccaaggcatcacagtcggttcgttggacgaagcgcagtcgcatgtgggtatcatccgcaccgaaatgcgcaaactggccaagcagcaggaagccgacgccgccaagaaggccgaggcgtccaattccctggacagttccaaagacagttcccagagcgattccaaggacagcaccaaggattcgtccagccagtccggttcgtcaagctcatctgattcctcggataaatccggtatcggagcggccgacaacgcggccacgggggattctcaatgatcgctacccgtctacgtcagatttccttgttgctgattgccatggcgatcagcgcgttggcgttcatccagatgttccagcgcaccgccggcgaattccctatgcaatacgccggcatgctggcattggtcgtagtgctgtttctggtgctgtgggggctgattgtgcgcttccagccgtacgccagccagtcgattctgccttgcgtgctactgctgaccgccaccggcgtgaccatgatcgcccgcatcgaccagagcgaaggttgggcgattgcccaacgtcagctgatctggctgtgcatcgccatcgtgctttccgcgctgctcatcatcttcctgaaggactaccgcgtgctacgacgcttctcctatgtgtcgatggtggtgggcctggtgctgctgctcgccccgatgctgccgttcatcggcatggaggtgaacggcgcgcgcatctggatcaggattccgggattgggccagttccagccgggcgagttcgccaaactgttcctcgcgttcttcttcgctgcctacctgttcgatcatcgcgaccagctggccgtgggcggtaagaagatgctcggtctgcagctgccgcgtatcaaggatctcggcccgatcatcgtggtgtggatcgcctcgatgggcgtgctcgtcatgcagcatgatctgggcacctcgcttatgttcttcgccatgttcgtggccatgctgtacacggccaccggccgtaaaagctggatcatcatcggtctgatcgcgttcgccgcgggtgccgtgctggccgcaggcatgttcagccacgtgggtcagcgcatcgacgcctggctgcacccgttcagcaacgagcaatacaacaagacccccggcggctcctggcagctggtcaccggcattttcggcctggcatcaggcggcatgctcggcaccggtctcggccaaggccatccttcgctcgttacgttcgcgaactccgatttcatctacgcctctctgggcgaggaactcggtctgatgggcgtcctggccattttgatgctctacctgctcatcattgcctccggcttcatcaccgccatgaaaatcaaggatggcttcggcaagctgctcgcttccggactggtgttcaccatggccttccaagtgttcaccgtggtcggcggcatcacgctggtgattcctctgaccggtctgaccctgccctatatggcggccggcggctccagtctgatcgccaactatattctcgcgaccctgctcatcatcatctcgaactcggccaatgcgcccgagccggagctgacctcggatacgttccagtacgaggctttggccgtgctgcgcaacaaggaacttgaggcccgagcccgcgccactgagccgatcgttcagcctcgcagcgcgtcggctacggcgtcgcagtccgaggcggaatcgtttgacgaccccattgtggacatcaccaagcacgcgccagacacacttgaggcacccgaagtgcccgcaattgtgacctctgcgggctctgctgcggcccccatcgccgagcccattgtggatgccaccactccggcgtatgccggcgccgatgaaccgtacacgcctaccggtacgattcccccgcttcctcccgttaacggaggcactcgcgtatgaacaaatatcttcgtcagcttttcaccgccgtggtcgcgctgttcgtgattctcggcctgtcgtccaccatcatcatggcggtacgggccaacgcgctgaacaacgatccgcgcaacgcccgttcgctgtaccaccagctcggtgcctaccgcggtgccattctggcctcggacggcacggtcatggccaaatccgaaccggtcaacgacgcgttcaaatacctgcgcacctattccaacggtccgctgtatgctccggtcaccggcttcttctccatcaaccagaccgccgatcgcggcctggaagcctcccgcagcatgctgctcaacggtgaggccgattcattgatctggcagcgggccaaggccatgctcaccggcactacgaatcagggcgcgtccatcgaaacctccatcgaccccaagctgcagcaggttgcctacgatcagctcggtacgcgcgatggtgcggcggtggccatcgaagtcaacaccggccgtatcctcgccatggtgagcacgcccagctacgatccgaacaaactggcgacccatgacgccaaagccgcgtctcagtcctacaacgaactctctgcgggccaaaatagcccgctaatcaaccgcgccacctcgcagctgtacccgccagggtccacgttcaagaccatcgtcgcctcggctgcgctggaaaccggcgattatcagacggacacgaagattcctgcaggctccagctataccttgccgggaaccgccacacagctgccgaacgacgaggcacagggcgatggcgtcaacggacagatctccctgcaagaggccgtcgcatggtcgtccaacaccgctttcgcccagcttggcgtgaaactcggcgcgagcaaggtttcggacatggccaccaagctcgggttcggcagcaccatcaccattgacggcaccgaatccacgggcaccccgatgacggccaccgcgtccacattcccctctgatccgaccgacgacaagcttgcgctggcatccatcggccaaggcgacaccacggccacgccgttgcagatggcgatggtcgcgcaggcaatcgccaacaatggcaaactgatgcagcccacgctggtcgatcgtgtgcgcgccgccgatctcaccgtactttcgcagaccaaaccgcaaaccatggccaacgcgttcagcaaggattccgcagacaagctcaccacgatgatggagagcgtggtgaccgaggccaatccgcagctggccatcgacggcatcaaggtggcggccaaaaccggtaccgcacaaatcggtaccgacaactctgccatcgacggctgggtgatcggtttcgcgccggcggacaatccgcaaatcgccgtcgcggtgttggtgcataacacagatgtatacggttcgctcgccgctggcccgatcatgcgcgcgatgatgcaggaggctttgcagcagtgaaacttatcgaaggacagcttattcaccgccgatatcgtcttgattcgcgtcttgcgcaaggcggtatgggcgaggtctggaaaggctacgatattcagctcggccgtgaagtggccatcaaggcgctgcgctcggacgtgaccaacgccgaggccaagctgcgccgcctgcgtgccgaagcccataattccgccaatctggcgcacccgaacatcgctgcgttgttcgaatactacgagcatgacggcatcggctttctgattatggaatacgtcccctcgaaatcgttggcggatctgttccatagcaagggcgcgatggatcccatcgaactgctgcccattctgattcagaccgcgcgaggcctattcgtggcccactcgcacggcgtgattcatcgtgacgtcaagccggccaacatcatggtttccgacaccggcgaagtgaagatcaccgatttcggcgtgagctactccaccggccaaggccagatcacccaggacggcatggtggtgggcaccgcacaatacatctcccccgagcaggcgcagggccagcaggccacgccgcaatcggacatctattcactgggcgtagtggcgtacgagggccttgccgggcatcgtccgttcaccggcaccactccggtcgatatcgccgcagcgcacgtgaacaatcccgtgcctccgctgccgaactcggtggacgtccagttacgcgaatttgtcatgtcgatgctggccaaggacccgttggatcgcccgaaagacgcgctggtggtgtcccgtacgctggcacgcatcgaacgccgtctgctggatcagcagaccgaaatggccgacaccaccatggccacgtccggcaatcgactgccgcgccgagtgaccagcacgccacgcattgttttggaggccccggcctcaagattgggagggaataagcaatgagcaccagtatgcccaccgcattggccggcggacgctaccagcttggccagctcatcggtcgtggcggcatggccgaggtccacgtggctcttgacacccgtctgggccgtaccgtggccgtgaaaatcatgcgcgccgatctggccaacgacgacatcttcctggcccgtttccgccgcgaagcacacgccgtggcccagatgaacaacccgaacatcgtgaacatctacgattcgggcgaagaactggtttcttccgaaagcggcgataccgagcgtttgccgtacatcgtcatggaatacgtcaagggccagaccctgcgcgacatcatcaaggtcaacggcgcactcagccagcgcgactgcgaacaggtgatgttgggcgtgcttaacgcgctcgactattcgcatcgcatgggcattatccaccgcgatatcaagcccggcaacatcatgatttccgagcagggcgcggtcaaggtcatggacttcggcatcgcccgcgctctggacgattccgcaaccaccatgacccagtcgcagggcgtggtgggcaccgcacagtacctttctcccgagcaggcgcgcggcgagaccgtcgacatgcgttccgacctgtattccgccggctgcgtgctctacgagatgcttaccgggcgcccgccgtttaccggcgattccgctgtggccatcgcctaccagcatgtctccgaagtcgccacgccgccatccgccgtggtgccggggctgccgaagatgtgggattcaatctgcgccaaagccatggccaaggaccgccagaaccgctacgccacggcctccgaattcaagaccgacatcctgacctacatgaacggcggcgtgccggtggcggccgcgttcaacccattgacggacctgtcgaatatgaaggcccgcaaggaagccgaacgtgatttgcccaccacgccggtggaaccgcagcagcagcccacccaggcattcaacccggtgaccggtcagttcgagcagattccaccggccaatggtgccaactcagcggcgttgcagtcccgtgcgcagcagcgtgcggcggcggccaaggccaagaagcgcaagaagatcatcatcggttcggcgatcgcggcgattgtcgcggtgctcgtcattgtgggcatcatgttcgccatgaacggctccggcaacaagtcctctgaagacaccgtcaccatccctgaagtgtgcaacgcttccacgtccaaggacaacatcaagctcaagcttgagagattgggcttgaagatgaccgaaaagcaagacaccgactccaccgagccggaaggcacctgcaccaagatgagcccggacgccggctccaaggtggccaggggatctgccgtgaaggtgtggttctccgcaggcccgcagtccactcaggttccggatgtcaaggagcgcagccaggaagaggcgcgcagcattctggaaagcgccgggttcaaggtgaacgccaccgtcaaaaccgaagacagcgccgacatcgccaaggatatggtgacgagaaccgatcctgccgccggtcagtcggttcccaagggcaccaccatcaccatatatgtttcttccggcatgaccaccgtaccgagcaatttggtcggtcagtcgaaggacagcgtgctacagcagtatgagggcaagttcagcttcaccgtggagcaggaaagctccgatacggtggaggccggtctgattacccgcgtaagccccgattcgggctcttccatcgcgcagggcgggtccatcaccatctgggtgtccacgggcaaggaaaaggtcgctgtaccgaatatcaccgctggcactgactacgccaccgccgaactcatgctcaaggccgtgggcctcaaggctcaggccagtggcccaaccgacagcaccgctgtggtagtcagcatcaatcctggcgctggcagccaagtagatgcgggatcgaccgtcaccattaccacgaaggccggcagcaccggaggcgacaccggtaccggagacggtggcaacggcaacggtgccaacaacggcaacggggggcggaacccgtgagtgagtgagcgccgggcgtgtgtgttgcgcatacgcaacgcacatagcgcaacacatgcgcaacacatgcgcaacgtaaacacgcaacgcaatcacacaacgcaaaggggaggggcttctgcacccctcccctttgctgtataaagagctatcccagcgcaacattcccgggaaagcgtcgccgcgcgcggaaaagctacttcgtaaccttgggctgaaggccggcggacttggccacggcgttgtcttggccgcagaccttaagccagttggccagcagacggtagccgtcctgggtcatcacggattcgggatggaattgcacggcgtacatcggcttgcccttgaccttgatgccctgaataatgtggtcgccctgcgtccacgcggtaaccaccagcgtatccggcaccgaatcgggctcgacggccaacgaatggtagcgggtggcggtcatggggttggccacgccctcgaaaatctcgtcatcgatatgttccaccaagctggtcttgccatgcatgatggtgggcgcatggcccacagtgcagccatacacctcggcgagcgcctgcaagcccaggcacacaccaaacatcggcacgccgctggccgcgcacaggcgaatcatatcctcactggcaccggattcggccggagcgccagggccgggagaaatcagcacgccatcgtaaccgtccagtacacccggcgcggctgggtcgatagcgtcgttacgcaccacatcaacagtggcgccaagggtttgcagatagcctacgatcgtgtagacgaaggaatcgtagttatccaccaccaaaatatgcgcggaatcggtcatagggctctccttgagggacgtgtactgcaagccatagtactaggctgccgtcagctcactgccacgaagttcgacatctgctgtaggaatgggatattggcggcggcccaagggaatccccactggaacagcgccgcggcggctgcgaacaacagcagagccagcagcagccatcgaatcggtgccacgccgggctgcagacgcaacagtccgccatagatgctggcatccgggcggcgacgctcacccgcgcgaatctcgcgcagcaccggccagcgccatgccaccgcagcggcgatgaacagaaccagccacactaccagcgcgccgaataccaccttgtccagcgagccaatgcgggaagcgatcgagggggtttcggtggtggagaacttcactgcaccggacgaatcagtagtagccagctctttgggcacgccatcagacactttggcccagtacgccaactcaccatagctgatccatcgatgggtgggggtggagtatttcggctcacaggtagtcagtgtgatcatgcgtttggtgggattggcagtggagtcttccggattgggcgcgatcacatacacgtccgtgggcagcacaatctcgtaccgggtgtagtggtagacgtaccagtaatccttggtacgaacgatgatgggatcgccttcctgcaacttgtccacatcgcccaacggctgcccgtagccgttgcggtggccggcgacggcgaagttgccgacctgccccggcatctgggtggtgtcgtaatggcccagaccgtggcgattgagctgctcgagcgtggtgccttccacgatgttgcgatgccattgggagccgaagcgcggaatgtagatctgcgcaatcaagtcgccatatttcgcgtctttcggctgtactggagcatcgccctcctgggctttggcgatggtgaccgttcccccgttgttgctggggtcgctccagtcgacggactgggtggtttcgttctgggctcgctccgcctcgacaccggtccaccacatctgccagacgatgtacagggcgcaaatcacggcagcggtaatcagcagttcggcgcagatgccgagtgcctgccagatcaagctccgctggggcgaagacgcgccgcgtactgcggcacgacgggaccttgccctgctggcattggccgggtctgccgccattcgtgcggcgtcgtcctcggggaagggctgtacgtccgacacggacgcgagatcaatgggcgccggtgcgccgctgttgtgcctgccgtgtctcattgctgagtctgctcctcatctgtggtctttgacgtatcgaccgtggcatatttcaactgctgcagcaaggcggcggtagcggggaactgaaggccctcggcattctccaccttgtagccaatgccaaacgcggtcacatattgcttaagaatggtaatggcttcggagtcgttcaacgctgcgcgaagtctttgcgggtcaccaatcgcggaaatggtgaatggcggcgagtatttcttaccgtgcaacgacagcacgttgccggaacagatgaccgccgaattgaacagcacccgctgatccataatcatcagcgcatcggcaccgccggcccacaaggcattcaccaccgattcgacgtcctgctgatgaatcacgtaatcgttgatattggcggtcgtgccattgttgttgacggcgttctcccataacggagaatcatccagcgttaccgttacgccgctgccgctgagcgcgggcagcatcagactggaatccacattgctggagtccttgccttggttctgcgtgctgtcagtaccgtcggtgccatcggccttgagcgcgtccgtaagattggcgacctgttcggtcagatcgctgacgtcctgctgcagctggttggcctcgtccacgccttgctccaccagatcggccgtatcgttggtggcggcaaccgtacgattgaccctcacgttggtgctcagcagaaaaccggtcaaggcaatgacgacgaataccgcgacaccaccccatagggagtgccgtgcgccgtgcttacctacatgtctggccatgaatttcctgtcttcttgccgactctggtcgccgctttcgagtgtagccactattatgacttttagcctattgaatggagactatgctgatggctgacgaagagctgcacgagaccgactcgaacaaccagaaggactggcagagcgagacctcatccagcaccgctgctgacgagaccgccaacaaagacaccgagcagaacgcagagaacgcttctgctgaggaagacgcggcttacggcgtgaatatggagcaggtgcaggccgtgctcaacgccactgccgataaggccacgctgaccccgcagatgcagcgcatgatgaaccgtcaggcggagaacaccaagcgtgttgaagaaaccattaagggcaccaagtcgaacccgcgttggttcgtgccgctgttctgcgcgtttatgatcatcggcctgatttggtgtgtggtgtactacctctccccgtccggctcctggccgattccgaacatcggcgcgtggaacctgggcatcggcttcgccctgatcatgatcggattcctgatgacgatgggatggcgctgagttccgactcgttgcgcttatctatcggtagatcgtttttctatcgttaggttgttcttagttcttatgcgaaaggccgacctcccgtatgcggaggccggcctttttcgtgccttcacctgttcatccacagctatccaccacttatccacgacttatccacgacttatccactacgttatccacagcctgtggatgaatcacacccatgtagttttccaccgaatgtggaaaaccatgtggataagtggtggataagcggcgtttctcggtgtatatctcgtgcataactttggcttggcatatatcgccacagcgagggaacagttatacacccgagttatccactgcaacaaacccagtaataccgcggcattcctaacttatccacataagttatccacagtcttatgcacttttctacacacttgtgcacaagtcaccattgtggataactcgttatcgtggataactcgtcattgcgcgcatctcattactgtggatatcttcattactgtggataccttcatacagcgcatgcccactcaccgaatgacgatatccacatcgctaatatccacatcgccgctttccgtacatacactgatgccgggcactgcatgttccgcaatacccggcatcaatcgttttttacagccgtatcaagccatatcagtgcagggagccgaaactcatccacccgtaaggattggccatattgcacaacagaatcaacacaatgaccagtaccaccatggcccagccgtaaacctgcatacgccatttcaggcttttacctcgccacgccggcacaccacccaccagcagccatgtgagtattccacccactacaaagccgccgacatgcgcctgccacgccacgcccccgaccacgaacggcaaggcgaagttcaccgccatccagatcaacatggagcggatatcggcgccgatacggcgatataccaccagcaatgatgcaaacaggccaaataaggctccagaagccccataggctgccatctgccagccgatgcctcccggagccaccgcagcccacaccataagtcccagagagccgccaaggccggaaatcacatacagtcccaagaaccgccagtggccgatcattcgttccagcactgggcccacggaatacagggcgatcatgttgaacaggatatgcaatagcgagttcggcgcatgcaggaacatcgaggtgatgagcgtccacggctcagccaccagtctgaccggagccgccatgccgaggtacatcaaccaagccctcaggcccggggcaataaatcccagcaatacctccagtagccacactgccacgcacgcaccaatcagcgcccaggtcatcaccggaccaccgcgctcccactggtatcgaatctcccgttgtgtaggaatatgcatgcaatccactgtatcgaaggtctcggatgcgtttcacgcgccgcgaagatgctgagccgaccgagggcatgcgggcgtggatgaatcgcccacgaatgtcattccacccaatcgtcacaaacagcggcctagaatagggagcagagtcggtctgaatgggcataccgaccagacgatccctagggaaaggagccgtcatggagaacaagtcttctaacggttggaagttcttcgcgctgctgttcggcggattgctcgccgcgcttgttggcttgtacatctacaagcagcagaacccagattacgatccgtgggaggagccgtgggagaacagctcctcgccggtcgacctgggtctgaacaaggccgaggatgaggccgatggcgaggcggaagccgccccggccgaagcctgatagggcggtctttcaacgcaagaagccccgcaaccgatggatgtcggttgcggggcttcttatgttctggttcccctctccgaggggagccgccccaccgactcagtcagccagaggagcagtgtgccagatatgcggagccgttaagcgggaagcccggcgggcttcccgtaggcgacgccgagcggcgacagccgcgaggtagaaaccagcacgtagccggcgcgctgctccggcggccgtcaggccagaggagcagtgtgccagatacgttccaaatagtcttccatggagcggtcggagctgaagtagccggagttggccacgttgagcagggccttgcggttccattcgagctcatcggcgtagagggcttcgatctcggactggatgtccatgtaggcggagaagtcggccagggtcatgaaccaatccttggtcagccagtcggccacgagcggggagtaggcgttgcggtcgccgttggagaaggtgccgtcggccaccagatcgatggcctgcttcaggcgcggatcggcctcgtagtaggaggcgggattgtagccctcggcgtacttcttctcgacctcgtcgacggtcatgccgaacaggaagaagttctcggcgccgacgcgctcacggatctcgacgttcgcgccgtccagcgtacccacggtcagggcgccgttcagagcgaacttcatgttgccggtaccggaagcttccttgccggcctgggagatctgctcgtcaagctcggtggccgggatgaggttctgagccatctcgacgttgtagttcggcagcatgtggacggcgagcttgcccttgacggccggatcgctgctgatcacgcgggaaacgttgttgatcagctcgatggtcatcttggccaggtagtagcccggagcggccttggcaccgaagaacacggtgcgcggagtgatgtcctcggccttgaccttgccggacttgatgtcggcgtagttggagatcacggcgagaatcttcagagactggcgcttgtactcgtgcagacgcttgaccatggtgttgaacagggtgttctcgtcgatatcgatgccgtagtggtccttggcgaagcccacgaatgcgtgcttgttggccttcttgacggcggcgaacttcttgacgaactcatcgtccttggccagcggctcgaggcccttgagcagttccagatcggcgacccacttgtcggtgcccaggccctcggtgatgaggtcggacaggcgcgggttggcgagcttgacgaagcgacgcggggtcacgccgttggtcacgttggtgaacttgtccgggtagacgtcggagaagttcttcagggtgacgtccttgagcagctgggagtgcagctcggcaacgccgttgacgtgggagccgccgtaggtggccaggtaggccatgcgcacggcgtcgccagtgtagatggccatgtccttgatggtgtcggcggcaacgcccttggccttgagctcggcctcgaactgcgcgttgatcttctcgatgatctcaaggtgacgcggcagcagctcgccgatcaggctggccggccagacctcaagggcctccggcagcagggtgtggcaggtgtagttgaaggtcttggtggtgatggaccacgcggtatcccagtcgtagccgtactcatcgatgaggatgcgcatgagctcggggatgccgatcaccgggtgggtgtcgttgagctggaagacgatcttgttcgggaaggtcgtcaggtccggcttgtcctgccccgggtagaagacgcggatggcgtcgtgcagggatgcggagacgaagaagtactgctgctcgaggcgcagttccttaccgaccttggtggagtcttccgggtagagaatcttggagatgttctcggccttgacctgcggggccacggcgtccatgtactcggaacggttgaaggcgagcagatcgaactcgtcgtagctcttggcggtccacaggcgcagggtgttcacacgctgggacttgtagccgggaaccatgtagtccaccggcacggcgcgcacggaccaggccggttcccaggtcttggtgccgtcggcgttttcgacgaccttgccaccgaaggagaccttctgatcacggttgtagtcgacgtgcccccacggctcttcgttggccagccagtagtccggggtttcgacctgcttgccgttctcgtcgaacttctgcttgaagatgccgtacttgtactggatgccgtaaccgaaggccggcacaccgagggaggcgagagagtcgatgaagcaggcggccagacgaccaaggccaccgttgccaaggcccggctcgtattcggcgtccacgatgtccttcggcttgaagccaagggcttccacagccttgtcgaactggtcggtcaggccagcgttcagcagtgcgttctccagctgcttacccatcaagaactcggcggacaggtagccgacggccttggtgttgccgttgacggtgtcggcctgggtcttgaaccaggagtcggcaaggtggttgcgcacggccttggatgcggcgacatacacgtcagcaggggtggcctgctcggcggtgacgttttgagtgtatttcagttgttcacgaatctcgtcggcgaattgttccgccgtgacaggagacttcggtgcggtgatttcggtcattctgactttccttccgggataagtgcccgtgtttattatgccgcgcgataggtatcgtcgca

SEQ ID NO: 1729 - DNA, 10064 bp, Unknown
  MAG_14  MAG No. k141_19698
cgaccctgtgaccggcgaacccgtcgaacccgatctcatggcccttctgagggatggctgcttcgacttcgacaggagccgcgagacgccggaatggcagggcttctggaggtcggagcacggcatggtggaccgcgacgcatcggggctcgtccgcagatggacgccggggcacgggttgggcgcggagctggtgtcgcccgccaaacgcggggcgtggttcgatgtgcccgacgccagcttggcgaaactcgccgggcaggagtgccgggtatgatgaaaccgacccgcggcaaagggcaatgcaagctgaggccgtgggtcgcttcacccccatagccaattgtcatatacgggtttggctacctttggcaggctccggtccaaaccgctgattagcatggcttcaaaccgttgaaataaagccattcctgaagtccggtcaaatcactgtcgcacagcgtacattatcggttaatagtatgtggtgattttagccgaaccagtagtatctagctgcggattagcctcgccgcagagaatcggctacttcgcaacatcatccttattccggtgagaagcaacgcccaaacgcttgtccatttcggtttctgaagcgttgcgtgcctgcagatacatggcgacaagttccaacagcaccagcacgaatatgatgattgcaccgggcaattgcgcgtggtcgtagaacgcgagcatgcgagcatccatcaaatccgctgtaaacgtcaacacgggaaacggaatcagcgccgccgcaaacgacatgaaatgcgttttcaccatcgaccagtcgaccggatcgaccggcggtcgccggcgtttcggcgtgaacagatggcctcggctgaccgttatagtgatgatggacacagcaaagatgacggcgaccatccacagaacgcccggcaacaatccgacaacaatcccgttcacccggtcctccaatcagtcataataatcaccgcaacatataaaaacataagatggcaggcaacaaaagcaacacatacaacaaagcgacctgccgaccaaagccggcaggtcgccaacaaccatacatgtatcaggcggttgcgcgttgcaagcgctgtgcctcgagcttcttgcgcatcctcatggcagtcagttcatcaatcggacggcccgtggcaatcgtcagcggcttagcctcaagatcaatatattcttcctgttccaaggccgtctcaatctggtgccacaacgaacccaccgacacggcgaacactgccttaccgctttgcaacagttcgagcatctgttcgctggtagtgcattcgtgcacgttttgaccatcgcacatgatggtcacattggccagctgatcggtgctgcgttgagtcaagaatccgatggccgccgtcacgttctgcagattcacaccggcatcaagcagcttcttggatacagcgagaatcaccacatccttaaacgagtacagtcggcgtgaaccggagccatgagacggcgtgatggacggctcaacaatctgcttgcgtgcccaataatcgagctgtcggtacgtgatgccggccaccttggaggccacagtgccacggtagccgcgcttgatctcctcagtatcgacattggagaacaactccccctgaatcgcgtcagcgttcagattctgacggtcctcaagcgaaacatgaagatgcagcccggtctgtcccatggcactcccctaactcatgcgtgtctcgcatatgactcacactggtgtaatcacatgattgtaatttctgcaatcagtctaaccccgtgctgggtgtggactattgggaaataatggcggatttcgtgaagaacacgagacggaatttaccgatcatgatttcgtcgccgttcttcagcgtcgcctgatcaacacgctgacggttcacgtaggtgccgttcagacttcctgcgtcaaccacaaagaactgaccgttgaccctgcggaacacggcatgctgacgggatacggtggagtcgtcgagcagaatatcagctcgcggatcacgaccgacggtgatttcatcctcgtcaagcaagtaacgagaacctgagaccgctcccctggcggaaatcagcaatgccgttccctcggacaatctggtgatggtgtccagatcctcttgagtcagcggtcgatcgccggtggtggtaatgggcagtacattaatcgcgggcaggccgataatggtggtttcgcctgcgctaggaatcgggttggtcataatcccctattctaccgtctttgcatactggttttgcgtagcttcgcgtacttcgtcgataatgatgctgtcagaaggctgcacgttgacgttggatccgtatttcacctggagttgagcgcccacaccgccggcgatatcgactgcgttggacagctcctgcggattgccgatggccttcaccgtgtatgtgggcttgatggtggtgccatccacgatcaagccttcctcggcgtcctgaatgtaggtggaggtgatgacgcgcacgttattgatggcgattacctcggcgccggcattgcggagttcctcgatgaggttgaacatgattgaggcgtccactttagtcgtcgagcctcgtccgatccggatggtcacgccttggcccttcgccgggagtctgccggagatcaagccgctggtctcttcgttttgcttggcgatcttacgcgcctgctcctgctcgttagccgccgatttcagtgagttgagctggctgttcaactgggttttacgctgctcgagatttgagatttgcgtattcgactcgttcagcagccttaccagttcgctctcgtccatcgtttcgtacgtggatttagtgttattgatctggctcatgtaggcgaaacccagcagcgcgcacatcagagcaatgagaatcgaggatagtagccgtgatttgttgctggcccggttgagatccttccggggcttcttgcgcaccgtggggaacgacccggtttccatccggtcgttgaccttgtcttgtgcatgctggtcgcgcattttctccagcatgttgtctgattgtgctttacgtgccatacgtcaggacccttgtcagcctcggaagatgaagcgtctgatcgcggacacgttggagaagatgcggatgccgagtacgacgatgacggccgtctgcagctgcgaaccgacgccgagctggttgccgaggagcacgagcagtgttgccgtcaccacgttggcgaggaaggagatcacgaacacgcggtcggagaagctgcgctcgaaataggctcgcgcggcacccagcagggcgtcaagagcagcgaccaccataatcggcagatatggctgcacgatgatcggaatgtccggcttgacgaacacgccgatgacgacgccgatgatcagtcccagaacggctgccattattcattcctttccgcgtacttcacttcgccagtgactgctgcctcaagtgtaatcgaattggatttgctcacctgcgggtagataccggcttccttgaaggaatcgtaaagacttgcaagtctcttctcccccatcgcttcggccaaggcgctcttatcgcctatggcttcaatggtataggggctttgtatcgcggtcatgccgatgagaatatgcccgccggccttgcgtatcgaggtttgcgcgccgagcctattaccgttgatggcaatggcttcggctccgttttgaaacatcagggagaccagttgttgcagatccagatcggtgatgactcggatgttcgtggaggtgccgactctcgtcgaggaggattgatccgactggcttgccgcgattggatcggccagcgtcatggtgattccttcgccttcgaccaccgtggcaccattgaccatttcgtcttggataagcgtgtcgcttttcacgctgccggagattttcttggactgttcgtcaacttgggatcgcaaattattgacgtccgtggtgagttcgtctatctgcgagttgcgattctccaattgcgtggccaaagtctgccgtacctgcttacgcggatcggattgcaactgttgcacgaataggctgcaggcaaagccaacgccgacgcagatgatgaatacgacgatgcgattaaaccagatggagaaggtcgaacgatgctcatggaccagtcgtgagtcggagaacatcggatccatcggacgattgacaagatcatcgatgagctgaagcgaatcgtcgttggttttacggcgacgtctggtgcggatggcggcggcgtcatccggggaaagcgcatgatgcgattccgcgcctcggactgagtgggagaacacggcgcggcgtcgtaccggctcattctccttgggtatggggaacgagaccggggccatggcctcaagcgccatacttctcccccagttccttgcgtagcaatccgacgccctgcttggtatagatatatccggcgagccaatacatggcgatgccccagatgccggcggccagcgcggcgatgtagagcaagtggaagaacgtactggtgcccaaatcggcgaaaataagactgacgatggaaatcatcagcagcgcggtaccagccttgcctacgaaatgcacgggcagcggaccataaccgtactgggcaagccatagcacctgaatcgccatccacagatccctcagtcccacgataatcagcatccaccatgggatgatgccggcgacgctgagggccagaatcgagcagaaaatgagcagtcggtcggcgatcggatcaagaatctgaccgatcttgctcacttggttgaatctgcgcgcgatgatgccgtcgagtccgtccgaagccgaggaaatggcgatcagggctagcgccgcaatcatctcgtgcttggagatcagcacgctgatgaaaggaatcgagatgattcgcagcgcgctgatcaaattgggcacggtgaaatagatgtcacgtgcttccggactgtatctggcgttgactttctggttggtcatatcgactaacagtctacatgcgggaggcttgcagagcggtaacgatgatgccgcgtgcgccgacttcgtacaaatcatccatcagctggttgaccttggccttgggaaccatgactcgcacggcgttccactgtttgtcgtgcagcggggagatcgtcgggctttcaaagccgggggtcacggccacggcggcggcgaccttgctgatcggaatgtcatagtccatgagcacatactgatgtgcggtgagcacgccttgcagacgacgggtcagcacggccagacgcggatcctgctcgttcagacgcggcgagcgaatcaggcaggcttcggagtgcatgagcggttcggcaaacacgcgcaggccggcgttgcgcagggtggtgccggtggagaccacgtcggcgatgaggtcggccacgcccagctgcacggaggattcgaccgcaccgtccaggtggatggtctcggcctggatgccgtgctcgaccagatagtcgtgtacgagcttatcgaatgtggtggccacgcgcttgccctgaatatcctccagagtggtgatcggggattcgttcggtgcggcgaaacggaaggtcgaggtaccaaagccgagcggcatgtgctcgagcgcggcggtaccggagttcttgagcagatcctggccggtgatgccgacgtcgatggcgccgcggcccacgtatacggcgatatcgagcggacgcaggtagaacagctcgatgccattgtcgggatcttgcacgaccagctggcgagggttggtgcgcagacggtagccggcctcggccagcatgttccacgcgggttcggatagcatgcccttgttgggcactgcgattctcagcatttgcgttcctctcacaggtgcttgtagacgtcctcaagcgtcaggccgtgcttgatcatcatgacctggacgtggtagagcagctgactcatttcctcggcggtgcggtccgcaccctcgtattcggcggccatccaggtctcgccggcctcttcgatgatcttcttgccgatgaagtgggtgcccttgtcgagctcgtcgacggtcagggagccttcggggcgggtctgggccttttcggacagttcggcgaacagggattcaaacgtcttcatgtgattcagattcttttcttgcggttatggatgaaaggtggattgcggttcaggcttggagttcaggccttgaacgcggcctcggccttggtgcggatgtcgtcgatggcttgggcgggattctcggcgccgtacacggcggaaccggcaacgagcacgtcggcgccggcctcggccacgatgtgcgcggtcttggggctcacgccgccatcgacctggatgcgggtcttcaagccacggcgggtgatctcatcgcgcaggcggcggaccttggccatctggttgtcgaggaacttctggccgccgaagccgggctcaacggtcatgatgaggaccatgtcgaactcgtcgaggatatcgaagatcggctcgaccggttcggccggacgcacggcgaagcaggccttgcagcccatctcgcgcagctgtcgggccagacgcacgggggcgtgggtggcacccatgtggaaggagatggaggcggcgccgagcttggcgtattcgggagcccaacggtccgggtcctcgatcatgaggtgcacgtcgaccggcagatcggtgacctgacagatgcggccgacgatcggctcgcccagggtcaggttcggcacgaaatgatggtccatgacatcgacgtggaccaggtcggcgttggcgatggccttgagatcacgttcgaggttgcagaagtcagcggacaggatgctgggtgcgattgcgatattgctcatggtttcctaccttatctgtgcaatgggacttggggtcccgtgtttcgcgctgtttcggcgctgtttattgtggtgtcacttagtgcgcttggcctgcttcttctggcgaagctgttcctcttcgatgctctggcgttcgagctcgtcggcggtgaccgccgcaagcccgcgcgcctgcgccttggggtccggaccgtactggtagagcacgacgaacaggatgcagccgagaacgaagacgatgatcgcggtccacacgttggtcctcaggcccaggatcaccgtggagtagttgatgcgcacgttctcgatccaggtgcggcccaggccgtaccacatcaggtacatggcgaactgctggccggccttgagccggtcggcgagcttgtggccgaggtagatgatgagcgcggcgccgatgaggttccagatcatctcgtagaggaacgtcgggtggaacagcgtggttctgtagtccgggcattgcgcgccggaatagcagatttcggatttgccgatggcgtccgcgtcgttgagcttcaggccccacggcaacgtggtgggccagccgtagagttcctggttgaaccagttgccgagtcggccgatggcctgggccacgggcagcgcgggggcgatggcatcggcgaagatcgcgaacggatagtgcttgtggcggcaccacaggaacgccaccaaggcgccgacggagatgccgccgaagatggccatgccgccttcccacaccttgaggatgttgaccaagttgccggtgggcgggaagtagtcggccggcgtggtgatgcagtggtagaggcgcgcgcccaccagcgcgcagggcacggtgatgagcgtggtgtcgagaatctggtcgaaggtgccgccgtaccgcttccaacgtgtggtgaggatccatacggccacgcagatgccgatcaggatgcagatcgcgtacatatggatggtgaacgggccgatctcgaacttggagaaggtcggcgagggaatataagccagattcatcgtgcctctacttgctggtgctcatggtgtgtccacgcgcgggttgtgcttgatgctctgtgactaccctaccgtgtcacggcacaacccgcgtgaggcgcaccgggtgttcaccgggcgttgtggatgccttcggccagttcctcgctcttggcggcgagcagcttcaagccttccttcgggtcgcgtgcggtcttgttgtcgtccgcgagcagggtgtgcacgagcgcggagccgacgatgacgccgtccgcgtaggagccgaccttggcgccctgttcggcggtggacacgccgatgcccacgcacacgttctcggcaccggcctgacgggtgcgctccacgagcagttcgggcgaggcgtcgatggtggcgcgttcgccggtgacgcccatgcgggcggccgcatacacgaaaccgcgcgcgttgcgggccacggtttcgaggcgctcggtggacgagtccggggagaccaggaagatgcggtcgagtccgtgacggtcggaggcttcgatccactcccccgcctcgtccgggatgaggtccggggtgatgaggccggcgccgccggcgttctcgaagtcgcgggcgaaacgctcgacgccgtagtggtacacgaggttccagtagctcatgatgagcggcacgccgccggcgttggccacggtctcgacggcctcgaacacgcgcttgatggtctcgccgttgttcagggctatggaggcggcagcctggatgaccgggccgtccatgaccgggtcggagtacggcaggccgatttccacggcgtcgacgccgtgctcgaccatcgtcttgaaggcgtcaagcgagacgtccgggttggggaagccgtagggcaggtagccgatgaaggcgggcttgttctcggccttgaacttggtgaacatagcgcctgacttgctgggcttgtggctgatgcccagcggctggccggacggcgtggttgcttcgttggtcataatcaacaatctcctcttcttgttcaggcgacagtattgccgtgggcgccggtcacatcaagcgcggcggcctgatcgtcggtcaggtagccgaaccacttgccggcggtggccatgtccttgtcgcctcggccggagatgttcacgatcatcacggccttgtcatagcccttggctttcagatcggcggcggccttgtacgcgccggccacggcgtgcgagctttcgatggcggggatgatgccctcggtctggctcaggtcgcggaaagcgttcatggcctcctcgtcggtggcccagctgtagttcacgcggccgatgtccttgagccatgcgtgctcggggcccacggaagcgtagtcgaggcctgcggagatcgagtaggtgtcgagcgtctggccttcgtcggtttccagcaggtagctcttggcgccctggaacatgccgagctggccggtgccgggggcgaagcggatggcgtgcttgccggattcggggccgttgccgccggcttcgtagccgtagaggttcacgcgctcgtcgtccaggaaagcgttcatcacgccgatggcgttggagccgccgcccacgcaggcgcagatcgcgtccggatggtcgatgccgtaccagtcctggagctgctgcttggcttcctcgccgatgatcttctggaagtcgcgcaccatggccgggaacgggtgcgggcctgcgacggtgccgagcaggtagtgcgtgtccttgacgttggtgacccagtcgcgcagggcttcgttgatggcgtccttcaggatcttgtcgccgagggtcacctcgaccacttcggcgccgagcatacgcatgcgggccacgttcagggcctgacggcgggcgtcgatctggcccatgtagatgcggcacttgaggccgagcatggcgcacacggtggcggtggccacgccgtgctggccggcaccggtctcggcgatcacgcgggtcttgcccatgcgcttgacgagcagggcctggccgagcgcgttgttgatcttgtgcgcgccggtgtggttcaagtcctcgcgcttgaggaagatacgggcgtcgagaccggtcttctgcttgaccagtgcggcgaagcgcggggcttcggtcagcgggctcggacggcccacgtaacgctgctggagcgtcatgaa

SEQ ID NO: 1730 - DNA, 12952 bp, Unknown
  MAG_14  MAG No. k141_20415
ccttgcggcggtcaccgaagcccggggccttgacggcgcaggacttgaaggtgccacggatgttgttcaggatcagggtcggcagtgcttcgccgtcgacgtcctcagcgatgatcagcagcggcttgccggtcttcatgaccagctcggccacgtgcacgatgtcctgctgggaggagaccttgccggaggtcagcagaatgtacggatcttcgagcactgcggtctggtcgtcagcgttggtgacgaagtacggggcgatgtagcccttgtcgaaacgcatgccctcggtgaagtcgaggtccaggccgaagcggttgttgtcttcaacggtcacaacgccgtcctggccgaccttgtccagagcctcagcgatcttctcgccgacctcagggtcggcggcggagatggtggcggtagcagcgatctggtccttggtctcgacgtccttggcggcggcgacgagttccttgacgatgacctcggtggccttctcgatgccgcgacgcagggcgatcgggttggagccggcgaccacgttcttcagaccctcgtgaaccagggactgagcaagcacggtcgcagtggtggtgccgtcaccggcgacgtcgtcggtcttcttggcgacttccttgaccagctcggcgccgatgcgctcgtacgggtcttcaaggtcgatttccttggcgatggacacaccatcgttggtgatggtcggagcgccgtaggtcttgtcgagcacgacgttgcggcccttcgggcccaaggtgaccttgacggtgttggcgagcttgtcaaggccctccagcatgccctgacgggcttcctcatcataagagatgatctttgccatggttgcgtattcctccaaatggctaggtataccggttatcactcgcaagcgtcgagtcgtgacgaccagccgtcagctgccgattatcactctcgacctccgagtgctaacccagacattagcactcgcgaccgccgagtgccaacatcatcggcggcgattgcgctttgggcatgaaaaggccccaaccgtcgaaacggtcagggccttcaatgcacatccttgcgtgcgtgttgctcactcggagcgggcttcacccgaagacagcttgacaacatcctttgcctgcgtgcctttgccggacgaagcgggcgtatactccacgcgatcgccctcgtacagcatcttgaacttattggtgctgccgtcgtccttgatttccgcgtagtgcacgaaaacgtcctcgctgccgtcgtccggctggatgaacccgaaccccttcttggcaaggaagaacttcacggtaccttgtgccatatctgatctttcctttgttcccttaggcgtcgcgacacaaaacctatagggaacgtagaaagaaccgcatcgcgctcccctacctcgcgactagatgacgattgtacagtgacgagggaacaatcccaaccgcagtggcacattttcggtacgaattatttcatagacgtgagaacgctcacagttttcgatgtattccacgccgatatcaggggcgcatcaacaacgctagttgagcagcaccaccgtaatgggaacggcgagtccttgcacctgctccacagccgaaatgccaagcgtggtcgccacatcttcggcggtggctttatcggcttcattctgataccataccacggaagaagccggcaatgtgccgcgcggattggtcgcctcgacgctggtgtaaccggcggtctgcagcacatcggcctgctgacctgcatatccttggattcctgtggcgttgaccacacgcacctgcgtggccttattcacagtcgcggtggctccggactgctgagactgctgatcggagtcttgattctcattcgaggatgtcgtatcactgttggtatcggattttgccgaatccgaagtcgagtccttggacggatcggtcgaagtggacgaggaatcatccttggtgctgtttttggtctcagccttgctggacgaatcggacttggaagcagtcccggacgtggtcgcagtctgggacgatcctcctattgcattcctgtattccccggaaatccatgcccagaccccgacaccgcacagtgcggccaccagaataacgacgatgaacgggcagaggcgggccactgccgaacgagcgccacggtgaactcccaccggtcccttcggaggattgtcgaaggaatccggttcataggattcgtaggtcatcatgtcgcgtgccataatcgccctttcttcctgtcaaaactacccatgagtgtaatcggcaaacaactcatcagtccaccacaccacgcctcgtgcaccggatatgcacgtttgactacagtggtgagtcatgatcaaaccattgagcgaactggtagagccggggtgggcccatgccttggccgacgtggagcccgccatccaccatatgggcgattttcttcgtgcggaaaacgccgccgggcgcccgtggctgccggcaagccacaatattctgcgcgcgttcaccatcccgttcgattccatcaaggtgctgattgtcggccaggacccctacccgaccccgggtcacccggtgggtttgagcttctgcgtggcgccgaatgttcacccgctgccgaaaagcctggtcaatatttataaggaattggttgacgaccttggggtgcccatgcccaccaacggcgatctgacaccgtggacggaacgtgaggtgatgttgctcaacagatgtctgaccgtcggcgtcgggcggccgaattcgcatcagggcaaaggctgggaggaagtcaccgaggccgcgattcgtgcgttgaacgcgcgcacggacgccgacggcaagcccaagccgctggtggcgattctctgggggcgtaatgcgcaaagcctcgagccattgctgaccaatgccttcattatcaaatcgcctcatccgagtccgctgtccgcttcccgcggattcttcggctccaaaccattctccagagccaatcaagccctagtcaccatgggtgccgacccggtggattggactctttagacagaccaacagtcattgtgagtagttacagtgagggcatgactttgttccccacgcaaccgaacataccttcgccgaccaccgccgcacgaccggtcaccgttcccgcgcccggcgtgtcggctccgctgggtgccgatgacgccaaacgcgcacgtatcctggccgacgccattcgggcgaggttcgcccagacactggtgggtcaggataatctacgcgaatcgcttatcgtgaccttggtggccggcgggcatattcttatcgaatccgtgccgggcttggccaagaccacggccgcccagacgctcgccacctgcgtatccggctcgttcaaacgcgtgcagtgcactcctgatctcatgccatccgatctggtgggcacgcaggtcttcgattttgcgtcgcagaagttcaccacgcagatcggcccgattcacgccaatttcgtactgctggacgagatcaaccgttcgaatgccaaaacccagtccgccatgcttgaggccatggccgagggtgccacgaccatcggcgggcagcgtatcgccttgcccaagccgttcatggtgatcgccaccgagaatccgattgaggaggagggcacgttcaacctgcccgaagcccagatggatcgtttcatgatgaaggccgtcatgacctatccttcgcccgacgaagaggctcgcatgctggccatgctcacccaccgtggctccgatatgatcggtcccgacaccatcaccggcgaacgcatttccgtgtctgacgttgattttctgcgcaaggcggcacgccgcgtgcatgtttccgatgcgatcatgcgttatgcggtcgatatcaccgccacgtcacgaggtgccggctcccgccccatcaagggactgtcgtccttggtgcgtttgggtgcctcgccgcgcgccaccatcgccttgacccgtatcggccaggcgaaggcgttgctgtccgggcgcgactatgtggtgcccgaggacctcaaggcgttcgctcatgaggtgctgcgccaccgtattatgctgacgttcgaggcactggccgatggcgtggtcagcgatcagatcgtcgacaagatcgtcgaaacggttcctgttccgtgagttccgattccgttcgcaagaaaatcgaggcccttggcactcagctgagcctgcctaccgtaaggaaggctttgggcgtgctggagggcgaacacgcatccggacgtcgtggcggcagcggcgatgcgatggatgtgcatgcctatgagccaggcgacgaatcccgtcttatcgattggaagaccagcgcccgccaaggccgccccatggtggtcgagcgcgagcgcctgtcgacgtcacgggtctggttgctgatggacgtaggcctggagatgactggcgtatgcccttccggagaacgcgcatggcaggttgccgccaatgcgctgcgtatgttcgccgcactgtcgttgcgccggtcggacgatatttcgctggtgttcggcgatgagtccagcatcacccgcgtgccgttcaacggtgggttcgcgcagttcgaacgcacgctggacaaggcgcttgatcgtgattgggatcatcaccgtaatatcgacgcgctgctggaatatgcgcgccgtatcaaggatcgtgaggcattgatcgtattggccaccgatgagcatgcgatggaagagcggcatatcaccacgatccgtcgtattacccgcacccatccgatggtgctgatcgatgtggcgacgatgaatccgttcaaggccgtctcatcccgccacgctcccgccgacggcttgagtgcacggcgtgtgccggcattcctgcgcaacgccaaggcagcggccgaggtcgatactcatcgcgcgtatatggccgcggctttggaacaggagctcacccgtgccggttcccatatcattcgagccgcatccagcgaatccatgttcgatcgtttcgtcgccctggtgtcccgggcattggcccgcaccacacgcaatagactgggcactgcacccgaactggtcggactgactttggcgggtgatctatgatgcacagcatgttccccatcatcccgctcgccactgatcccggcgatctcaggcccgtggagtcgttggccttgaccactcccctagtgatggccatcgtcgcatgcctgttgctggcggtaggtctgatcgcgttgatcatcatgctggctcgccccgcacgcaaacctcggaacagcgaccgtgcgcgtggcactcatagcaatgccagctccaaggccgagtggcgtgcccgcatcgacgatgtggtggcccgtcatgaatccggagcactgccccggcatgaggctttcgtcgaattggccgtcatcgcccgtgatttcgccggtgccgcatcaggcaaggagcttagttccagtacgctgaccgatttggcgtacctgaatcgcacgcccgcgaatcgccaaggattggacgcattgaagcagaccattagcgcgttgtatccaccggaatttgccgatgatgcccgcaaccgaatcgcccagacgaccagcgtgcagcaggccgccgagtgggtggcgaatctggtggaaaggtggcgttcatgatgctggcatggcattggccttgggccgctctggccggcgtcttggcagcgctggcgattatcgtgctgattgtcgtgttcgcccgccgtaacgccgccgacgacacccctgtattctcgatggacgacgatctcaataccgagcacgcttcccgtctgttccgtcaatggcgcgctttgggccgtctcgccatcagcgtgctggtgcttgcgctggcgctggccattgtgctggtggctcgccccagccaagtggatgccggtgacgaacgcgcttccagccgagatatcgtcctgtgtctggatgtgtcgggatccacgctcccctatgatcgcgaggtcatcgatacctatttggaactggtcaagcatttcgagggggaacgtatcggtttgagtatcttcaactcgacctcacgcacggtgttcccgctgaccgacgactacgaactggtcaccaaacagttgacctccgccagcaaggcgctgaaaggcgtcgagtcgcaggatgacatcgataagatgtccgatgccgaatatcaggacatcgccaattggctcgaaggcacgcagaaccgcaaggacgccacctccttgattggcgacggcgtggtgtcttgcgcggcgatgctccccggtttcgcttatggcgaagccaatcatgcgaatgccgaccgtcagcgtgcggcatccatcgtgctggccaccgacaacgtcgtgtcaggcaaacccacctattcgctgaccgaagcgttggacttgacccagcagaccaaaatcaccgtggacggcctgtattccgggccgaaagccagtgaatcggaccaaaccacaacggatatgaagtccgcgatcgagtcgcatggaggcatcttcctcacccaatcgaacggcgcgtcgatagatgagctggtacgggatattcagtcgcgtagagatacggatgtggagaacaaggcgaaatcctcaatggtggacgctcccggtctgtggacgcttgctctggccgtgatactcattatctggatcgtatgtgcatggaggttgaggcgatgaacggattcaccttctcccccgccttgggctgggtcgccgacggactgctggcggccgggctcgccgtactggccattctcgaaatcgtattgtttgttcgccgccgtgcttccagtgacgagaccgtgtgggcttgcatacgacgtacgcttatgctgctcattgtcgcggtgatggtactgactcccagcgtggtatcgtctaccacctcacaggtcatcaatgccaccgacgtcatcgtggcggtggataccaccgggtcgatggcggtggctgatgccacatacgggtccgagaagaccattacccgcatcgatgccgcgcgtcaggccgtgcatgatgtgaccgctgcttacccggacgccagtttcgcggcgttacggttcggtgcttcgggaacacttgatgtgccgctgaccccggatgcgccggccatcgataattgggccaacacgttggcggtggaagccacatccgtgtcggcgggatccagtctggatgctccgatcgatcaattgctgctgaccgcgaagtcgattcgtgaagcgcacccggatgatgcgattgtgctgtacctcatcactgacggcgaacagacctcgaatgtgacgcgtcgtacgttctcgtcactgcgacagtatctcaatgatgggtttaccgtgggcgtcggctcgaccgagggcggcaagattcccgtcatcgccgatggcgtcagtgccggcgattccaacaccacggaccactgggtggtcgacccggataccggcgaacccggcatctccaagatggatgagaagaaccttaaagacattgccgacgagatcagtggcacgtatgtggccgtggacgcttcacagactttggcggattcggtttcggccaggtcgtcgaagcagtggcgcatgaccaccacggtcaaggagcgcacacgcaccacgccggtggtatggccgttggccattgcgttggcgatattgcttgccatggaagtcggtgcatggatcgcgacctcaaggaggctgctgtgaggaacagtaacgaaatccacgagaacgatggctcggcgaatattcggatgcgggcgaaatgcccgctttgggcacgtatcgtcctggcttgtggcaccgtattgctgctgctggttgccggcgtggcggcagtaaacctgtccgcttcgattacgttcaatcaggccaccgcatcattgaatgccaatatcaaagcggctcaggatgagtcgactgatatcaccacgctcaaggcgcaacagcagcagaccgatgcgcaattcgccgaggccgggcgaatgcgtacgcttctgttgccgcaagtcaaggacgccatcgacaccaatgcttcgatttcttccgagctgacgaagatcaccctgaaacaggccgaggcgcagaacagcggttccgattccgggcaagcccagtcggcgcagcaatccgagagttcctcagccaatgccaaaaagggcggcgcgttgaccgacgagcagaagaagcaggtcgaggagctgatgaaggccaatcagcaatccaccgatacccagtcgaacaccacccaatccaagcagaaagcgacgcagaacaagggtaccggggccactaagccgtggtaagcagtcgttcacggttgctctttttctcacatcctcacgggtcatggccttatcgcggctgtttcccggtttcggctgtcggctttggcgtttgtctgatcccgatagcccatggctgatccaaggtgtgcccaaacaggctatttgtggataatcgttacggctatacacaacacttgtgaataacttcgcccaaaatcggcaagctagaaccacattggtcgttccggctggacaagcatgagtcctgtccttttagctggatatatgaatacctacaccagcaccccagcacccatcgatcccgccggcggctttgccggcaatacggtgacgccgttcgattacggcacttgcccttgccatgcggcggtacagcgtagtcgcgacctcgtgtccgtccaacgtgcggccacactggcgcaatcggaccagatggcggtggccgtgaaccgctctcgcaacatcgtgtggaccggtaaagccgccgacctattccgatcgcggctcagtcgcaccgcacagtattcggccagtctcgcgcaagacatggagaccacccaccgattggcttgggggtcatcatgagcgagcacgattactggcaggtggaatcgtccgtttacggcggagtgggatatgcgccagccactcttgaagaatatgccgccatagccaaggctctcgatgacgaggcggcaggatttgcggccatagccacggcttgggaatcggccgcattacagttgcagtcacatcggcatagtgcgccgatgtgcgtcaccttgcagtcgggcgatccgagcgccgttgttcccggccatgtcactgcaccatatgccgcgctgggcaatcggtgttatgaccatgcaacggcatgtcagcggttgagcgatgatctgcgtggcgcggccgatctgctgattcgcgcacactctctgtattctcaggcggagatgacggctcggcgcatgtttaccgaattattgcaggccggtacacaggccaaaccgggatatgccgcggtgggtgttgccgctgtggcggcgggcggctttctggccggctgggctattgacggcaaaccgaacccagcatggatgtccacgttcacctatccgttccaggaaggagtgctcagcggcgcgggcggaatcattggcggcgtacctatcggcaagagcattgcgcacaccgatgaggtcaacaaggctgcggggaaaatcgccaatttctccggcccggcgaaagacgtcgtccaaggcaatcatctgaacgtgcgcgaggtgcaggcgaatgccgacgtcgtccgtgcaagcggatcggtggccgagtcaatggagaatctgcgcaggctcgccgaagaacggctcggcaaaatcgagctgaacagcggactcgaatatgggaccatcgccattcaacgctatgaacgggctgatggaaccaactcctggctggtcaccatcccgggtaccgatggacaacctgactcaccattcggctgggcgcagaacgtggaactgatgagcgccgatcaggagcgccgcaggaaagcggacagcgctcgcacggttgccgaggcgatgcgtcaggctggtatcggcaaggacgagcccgtggcactgatcggccactcccaaggtggcatcgttgccgccacgcttgcctcggattgggcagaggaatataccatcgagcatgtggtgacagccggatcgccggtggccaatcatccgattccgcaacgcacgtgggtcaccagcgtggagatcgatgatgaactggtcgccgcgctggacggtgccgccaacccggtcaccgataattggctcaccgtgcaagggcatgtatcgcccgcgcccacggcaacaccatccacagtgcattcggacgtctcatgcactcccggcgcaacgcccatcaacggtctgaccccatatgacgccgcatccgtggctggttcgaccaacggcagggagttgtcgcattggctcaaataccatcaggccgcttatcagaacgccaccgacctcggctcccccgccgtgcagcgccacgaagcgcattttcaggaagtcatcaacggagaactcaaggaaacccgctattaccaaggccgcatgacccagtccacaaccattgctcccggcgagcgcaccaccgagttcagcacgttcggcggttaaaagtaaataccacacttgacagagttgtcaagaaaggagttaacaatataatgacgagtaggagatggctcatcaaactgatgaagcaagcggcgaaacgcaagaatattacgtttgagagtatcaggcaaagagggagtcatgagatattccaactcgatggactcatgattcccatcccacgccataacgaaatcgacaacgacctcgcgaacatcatttgtaaggaagcagaagccaaactcgggaaaggctggtatcagcagtgaaaacatatcaggtcatcgttcgtcctggcgaaaaatactggattcttgagattcccggtatcggtttcacgcaggcaagaacaacagcagagattgaaagtatggcacgcgaccttatcaccgtcatgacgcaagatgctgatttcgcactcaccatagagacaaaactgccgcaatccgtacaagagcaccttgatgaagctcggcgactgcgcaaggaagaagcggaatgcagatcgaacgcagcgcgggaaactcgcgccgcggcacaagaactacatggcatgggtctcgccctacagcaaataggcgatatactcggggtctcacggcaacgggcacatcaacttgtcaatgctgtcaatgcttagcatcaatcggctaccccccacaatgcaatcaccgcagagacgcggctagcgccactttcccgggattgttgcgctagcatgcccgaaaccccctctatcagcgcaacattcccgggaaagtggcgcgcaaagagtgtcaggcgcgtcgctcgatgagtgcgcggccggatgcgaggcggtcgagcacaccggttttggcgatggccagcatcagataccaggccatcacgccgctgataagcacgccgccggtgacctcggaaatcatgtgcacgatgccacgcgggctgacgaatgacacacccacgtagcgaaacagcatcagatatgtgccgtattccaaggcgaccaacgcaccggatgcaatggaaatcggcagattgaacatgcggtaacgggtcaaagcgaacggaatctcagcgaaaacaccctgcagcagcgccgagataatcacgaagcccaaatcgaactggctaccaatcaccgtttcgaccagcgtgccgataaggttcacgtacagcgccgctccgggtttgcgcagaatcagcaccgccagcgtaccggagaaataccagacggcgtgcacgatgctggcgaaaccgggcagaatcgcaccaaacaccgaagagatcggcatgtacgcgaagttgaatccccagaagatcacgccgcaggccgcgcccagtgtggcaccgaccgcgatgtccaacggctgccatttcagcgacgatacggcgaccgaacgtttcggaagagtatgaatggtggttgcaggcatggtgatctcctagccttaaaggccgcacacagtaatcgaatcacgggcgttccttgacctgtacggctcgggcgggaacgccacaccacagtatagccgctcggttcacggctggaagtacccttggaggttatgaagcttaccgatatttcccccgcaatcgcattgaccccgctcgacggccgttaccacaaggccaccgccccgctcgtcgaatacatgagcgaacctgccctgaaccgcgaacgcatgcgtgtcgaagtcgaatggatgattcttctggccaacggctttgagggcaacggcaaccagccaatcgttgacggcgtcaagccgttcactgccgaagagcaggccttcctgcgcgccattcccgaggacttcggcgccgaaggcatcaagcagcacgccgctcatgaggccatcacccaccacgatgtgaaggccgtggagtactacatcgatgatcagatcgacaaggctccggccgagctggccaacatcaacgacgagctgaagaccctcgtgcacttcgcctgcacgtccgaagacattaacaacctctccatcgcccgttgcgtcaagaacgcgatggaaaacgtgtggaccccggagttcaagcgcatcatcgaccacctcgccggcaaggccgaggaattcaaggatatgccgctgctctccctcacccacggccagccggccacgccgaccacgctcggcaaggagctcgccgtctacgtctaccgtctgaaccgtcagctcaagcacatcgaaaaccaggagtacttgggcaagatcaacggcgcgaccggcacgttcggcgcccacctggccgcatgcccggatgtcgactgggtcgccgtctcccgcgaattcgtcaccaaccgcatgggcctgacctggaacccgctgaccacgcagatcgaaagccacgactggcaggccgagctgtactccaccgtctcccacgccaaccgcatcatgcaca

SEQ ID NO: 1731 - DNA, 9803 bp, Unknown
  MAG_14  MAG No. k141_20435
agtacattaaccgttcacaagatcaatattgcaacggcgcatacggccgctaccacacgctcaaaaagcccggaaaaccgccaatccgagccggtctacaatcgccatacaacggcacgcaatcaccataggaggctgacagacatgtccaaggacacatcaaaacaaacaacattcgatttactgtcgggtttctggctttcggtcttctgtggagcagcggcctgtacgtggtggccaccgtgctgtcccccagctgttcaaggacatcggcgtcgctaacccggatgcggcagtcggcacgttgaactcggtcaccgccatcgtgggcctggtttccaacctcgtgttcggcaacctctccgaccacacgcgttccaagatgggacgccgcaccccgtggatcatgccgagtgtcacgggcatgtacctgtacgcgggcatcgccggcttcggctatggcgtgtactcggccatcgaccaggcactcaacgtcgacgtgttgccgaacaaggaagaggccgacaaggacctcggcatcctcagcttggccaccacgctcggccaagcagtcggccccaccatcacctccgtggtcaagaccacgaccggcacctacacgccggcgttcgccatctccatcgtcatggccgtgtgcgctgccgtgttcgtgctgcgtatccagaaggtgaagtagccgctgcgagtgcctatctccgtttcaaggggctgattttgactttgcggaacatctacttccgtttcaaggggctgatgccaaagtagccactggttaaaaacggcggaatagtgatagaacaatgccatttctatctgcgttccgccagttgaccagccccttgaaacggaagtagacctccggcaaacgccaaatcagccccttgaagctgattttgactcagcatcatgcagcgcagctatatcctcagtgcgggtatactattccgggccgtcacgacgacgcctatggaacgcacgcatggcaaagagagaaacatgagtcagcccgacaccgacacggcggcacagtcgccgtcctcgcaacaggaaccgcagattcagacggatggccgtcgaagccattcggaacaggtgaaccaaccagcgcaaaccagccagtccgagtcgtcacatgatggcaaagacgagcacgccctacataccaacctgaagcgcggcatggaatcccgccacctgcagatgatctcgttgggcggcgtgatcggcaccggcctgttcctgagctccggatacaccatccagcaggcgggccccatcggcaccattctggcgtatggcatcggcgcgctgatcgtctacctggtcatgctcacgctcggcgaactgtccgtggccatgccggtgaccggctccttccatgtgtatgccgagaagttcatcggcccgggtaccggcttcgtgatcgcgatccagtactggctcacatggacggtggcgctcggatccgagttcaccgccgccgggctgctcatgcagcgctggttcccgaacagtcccacatgggcgtggagcgcggcgtgcatcacactcatcttcaccctgaacgccttgtcggtgcgtttcttcgccgaggcggagttctggttcgcctccatcaaggtgttcgccatctgcgcgttcatcgtcatcggatcgctcgccatcttcggcgtcatcccggtcgccggctaccaacatgccccgatgttcggcaatctcatcaaggacggcgtcttccccaacggcttcatgccggtgttcgccacgattctgaccgtcaacttcgcgttctccggcaccgaactcatcggcgtgaccgccggtgagacgagggacccacaaaccgccgtgccgaaagccatccacaccaccctgtggcgtctggtgctcttcttcatcggctcgatcaccgtgatgtgcgcgctgatcccgtggcgccaggccggcgtgggcgaaagcccgttcgtgctcgtcttcaacagcatcggcatcccctatgcgggcgacatcatgaatttcgtggtgctgacggccgtgctttccgcctcgaattccggcctgtacgcctccacgcgcatggtgtggtcgatgggcaacgaaggcatgattccacgctggttcgccaaaacgaaccgtcgcggcgtgccgatgctcgccttgtgcgccgcgatggccggtggcctgctggcgctcctgtcttccgtgatcgccgcctcgactgtgtacctggtgctggtggcgctttccggcctgtccgccgtggtggtgtggatcgccatcgcctactgccagatcgtgttccgtcgccgttggctggagtccggccattccaccagcgaactcaaataccgcacgcccggctatccgtacgtgtcttgggcggcgttcatcctgtgcaccgcatcgttcgtattggtgattttcgacgtggagcaacggttcgcgctcgtggccgagctcgtgttcatcgtggcctgctatggggcgtatttcctgcaacagtgggtacgcaagcgcaaaaaggcgaccgaggccgacgacctcgatacgctttgggtcgcgcgtgactgaacggctcgcgacctaccggcgcaccgctattcgcgccgtgaacgtgcactgatccaacgcaatgccagacccagcaaatccacaccgccacgattgcccatgatgtgggtttgagcgcggccggggagaacggcagcacctgcaggccaatgatgattaagccggcggccagcagcgaagctgagatgaccataccgaacttcttccagtcaaggccttcgcttgcctcttcggcactctgcggaatcgtgtcgaaaccggtgtagaagagcggcgtcatcaccagcactccggacagaaacgacccgaccatggtaaccgcgccggacgtcgagccgatcggcagcagaaacacggcgcccagcacgaaggcgatcatcgcctcgaccgggccaccgccgacgatcatccagtcaccgaccagcagcacccatacggtgccgatgattgcgccgaatcccatggtgaagtagttccacaggctcagcgatctgaccatgccgccgtcgtcgccgctgccatcggcactactgtcgccgttgccgttgttaccatcctcgtgcacaggaatagcggcactgggcaggccagtcgattccaccaaactggccgtcatcgtgcttgacgggctgaatgccgtggatgcggcgaccatgaccgagcctcctttaattcggcctgactgtgatgataacgccgttcacgatatgccgtattatgaacgcagtgagagcccgcttcaccggccctattcggctcatgaataaacttcgcctatctgcggcactgaacacatgaccataatgtgatacacgtcacttcctgaagtacgtagtcgttatggaatcacccgcacgtttcccgtatcggagctgtacgatagctgtgagacagggggtcgtcagatttcggggggagggttccggaaacggtccgactgcaggatgcaccgggccgtgcgacacatgtcaacttgcgtattcacgccaaactcaattgagcaagccgattctcgtaaatggccagaagcggaacaacgccacaccttggatatcgtcgtatggcactagcccattgttgccgtcgtcaagatggtatcgagaatctctggaattggagcgattatcaccaagcacgaacacgttgccgtcagtaacggttacggaaaaaggactgtcgcttggattcacgccggacttaagataagcgctttcatcaatgggtttgccgttgaccgtgatgggctccccggatcccttgcaggcgacggtatcgccgggcagaccgatgacacgtttgattaggtaacgattgctgtcgattatcgacatcagattggtgggaagctgctccccctccatccagtctgcgggatctttgaacacgatgatgtcgccacggtgcagtgcaaagagtctcggagtcaatcgcgaggcaaatacgcggtcgccgatttgcaacgtgtcttccatgctacgggatggaatcacatagacgttgaacacgaaggtgcgtcccagcaacacgaccagcatcaccgcgatcaccgtcagcagatagccgcgaatttcactccaaacggagggctttcgcgcatgtctcctcgactgtccacgcgcttttttgctatgacgccccaccatcatatcctttccgaccggtaacgcaacaccatagtcctcaaaccatgccgttacctacgcccatgtttgagctcagctgtcacaccagcggttcgcgcacgtctagttcacaggcgatgccggtttccttgcgggcccattcggccgcctgcagtgcggcgatgttccataatgcgcacggcactccgccaaggtccggatgcgatgcccagaatgtgaggtcatcagcgtatgcggtgatgaccgattcttccgtgactggcatgatcgtgtggtacagacggtccgcaagtgtggccacgaattcgttggccgcggcgaacgtgtcgataagatgctgttcggcggtcaccggcgggccgaccagctcccaggattcgacgtccgtggcgctccaatgcgcggcttcgccgtccacatcgcgttgcaaagagacgaacagcctggcgaactcatccgaagtcagtcccgtaacccggcgtcgggttgacaattcaatcggagtcatcagataccgttcctttcgcttcgttcattccgttgtctcgctggtttgatttgctgccaaccggtacaaagcctatctcgcacacctcacgatagcccaaaccaccggcatggccatgattgccagccctacgaccagtgaccatgaggagccggcgattccggtcagattggtcatggcggcggagacgtcatacatgccatgagccacgatcagcggtgtaatcatgcccatacggcggtacagcagcacggcgagcactgcaatcagcacacgcggtggcgtgccgccggcacaatggccctatcgagcatcgccacatgattcgtgcggtccacaatcgaggcagcatcggtttccattcggttcatgcggccagactatcgcccgttcttgccgattgcctgtaagcaggttcggatagactggcgcgagaacaatgcgagaaagaggcaagaatgacccggaaacggtcacaacagcacgacgcacaacgcaaaccgtcctggcgcgtacgctggaagaccatgagccgagccgtaggcatggaaatccgcgaacacaaaagctcattcgcggtctatgtggtgctgcgcatgctggtgctcgccatggcaatactccagttctttaacggcgactacgaaaatgtgttcctgtgcatcctgacgttgctgttgctgttggcgccggcgttcatccaggtgcagttccgcatcgagctgccttcggtgctggaagtcatcgtgctggtgttcgtgttctcgtccgagattcttggcgagatcagttcgttctatgagatcttcccgttctgggacacggtgttgcacacgatgaacggcttcctcgccgcggcgatcggcttctcgctggtcgacctgctcaaccggtccgaccgggtgaagttcgagctttcgcccctgtatctggcgatcgtctccttctgcttctccatgaccatcggcgtgatctgggagttcttcgaattcggcatggaccagttgttcggattcgacatgcagaaagacgccatcgtgcattccatcagctcggtgatgctcgaccccacgcacaccaaccatgcgattcgcatcaacgacatcacccaggtcacggtcaatggccaagacttgggcctcggcggctacctcgacatcggtctgatcgacacgatggaggatcttatcgtcaacttcatcggcgcggtcgtgttctccgtgttcggcttcctgtacgtgaagaaccgcggcaagaaaaactccatcatcagtcggttcgtgccgcgccgcaagtccgccgaccgcgattatctgcgactggtgatcgatggcgggagcgcggctgatgccaaggccaaagccggcggtgccaacgctgacgatagtgctaacgccagtgcggccggcaccgattcagctgatgcagccggagccaaagccggcaatgccgacgccgctccgaccgtcaccgccaagccctgagtacgctctacagcactttcgaagcgtcgaaacggtagtgcccggtgaccgtcatgtgcttcttgaaggcgaagtagtcgttttcgcgctgccgctgcgccatgttgtgaatcacgtacggtgcacgccccgcgatcggccggcggatagccgccctgatagtagccggaatcgtaagccggatggttttcggcgtccttgcgcgcacccgccacgatatccgcgtaatcgtccacaccattgtcattgaaatcgaccgaactggcgactctcgaatacttgcgggccgcctcgccttgtgattcgatgattcatgaacgtattcggctcacactgtaatcgtccgacccaccgctcgcgcctcccaatccgcccggtgcttgaacttgtgggactttggccgtaccgcgaccgcagcatcgccatgctcatctccagccatcagctcaacgaattgcaggagttgtgcgggcgattcctgttcatcaaaggcggccggcttgcggacgaattcgccggcgaacagaagcggatcacggttatcgagcttggccggccgctcggtgtcgcgaaacgtgcggcggtcgcggctttggatccggccgccgtcattcatactgattctgccggccgtgaacctgttcaactccgatttcatgaaagtcagcggaaagaccggttcggtgagtgtgctggatttcctcgctggcgagttcgtcgtacagaacatgcttgatgctgccgatggtggtcatggcctatctggtggctggtgccatctatacgcccgtggcctccggccgcatgttcctgtacaaggatctggaccgcgccacgatcatcaatgcgaaaatccttgccctgtttggtatctacgccgtgtacgtggcattgcagacggtggtgacggtcgctctctacatcctgtacatcgcgcgcttcgactacgcttccggcacactgctgccggccgcaggtgcggacatcgcttcggatgtggcctccatcgccggcatcctgtgcgccggtgtggtgactatactggtggtggccgcccctgccacccggttctcaaccggcagtacgaaagcgcggaccacaccgtgcacctcgatgtgaaggtggacgaggatacggtgtggcttaacagaaagcaattggccttgctgtttggccgcgatatcaaaacaatcggcaagcatgtcggcaatgcattgagggaagagctcaatggattttcagttgtcgcagaatttgcgacaactgcatctgacggtaagacataccaagtcgagcattacaacttggatatgatcctgtcggtcggataccgcgtcaaatccaaggaaggcatctaatttccggcgatgggccaactcagttctgaagcagcatctcgttgatggttacaccatcaatcacaagcggcttgacgcacttcacgccgtcgtcaatgtgctatcgaggcccaccgaaccggaaattgctggcaccgcagagatcttggaacgatatttgccgagtcttgtgctgcttaacgactatgacacaggcaatgtccctatacccaagggcgacgagtcccagtgggtcttgacctatgaggacgcgatgctgttcatccggtcgatgccgttctacacgcaatccgatctgttcgggaggaaacgcaacggttcgttccgaggaatcgtcgcaggactctaccagacgttcggaggcgaagaactgtaccgttccacccaggagaaagccgcgaacctgctgtatcaagttgtcaaggatcacccgttctccgacggcaataaacgttgtgccgccgcactgttcgtgtatttcctgaacggcaacagtatactgggcgacgatgactcccctgcttgtggagggtaacgccttggcggcgatgacgctgatgattgcgctgtccgcacctgcggggaaggacacgatgatcgccttggtcgagaacttccttatacggcatgaatcgcaggagatcaattgagagaccgtcaatgaagggtgcacatcaatcacgttctagcattgcgcgactatctgtacgagtcgtctgaacgatctgctgggagtgctcttcgcggaaaaccaacagcagaccggaggccgcatccactatgtgttgttcaacccttgggccgtgcgcagcaatgaggcattgaacagtttcgattcgccactgatgaagctgctggcgcgtgccatttacgccattgtgggcgtcagcgtcgaggaggcgattgcccccatcacccacttgatcgacaacccgccgcacaccgcgctgtcagcgttcatcaagaccaaacccgtcgatctcactatgaacaccttcgacaggggcaaggcggtccggttggacgatatcaccaaaagctgctgaatcgctagctgtcatagcacaaggccttagacagaacacccagaaatcgaacgggtagatggatcgcgtctccccttgacttccggcaagcgcacgccaatcatagggcgtatgggtattgcaatcaaacgtatatatgaagagccgactgcgtcggacgggtatcgggtgctggtggatcgcctgtggcctcgcggcatgacgaaagagcgtgcggcgttggacctgtggctgaaggacgtcgctccctctcccctcctgcgcaaatggttcggccatgaccccgccaaattcgcggaattccgcatgcgttacatcgccgagctcgacgccaatgccgccgtggacaatctgcgccacatctgcgcggagcatcccgacgtgaccctgctctatgccgccaaggacccgcatatcaatcacgccctcgtactgcgcgattatcttaactgaatattgactcaggacgaccgtcgtttcagtccatctgctagattctcgccgattttcgtatctttgaatcgaagtgcacagtcgtcactccttggattgccaagtaaagggatgcctccaaaccaaatcaatccgtcatcgattatggcaaaatcggaacacgattcgacggtccggacaatgcacccaatagcacgcagccgattaatattccgttctattcgtgttctggttgccaccgcagcagtcgccggcaaacggacatagacttcgatgagcgctttcctgtcggccagtcggagcaattcatcgtcaattgcgctgagtccctgttgtgatacatattcagccgagataatcagggaacgtgcgcaaccggcaatatcctttcggagtatctctgcataattcgtggctgtaacgatgctgccttcgaataatccgtcagaccgggtgtcgagcaacgcatccgcagcatcttcgccctgcgtcgcggccgtcatgcaagcgcgcaacgcttccgcctttgcactgagcatgtccattttctcagtatggtcaggatttaccgaatatccttgatttgcgtatgccttcagccgttttcgatacatgacagcggatagaggcacggtcatgtcaatataatcgtagacacgaacctcagtcttgccttcattctcgcgatgaagtcgccctacatattgcgagagagtacc

SEQ ID NO: 1732 - DNA, 9300 bp, Unknown
  MAG_14  MAG No. k141_20763
gatctggacttcgcccacacgctcgatctgctcatcggtgtggtcgaggacgccatcgagaaccaagaatacgagcagtatgccgccaatctcgaaggctatgagctggacgaaggcgatgaggatctgatttccggccgtggtttcacggaaggcgcgcgcaaggccggtcccaagccggtgggcgtgctggctgttgtaggccgtccgaacgtgggcaaatcatccctggtcaaccgtatcctcggccgccgtgccgccgttgtggaagacacgccgggcgttacacgagaccgtgtgagctatgacgcggaatgggccggcaccgacttcaagctggtggacacaggaggctgggaagccgacgtggaaggcattgaatccgccatcgcctcacaggcacagattgccgtgaccttggccgatgccgtggtattcgtggtcgatgggcaagtgggcatgaccaccaccgatgagcgcatcgtcaagatgctgcgtgccgccggcaagcctgtcgtgctggccgtcaacaagatcgacgaccaggccagcgaataccttgccgccgaattctggaaactcggcctcggcgaaccatactcgatttccgccatgcacggcaggggagtgggcgacctgctggacgtcgcgctcgacaagctcaagcaggccgagaagacttccggctacctcacgccttccggcctgcgccgcgtggctctggtgggccgcccgaacgtgggcaagtcgtctctgctcaatcagctggcgcgcgaagaacgtgccgtcgtcaacgatttggccggcaccacgcgcgaccccgtcgacgaaatcgtcaacatcgatggcgaggactggctgttcatcgacaccgccggcatcaagcgacgccagcacaagctcacaggcgcggaatattattcctctctgcgcacgcaggccgccatcgagcgctgtgaattggcgctgattctgtttgatgcctcgcagccggtatccgatcaggatttgaaggtcatgtccaccgccgtggatgcgggccgtgcaatcgtgctcgtattcaacaagtgggatgcgatggacgagttcgacaagcagcgtctcgaacgcctgtggaacaccgaattcgaccgtgtgatgtgggccgagcgtgtgaacctgtccgccaagaccggctggcacaccaaccgtctgacgcgagccatggataaggccttggaatcctgggatcagcgtattcctacaggcaagctcaacgccttcctcggcaagatccaggccgcccacccgcacccgttgcgtggtggcaagcagccgcgaatcctcttcgccacgcaggcgtccacgcgcccgccgcgtttcgtgatcttcgccaccggcttcctcgagcacggctaccgccgctacatcgaacgctccctgcgcgaggaattcggcttcgaaggcacgccgattcagatctccgtgaacatccgtgagaagaagaagcggaagtgacacgcgcgtaatttgccagatttcatatatctggtagattatctactcggtgcttttgcaccatcgggccgtagcgcagtttggtagcgcacttgactgggggtcaaggggtcgcgggttcaaatcccgccggcccgaccgattagccccggaattccgccacttctgagtggttgccttccggggcttttccgttttcagacaacatgagacaacatgacgacggacttacctttgtaagccattcgtaatggattaaacacggacttcatcttggcgtgttattggaattatcaccgacaattcaccgcctccgccccccgtcgtatgtgtttgccccaaacaggggctagactggttcctattgatttgatgaaagggacccgaattgaccgaaataaacgataaggcccaactggatatcgccgccgctgacgacaccgacgccgtcacctcggatatccccgaagaaaccgtaaacacccccgaagtggatgagactttcgagctttcggccgccaagatgcgcgagcacggcatgagcgaaaccgccatcaaccagttccgccatttgtatgacgtatggcgccatgaagaagcctccagctggattcgtgaggacgacatcgagccgcttggccacgtgcccagcttccacgacgtctatgagaccatcaaccacgacaaggccgtggacgccttcgccaagaccgcattcctcaagctcaatggcggtctgggcacctccatgggattggacaaggccaagtcgctgttgccggtgcgtaggcacaaggccaagcagatgcgcttcatcgacatcatcatcggtcaggtgcttaccgctcgcacccgcctgaacgtcgaactgccgctgacgttcatgaattctttccgcacttcggcggacacgatgaaggcgctcaagcatcatcgcaagttcagccagcatgacgtgccgatggaaatcatccagcatcaggaacccaaactcgtggccgccaccggcgaaccggtgagctaccccatgaacccggagctggaatggtgcccgcccggccacggcgacctgttctccaccatctgggagtccggcctgcttgacgtattggaggagcgcggcttcaagtacctgttcatctccaattccgacaatctcggtgcacgcccctcgcgtacgttggcccagcacttcgaaaacacaggtgccccgttcatggccgaagtggctatccgcaccaaggccgatcgcaagggaggccatatcgtgcgagacaaggccactggtcgcctgatactgcgtgaaatgagccaggtccatccggatgataaggaagcggcccaagacatcgccaagcatccttacttcaacaccaactcgatctggattcgcatcgacgctttgaaagacaagctcgccgaatgcgatggtgtgttgccgttgccggtgattcgtaacaaaaagaccgtgaatcccacggacccgaactccgaacaggtgattcagctggaaaccgccatgggtgccgcaatcggtctgttcaacggttctatctgcgtccaagtggatcgtatgcgcttccttccggtgaaaaccaccaatgatttgttcattatgcgttccgatcgcttccacctgacggacacgtatgagatggaagacggcaattacatcttcccgaacgtcgaacttgatccgcgatactacaagaacatccgcgatttcgacgaacggttcccctacgccgtgccatctttggccgcagccaactcggtttccattcagggcgactggacattcggacgtgacgtcatgatgttcgccgacgccaaacttgaagataagggtgagccgagctacgtgccgaacggcgaatacgttggcccgcaaggcatcgaaccggacgattgggtgtgatttacaacacggtcgaacgataaaaaagatattatttttgtgaaatggcgctcaactgtggaaaaagcctctaagatagagtgagtgtggggaaactcatacgcacttataacgaaacaataactatacgtgaggactaatggcagagggcacaagcggacgtcggcgtttttccgacaaatggggcaagcacgagctggacgtactggctgtgttgtcatccgcgttcccgcaatggctcacatcccgccaaattgcgcagcgcgtcaaggcttacgccgactcgtatggagagctggcagatcaggccgccaaggccgcgttcgccaagcagttccagcgtgatcgcgccaagctcgctgcgatgggcattgccatcgaatcacggcagcctgagtactcgtccaagtcggaaggccaggacttcgcgtcctatcgtctgcagttgggcgacgaaccgcgcatccgcctgatgttcgagccggaagatatgccggtgcttgccgccgccaactatctggctcgttcgatgtcgatttcttccgagccggatcagtcccagctcacccagcatgtgtcgcgcactacgccgcgtgtgccgcagaccccgattcccgggcttggcttggattcgattgcgcctggcttggggacgcagcccattccggattcactggtcaaggttattgattcgcgtcgtttcgccgccaccgttgacgtggatggcgaacacctgaacgtggcatacaccgattccgacgatttggccatgtttgtgcttgagcatccgggggccacgattgtcagcccgcaagaggctgtggacgcttatcatcgccgtttgcacgccgccagccggttcactctggccgacgaatccgccagtcctgtgagcgcttcggtggtttccccgtcgattagtcgcgatgtgcgagagccgggtgatcccgagtctatcaaggctcagaacaagaagaacggctccgctttccaaacgggcagtgaggttgatcgtcgcctgcgtctgatgctgttcctctccgctcatctgggtgaggaattctcgatgagcgagctgggcgaacgctttatcggcaagccaaagaacgatgatgaactcaagaaattcgtcaacatcatccataaggacatcaacaccctgaccaccgtttccgacgatggtgagatggccggcagccagttcttcgatattgactggccgctgctggatgccgagggtattgtttccgccaccaattcgctgggccttgaacgtcttgccggcatttcgccgcaatacctcagcatgctcaccgcctcggtcagctacctggcgcattcgccgttgctgccggacaagcagcgtgggcaggccgaatccctgtatgagcgtttgcgccgtcatgtcagtcccggtcagaccccgtggctgagcctgaccggctatgagctggagccccgaagcttctccatcgtcaagcgtgcgatcaacaccgattcgctgttggacatggagtacaccgacggtacaggtcgtacccgccgcaagctggtggcccccgccaagatcttcattgacgaaggcgtgtattatgccgccgtctacacggacgttggttccgccgcacccaaggacaaaaaggcctacgtctccaaagacaagaccctcgacaaggccaacggcaagccgcgcatctggcaggtactgcgattggcccgtatcgaaaaggcggaactggtcaagcccaccaagcagatcaacatcccgaacatgccggtgagcgaactgcgcaagtggagtttcgacaacggtaccgacgcggtgttcatcaccgatcagcgcgatctggcattcatcaagacattgccgggcgctaccgtcgaacaatgcggtgccggtgaaaaggtgcatctgaccgtttcctccgattcctggttcgtggccttctgcatcgcccacgcgcgtcatatcacggcggtcgccccggaaacgttgcgcaccatgatcgtggcacgcgccgaacgcgaactgagcatcagcgagaacaagtaaggagcctttcatgccttggtggatatggctgattctggccctgttcatgctggccatgattgttgccggactcatctatgcagcccttcatggactccgtgccttgaaagacatgtccgacatcggcggccaactcggtgaacgcgtggccgcgatgggggagcccggcacctctgccgacaccagcgagccgcctctgttcactcagccgctcagcgtggcacagaatcgttatgccgaggcccatgcgaacgtgattcgcggcaaggccgccaagcgcgaacgccacacccaggcatgggcccgctggaagcgattcaacaactaacggaaagcagcaatggcacgtcaccaacaccataagggcaatgccgattcccagacgctgagcccttcgcagcggtacgcatcattccaaaaggtccaacgccatcgggcgtccgcagcagcgcgattcgccgaatccctgcctttcgaactggacgacttccagaccgaagccaatgacgcgctcgaagccggcagcaacgtactggtcgcggccccaaccggtgccggcaaaaccgtagtggcggattttgccatttacctcgcccaggaacgcaacgtcaaagccttctacaccacaccgatcaaggcgttgagcaatcagaaataccatgatctggtcgacgtgtacggcccggacaaggtaggcctgctcaccggcgacacctcgatcaattccgaggcggacatcgtggtcatgaccaccgaagtgctgcgcaacatgctctacgagcgttccaccacgctgaacgcactgcgctacgtgattctcgacgaagtgcactatctggccgaccgattccgcgggcccgtgtgggaggaagtcatcatccacctgcccaagacggtcaagatcgtcggcctgtccgccaccgtgtccaacgtggaggatttctccaactggattgcctcggtgcgaggcgacacaaaactggtgatcagcgaacaccgccccgtgcctttggaacagcacgtcatcgtgcaggcggacgaacacaccgagcccgaggtgctggacctctatcgccgcgacggcaacggcgagcagaccaccaaactcaacgccgaactcatcaaccggctcgaccagttggaccgcaaggccgcacgccggcgcggcgaggaacgccccgataagcgcaagggcttcggcagaggccgcggcggcaaaggcgccaaagaccgtgccccgaaagcggaacgccacaccccgcgccgctgggccgtggtggacgagcttaacttcctgggaatgttgcccggcatctacttcatcttctcgcgcaacggctgtgaccaggccgtggaacagtgtatcaacgctggactggagctcaccaccgatgaggaagtgaccaggattcgccgcatcgtggatgagatggtggaggggcaactcactcaggaagacctgaaagccctgcagttctccaagttccgctttgcattggaagaaggcttcgcttcgcatcatgccggcatgattgccctgttccgtcagatagtcgaacgattgttcgaagaaggtctggtcaaaatggtgttcgccacggaaacactggcattgggcatcaatatgccggcccgctgcgtggtggtagagaaactcgaaaagttcgacggtaccggtcatgtgggcctgacgcccggcgaattcacgcagctcaccggtcgtgccggtcggcgcggcatcgacaccatcggccacgccatcgtggtcgaccatcacggttttgtgcccgccacggccgcctcgctgtcatccaagcgtgtctacccgctgcactcgagcttccgacccacgttcaacatggccgtgaacctgctcaactccagcgactacgagaccgcgcgcgtcaccctggaccagtcgtttgcccagtgggaggccaacgaatcggcctggcagctggaatcgcagattaacacactgaagaacgcgctggccggatacgaacaggcgttcgcatgcgaacacggcgacttcaaacagttcatgaccctgcgtatggagctgagcgacatcgaaaaggaaggccgccgcaaactgaagcacgaagtgttcctgaccgatcaggagcgttcacgcgctttccagaacctcgaccagcgcattcgcgatttgcgcaaggcggaacacgagcatccatgccgcaactgcccggacctccagcaacacctcaaatggggccaccgctgggcccgcgagactcgagaactgcagcgcgtcaccgatcgctacgactcccgcaccgggtccgtggcacgccagttcgattgcatctgcgatattctcaccgggcttggttacctcgaacgtcatgtcaatgcggccggccacattgacatgacgttgactgaaaaaggtctgctgctgcgccgcatctacagtgaacatgacctggaactgtgcgaggcgctgctcgccggcacgttcgacaagctcgacgccaacggactggccgctgtgctctcttcactggtatacgaggccagacgcgggggagacggcgaaccgaggcactacccgggcggcatctccgggcccatcgccatcgcttcgtccaagctcaagggcatttgtgaagacatcgatatcctgtgcgaggatcacggtctggacgagatgcagcggccggatttcggcattctcgacatcatgtatgaatgggcggatggcggttcgctgggatcgtgcctgtacggcaccgacatgaccggcggcgacttcgtgcgcactgccaaacgactggctgacgtgctgcagcagattgctgtcgcccagccgctgccgttcgacgggggagagcggctggcaggcctcgcccacgaagcggccgaccgggtcaatcgtggcgtggtggcctactccggcgtggactgacggggctgtttgacgggagtttgtcagccgacgtcggaagcttggaatagcggccaagtccgaactgttgcgtaaattagtagggttaaagatctttcaaggaggatgccgatatggcagaacgtagcctcaggggcatgagcatcggagcgaaatcgctggagtccgacgacaacgtcgatttcgccgcgcgaaacgatgtggcgtatgtatgcccgaagggccaccgcaccatcctgccgtttgccgagggtgccgaaatcccggacgagtgggagtgccgttgtggttccgtggcccaccgtgagggcgacgccgaccgtgagggcgacgaaatcagcaaacccacccgcacccactgggacatgctgctggaacgccgtagcgaagaggaactggccaccctgctcgaaaagcgcctgcaaatgcaccgtgacggttggattcccgactacgagtgatctcctactgaacaacacgtgaacttgatgcccagtcatcccgactgggcataatcattgttggaacaagtcgcattgtttgacgaccattcaaagcagtcgacatgaacaagggggagtggaatctcaatggcacagcatccgatgaaagtggtcctgttggatctcgacggcacgcttaccaagtccgacggcggcattatcggctccgtcatcaagaccttcgaagaacttggacgtccggttccggatgacgctgagctgcgccgcttcattggaccggcgatcatagaatctctgcgtcgcaatcatgtgcctgcggaagatttggatcgggccgtggatatctaccgcagctactacggagaccgtgccgtgttcgacgatccgaacgagcccggcaacaaggtgcccggacgactggtgaacgtcgtattcc

SEQ ID NO: 1733 - DNA, 5358 bp, Unknown
  MAG_14  MAG No. k141_21204
cgattcagccagcatcagccactcgtgcggcgcggtttgcgcgggcgcagtgcgatacccggtgatcgactcaaagaagtcaccgatgcggaacacgccatcgcggcggttggcaccttgtgcgcggggcgtggtgggggagaacggtatatcgataaatgtcacacggccttgcgcgtccatcgtgaacccgcgtggcagtgcttcataatcggcctcgagctgctcgccgattgcctcataatcatcatcggtaagccatagacagaagcgtgggccaaaatcatggtcttgagaataggcgtcgtcaaagccatagcattccgaaccatgccccaccagtccggcggcaatgcggcccacgtattgcggatactgtgccgtaatcatcggcttgcccacctgtgtccagaacgcgcgtgccaatttgagaccggacacagcgatttcggcagtagcatcgatgttggtattagtttcggtgctggttgcatcggcgctgttcgctgcatgcacgtcatcgttaccgatttgcgcctcggcttcgcgcaggttcgcctcggtgacgcgatagtaatcggtgtccttgccatagcattcggcgatcaccgccaaagcgctgcggtaatgagaggccgcctcgccatatcggtgttcgacatacagcacttgcgcacagccagccaatgcggaggcataatgcgccgagtgcgtcagcttgccagtctcatagatggtcaacgctttggtggcatggatgtgcgcttccttgagcttgctctcctgcagcagtaccagagccagattggtgttcgacgaggccacgtcgatgtcggcatcaggattcacgctcgccgcctcgacgatgtgcaacgcctgcctgagctcgatttccgcctgtggcaatcggttcgtttcgctgtacaacatggagaggttattatgcagcgcagccaggcgtcggtcgttgggagcgaagttcttattggcgcaatccaacgcttgatgatacagatcctcggcctgatcgtaccgcttggccgcgcgcatggcagtggcacaattgatcagcgtagtggcccagctttcggtaccctcaagccccatgtgcagggccaactcaagcgcgcgctgcacgatccactggttctccttgtgacggccttgcgagcggtagaaccccatcgtctcgttgagcacggtcagcagtccggcttcgtctccggcgttttccgcgtcgaccgccgcttgttcaagatacgggcccgccttttctgcggcgttgtgggcgtcgaagatggcgtcgaggccgtggaggaattcgttcacgtcaaagtcatgcagttcgttgccgccctgagccgccgggccgttttcaggcgcatcgaaatcatgtgcgtgtttcgcctgcatgccgagcagtgcctgctccagccgcgcgtccatcgcatcatcggccatacataatctccttcgtcgtgagataccgattattgctaggttccagcgtactgtgaacgatttggagaccgccgatgtgagtgtcgttacagtgtgcggcggctgccggagctggtgtatgtgcttgtcgttttccccgttgtcgtcctcagtggaaataggctcaacaggcatggaaaagccccgcatgctatgacgtgcggggctattcctcggtattcagttatcggttattgccgtacctgtacaggcgtcggacaatcgttcagcgttgctggcgacggcgcagcacgatggtcacgccaccggcggcggcgagcaggctgactgcggctaagattccagcgatggaagcaccggttcccggcagatcggtcttgttcggcttggccgtcggcttcttgtcggcgttgggtttgccgttctggttgttgttgccgccttggttgttgttcccaccttgttcgccggaaccgttggcgtgctccttttcggcggcggcgatctcggcgtccgtgtaaagcagctgcgggttgacggtggagacggtgccgccgaacgtcttggcttcatcggcgctcagcgtcttggccacggtgaactcagacggcttggcgctgccgagcttggtcacgccgaagtccacgccgttgacatacaggccgagggcgattggcttagggccattcgcgtagaccggcaggtcgaaggtcagggatgccttggtgccttcaacggaggaggacttgagctcgatgcctgcaggcgagtcatcggccttgacatccttgtgatcggcaaggtagtcgatcagaccttgcacatccaccgtgccggtcagctgcggctgaccctgcgcggtaaaaccggtgaagccgtcgccgccggtcagcaggaaggagttgccggcgaccgtcacggtgtcggtgtccttgatctgcttgccgtcaacgaacacgtcggagacggtggcgaccggtgccttggtgttggcgtcctcgaccagcgtgtacacgaaggtcacgttcgaggagatgccgagacggaccacattggacttgccgtccttgatctgccactgctgggcgagcacgtccttcagctgcttgccggtgagggtgaccacgctgttatcgttgccgaacggcaacatgctgtacgcctccttgacggtgatctgcttgtcgccgtcaagatcgaggttgtcggtgcgcaggccgcccggattgatgaagccgatggaggccttctcgcccacgggcgtcttcttggcggattcgagtgcggcatcggcgttcagcgtgccgagctgggtttcggcgctccagttgcccttggcgaaattcgctgacttgtcgatggtgccgacgaccttcttaccagcctcggcggaatccgcctgagcctgcttgtagaccttggcggccgggccgttgtcgtcaccctcgaatcccttggccggagcggtgccgtccttgttggtcacgtacgtcacgtcatactgggaggcgttctgcacggtgaccttggaatccttgccggaaccctcgatgtacagatcctggacagctgcatcctggccgtacttgccggcctcgatgatcggcgctccggacttggtggtggtgccgtactcgttgcggtggctgtggcctgcgtagaccagatcgacgttagcgtccagaccgtcgccgtcggaggcgatggtgtcgccatcctcatggatcagggccacgactgcatcggcctcgccgttggactcatcgccatcggacagctggtcggccaccttgttcacagcctgaaccgggtcggtcaccgtgacgccttgcatcacgctgggggagactacgttcttcagatcggaggtgatggcaccgacgaaggcgacctttttgccgttgacggtcttgatggtatacggcttgagacggtcggaagtcagcgagccgccggtgatgttggcggcgacccagtcgatgccgtacttcggttcggcgatgcggttgttgaagtctgcagtgcccttgtcgagctcatgattgcccaaggcgctcacactcagatcccatgcctttgccatgttcagcgtcggagtgtcttggaaataggaggattcgaatggggaagcacccacgaggtctccgctggagacgaacacgctgttgcccgggttgtgctgcacggcaagcttctgataagcggcttcgacccactggccggtttcgatgtgtccgtggaagtcggtgatgtcgaacacggtcacttgcttggcgtccttaccgggttggctggggttgccggagccaccgttgtcggaatccgggtggttgcccttgtcggcgtattcctcgccgatcacggacggggtggctgcgccgggctcgaccttgacgacatcgccgttctcgttcaacgtcacggtggagctcagagctgcggctaggttgatgcgctgccatccgtcggatgaggaatccagcgggtagccgccgtcaatcgcggtcttggtgaggatggcttcgcgctggtcgcggtgcaacttcgggtacgcgatcttcaacaagtcggcagagccttcaggcgcggtgaatgcggtgccggcggtggtcttgccgaaaccgtaggtcagacggttcgtgtagacgcgcaacgccgaggcgcggtcggtgacgggctccttgctcacggcatccacaaaggcgttctggtaaccgttggaggcgttcgcgccaaggttgttcacgcattcggtcacagtcgcgtaatcggtgtcctgtttggtggcgtggccgtccgccacgcacttggctgccagataggactgcagctggtcggatgccggcttgacgtacttgtcgtagtaagtgccccagtagtagccgtttgccacttcgccgtcgatgcggccgcccatgatgtcgagcggatagtgcacgccgagcacgatgcggttgttgcccgcttcggaggtgcgtgtcaggatctctggagcaagttgtggcagcatgcctgccagagccacgccccaggagtatgcgccggtggtgtggccggacgggaaggaaccggaaccgaccagcccgtcgtattcggcggaatgcgcgttgccttgggcgtcagtccagtcggggacgcgcatgatgttctcgttgatgttcgtgatgtcgttcttgccgccattggtgcgatcctcgaaaggacgaggatgctggaagtgcttcttggcggtagaggtggagattgtatcgtacttgaagatgtccgcgaccttcttcaggctgccgtcggccagaccggcggaaaaatattcgccgagcaccgggcccagggagtccggcaaggtctcatcggcgctcatatccgcgtccaccagagcgcgctgctgctgtgcggtagcggtcgtgccgtctccgtcttcggcggcggcgttgttgatctgttggatgtaggcgtcatcgtgatcgagcacggtcttgttgagcaccttgccgccagcggtttcggtggccggctgccagtagctgtcatattcgccaagcagctgcacaagattcggcttggccgcacgcgtctgcggaacggctgcatagccggtgacgtcattcgcgtcgaccgaggcttcgtaacggccttcggtggtggccgcgtacttggtttcactgaacgcatccgtggcgccgctggcggcgatgccgctgataccgaccgtggacgctgccggtacggattcatctgcagaagctgtcgtggtcgcaatcgcaacgctggacagcgtcgctgcggcgacgagtgtggcaatcatcctcgccgtgaacctgatgggtttcactgtattcccttccttcatgaggcatcaggaaagatgctctttcatagtgagaacttagaaaggca

SEQ ID NO: 1734 - DNA, 7075 bp, Unknown
  MAG_14  MAG No. k141_
acggagacgaggttgacgccggcctgctgcatgagggctacatcttcgtcccacacttcctcaggccattggtcggggttgtaatcgccgccgtaccagatgcggggcttgttgcccgcaagcggctgcggccacttgaactctttacgttccatgatgattcagctcctttattgaattttatcgataatctgcgtccgcgggaataaacagcccacagggctgtttgcctaacggctcagctcgtcagagggggggcttggcactattttacctccctctgatgaggaaggttgtctcggcggagccgggacggagggagagaccccgccgcgaggcggtgaagacaccgcgtcggcggagccgactccatcactccttgacggcgcctgcggcgagtccggactgccagtacttctgcaggcacaggaacgcgatcaccagggggatgatcgtgatcagggagcccgtgatcaccaggttctggatcgcctggccgcccgcggtcgaggcctggtccttccactggttcaggccgatggtcagcgggtaccagtccgcgtccttgagcatgatcaacggcaggaagtagttgttccacgtcgccacgatcgtgaacaacgccgtcgtcacgatgttcccgatattggccaacaacacgctgggggcgagcacgtcgatgtccgtgcccaggaaatcgttcaacgaacccaccaggccgtacttcgcgccatacacgaaaccccagatcaacgtcgacaccaccgccggcaccgcgtagggcaggaacgtcgagatacggaagaacctcgtgccatgcagcttcatcgaatccaacgccagggccatcaaagccgacaggcacagcatgatcggcacctgcacgcacgtgaacagggccacacgaccaacactgctccagaactggccatcacccaacaggcgcgcgtagttctcgaagccgacgaacttggtgccgccgatcatctgcttcttgaagaacgaaatataaacggcgtacacgatcggcacgatgaacacgaacacgaacaccaccgcaaaaggccacatgaatttccatccacgccaatcggccttgtgcttattcacacgagccttgcccgaatgcacgggcgcagctgcgatatcggctgaagccattcccaacccctctccttcgaaggttgaccaaaatgtttgcgttatcatcataacaccatttgtaacattgtccaatcgtgttgagtaccgtgttgaattaagggtttctcagtcactctgctacaatggtcacgaagacaacgatgttatcgttaccgtaagcggccctaagataagcgttgcaaacgaaacaccaacattaatgagtcaagcgagggtgaaatgtcgaggccaacacaggtgtccatgcaagacatagcgaaagccgccggcgtttcgccacagacagtgtcccgcgtggcgaatggcagcgatgcggtgaaacccgaaacacgccagcgtgtcgaagctgcaatgaaacgccttgggtatcgtccgaattatgcggcccgagccctaaagcacggccgcttccaggatatcggcgtggtgatgttcaacaccaccgcgttcggcaacgcccgcatccttgattctattgtggccaacgcggccgatgacgattattcagtcaccatccagaccatgcgccacggtgcggaacgcacgctttccgccgccatcgatcgcatgcagcgtcagccggtggatggtgtcatcgtagtgctggaggaacgcatctccgatttcgtcggatacaagcctccgcgagaacttccagtcgtgctcatctgcgaatccgccgccgaccactgccccaccgttgacgccgaccagtatggctgctcgaccgctatcgtcgattacctgatgagcaaggggcacaagaccgtctaccacattgccggaccgtccacctcgcgcgccgccgaaagccgcgcccgcggctggcgagaagcgttggaacaaatgggagcacgcgtaccgagcatgtacatcggcgattggtgcgcggattcaggctaccaggccggcgtggcgttggcccacgaccccgactgcacggccatctacgccgccaacgaccaaatggcatacggcgcaatgctcgggttgcagtcagcgggcaagcgcgtgcccgaggatgtcagcatcgtgggcgtcgatgattcgctggtagatatggttccgcgcttgaacctgacgaccatgaagctgcgctttgacgacattggcgccaccgccttctccatggtccgccgtcaatgcgaaggcgagaagataccggtcggcgtcaaaaccgtaatcccgccggaactgatcgaacgcggttccgtgcgcgacatcagctgacgagcggcatgtgctggcatccactggtacctgtcagtgattcacctgtcagtgatccataggcaattccgcaccgaccaatcgactcggttgtgcaatattctgcacatttccaactatgtgcagaatattgcacactttactatactgtgatatattttgcacatgattgtcatggatatcgccgaatacgcgcggcttatcaaggatgaaaggcaacgccagggcatcagtcagaccgacatggcccaacggctgggcgtgtcacgtcgctggctgatcgaatttgaacacgcccgagtccccaatcccggattctccaccattctcagcgctctgactgagcttggcttgtcgctggatgtctgcaaaaccccgcagcccgccgaactctatgaatggtgacaccatgagcgaaaacactctcaatgcatttctcggcgaaacacccatcggccagtttcgaagaacaaacgatggcagcattattttccaatatcacgattcctatcgttggtcgcaatcacccacaccaatatcgctttccatgcccattaccgcagccgaatattcaggcgacatcccgcgtaatttccttgaggccctggtcccggaatcccctcaggcccgagatgaagccatgcgattgcatcatgcccgatcgacaagcgcatttgatctgttgcaagccatcggattcgatgccaccggcgcattacggctgtccgccgacccgcacttgcccatagatgacgattcgcttattccaatcagcgattcgcagatcgcgaatcgactacgcgcagccgcccccacaggcatccagtccgcaagcgtagacgagcattggtcggtcgcgggacagcagggcaagatcgcactgaggaaccgcaatggatcatggttctccaccactggaatcgcgcggacgactcatatcatcaagcccggcataccgacccttccacaccaagcattcaacgaacacatcaccatgcgcattgtggaggcgatgggaatacccgtggcccacacctcttttcacatctttgatggggtcccagccatcatcagcgagcggtatgaccgtatagtgtccgccaatggtacggtgacggccctgcaccaagaagactttacccaagcgctgggcattccctcatcgctgaaatacgaggaacacaacggcccaacgtccaatgcatatgcggaaatgttgcgcaagcacggtctgcccggtcaggccgaaagcaatatccgagccttcaccgacggcatcctcgccagttatctcgtcggggcaacagacagccacgccaagaactactcgctattgctcgatggcgcgtccgtgcggcttgccccgctctatgaccttgcttcggtgtttccttatttggggcatggcaagcagatcataaatgccactttggcgatgaacatcggcggacgccgagatcttcttcaattacgccgcaaacatctggaacgattcgcacagcggatgggattagatgaggaatccgtgattttacgattccacaccttggtggataggctgccggaggcattcgacagcaccgtgcaacccgctcacgacgttatcgcgagcattggtgcgcaggaattcatcgatagctatcgcaagcgcatcatgatggtgtacgacgatgcaatgagctggatggccagtcgaaagggacagtgattcggacgggcggggattggtctcgccatcccccccccctaagaaatcagatcttaagcggcacacgggaaacgaattcgcgcttctcgcctgttattggatcggtgaatcgtagcacacgcgccactaattgcagcggctggctgaaatcgtcgtaggggcgtgtctggatgcgcgggtagaagtcgtcgcccacgatgggcaggccgagcgaattcatgtggacgcgcaattggtgggttttgccggtgcgcgggtggagtgtgtagcggcagatggggtgatttcccggatggggaccaccctccggcgcttcgcgccacctcccgccagcgggagggaaacagaggtcaccgcgctcgatgagggtttcggcgttggccaaacccggttcctcgaatgcggccatcgtgccgtgttccttggtgatgtgcgatcggcgcagcaatgggaacgggcgtggcggttcgacctgcatgatcgtgccgaatcgtgggccgctgatcggccggcagggtgccaggcattcatagatcttgacggcctgccggttctggaacagcatctgatacgcgccgcggcaggccgaatcccgcacgaacaccaatacgccggcggtcatgcggtccaatcggtgcgctggcgtgatgtccggctcccccagccgctcacgcaatcggatcagcgcggtctgccgataccacatgccgcgtggcatggtggccagaaaatgcggcttgtccaccacgatgatccgctcgtcctcatacagcacgtccatctcaaacggaatatgaggctcgtcaatcacataccgatgtggcttactcaacggtcacggacttggcgaggttgcggggcttgtccacgtcgtagcccttgagctttgccatgtccatggcgaacagctgcagcggcaccacgtcaaccagcgggctcatcagcgttgggcaggcggggcgccagaacaccacgtcagcgtaccgttccacatccgggtcgccctgctcggccacggcgatgatgtacgcgccacgagccttgacctcctcgataccagagatcaccttggcgtgcaacacattgcggccgcgctgcggcggcacgatgaacaccacgggctcaccctcgtccaccagcgcgatcggtccatgcttgagctcgccggccgcgaagccctcggtgaacgtgtaggcgatttccttgagcttcaacgcgccctcaagcgccaccgggtagcccacgtggcggccgaggaacaagaaggagttggcgttcaccatgcgctcggcggccgcctggatggtcttgggctgggtgtcgagcacccactgaatcttgcgcggcatgtctttcagggagtcgagcatctgatgaatctcatcgcggaacatcgcgcccttgacctgcgccagatacaggcccagcaggtaggcggcggtaatctgcgccacgaacgccttggtggatgccacggcgacttccgggccggcgtgtgtgtagagcacggcgtcggattcgcgcggaatggaggcaccctgcgtgttgcagatggccagcaccttggacccctgttcgcgcgcgtggcgcagggccatcagcgtatccatggtttcgccggactgagaaatggccaccacgagcgtacgcggggtcagaatcgggtcacggtaacggaattcgtgcgcgagttcgatttccacggggatacgcacccagtgttcgatggcgtatttggctacctggccggcgtagctggcggtgccacaggccacgacgatgattttgtcgatggccttgaagtcgtgttcgtcgatacgcacttcatcaagggtgatgtcgccattcgtgtcgaagcggccaagcagggtgcgctgcactgcggcagggtcttcgtgaatctccttgtccataaaggaatcccagccgcccttttcggcggccgaagcatcccaatccacggtgtaggtcttcgggttttcgaccacgttgccgttgaaatcggcgacgatgaccttgtcggcggacacgcatacggcctgatcctggtcgacttccatggcgcgcttggtgtaggccacgaatgcggcgacgtcggaaccgaggaagttctccccctcgccaaggcccacgaccagtggcgaatcatggcgggctccgaccacgatgtccggctggcggcagtcggtggccagaatggtgaacgcgccttcaagcatgcgggccatacggcgcacagccttgaacaagtctggcttgccttcgtccgcgataatcttgtccacgatcttgccgagcagcttagcggccacctcagtgtcggtggcggaggcgaatcggtagccttcggcttgcaggtcgaaacgcagctgagaggcgttttcgatgatgccgttatggatgatggccaccttgccgtccatgctggtgtgtgggtgggcattcacgtcgctcggctcgccattggtggcccagcgcgtgtggccgatgcccaccgtggcgagcggcatcggcttgcgctcgatgtcttcgaccaggttcttcaaacggccggccttcttgcgcacgaccaccttatccatgccgggcgcggtcagcgccacaccggccgagtcatagcctcggtattccagacgttccaggccttgcaggcagacctccaaaggcttgccgcatgccgtttcaatatttcccgcgtatccaacgattccacacatggctcaccagcctagcggacgattattgcgcaaagcgaatccaacccgccgcctttgcaggattggaacatgccccttcgtgaaaagcgtacgctgagttcatcagcgtacgcttttggagctgcaacaacgagccttcctacagcacgtgctgtaggcggagccgtaaagcggggagcccagtgggctccccgtaggcgacgccgaagcacgacagtgctgcggtaatataacagccttcctacagcacatgctg

SEQ ID NO: 1735 - DNA, 8709 bp, Unknown
  MAG_14  MAG No. k141_21533
aggccatcgaagagatgaaccgccgcgccggagcccagggcatcggccgcatcgacctcatcgaggaccgcctggtcggcatcaagtcccgcgagctgtacgaggctccgggtgccgtggctctgatcaccgctcaccaggaactcgaaaactgctgcctcgaacgcgaacagcaccgcatcaagcgcgacatcgacaagcgctggggcgagctggtttacgatgcgcagtggttctccccggctacccagtcgctcaacgctttcatcgaggacacccagaagtacgtgtccggtgagattcgcatggtcctgcacggtggccgcgccgtggtgaccggccgtcgttccgactcctcgctgtacgactacaagctcgccacctacgattccggcgataccttcgaccagaggtcctccaacggcttcatcgacatctatggcctgccgtcccgcgtggccgcagcccgcgacgtcaagttcggcaacggcatcgaggtcccgaagaacaccgtcgagtgattcttactcagtcgcccccgctgcgaggctgtcggcatagctgactgggagtggtctttgaaaggactgtcctcagtcacactccatgtgacagccctcgccagcgggggcaactgtatgtttgaacacattgctacgcttaaacacagctattttcacttttcaaggagccttcatgactgagaacaacgaacatctggccctgtggggtggtcgctttacgtccggtccgtcgccggaactggcccgactgtccaagtccacgcagttcgactggcgcttggccgacgacgatatcgccggttcccgcgcccacgcccgtgctctcggccgtgcgggacttttgaccgccgacgagctgcagcgcatggaggatgcgctcgacacgctccagcgtcatgtggatgacggctccttcgcccccatcgaagacgatgaggacgaggccaccgccctcgaacgcggactgattgacattgccggcgacgaactcggcggcaaactgcgtgccggacgctcccgcaacgaccagatcgcctgcctgattcgtatgtggctgcgccgccactcccgtgcgattgccggactcctgcttgacctcgtcaacgccctgatcgagcagagcgaaaaggccggccgcaccgtgatgccgggccgcacccacatgcagcacgcccagcccgtgctgctcgcgcaccagctcatggcccacgcttggccgctgattcgcgacgtgcagcgactgatcgactgggacaagcgcatcaacgcctctccgtacggctccggcgcactggccggcaacacgctcggcctcgacccggaggccgtggcgcgtgagctcggcttctcccgcgtgaccgacaactccatcgacggcaccgccgcacgtgatctcgtggccgaattcgcgttcgtggccgccatgaccggcgtggacatctcccgcctgtccgaggagatcatcatctggaacacccaggagttcgccttcgtcaagctcgacgacggctattccaccggctcctccatcatgccgcagaagaagaacccggatatcgccgagctcgcccgcggcaagtccggccgactcatcggcgatctgaccggtctgctggccaccctgaagggcctgcccaccgcctacgctcgcgacctgcaggaggacaaggaggccgtgttcgaccaggtcgatacgctcgaagtgctgctgcccgccttcaccggcatggtcaagaccatgcacttcgacagcgagcggcttgaagaggaagccccgaccggcttcgcgctggccaccgacatcgccgaatggcttgtcaagaacggtgtgccgttccgccatgcgcacgagctctctggtgcctgcgtcaagctcgccgaaggccgcggccaggaactgtgggatctgaccgacaatgacttcatcgagaccttcgccgcgttcctgccggccgacaaggctccgggagtacgcgaagtgctctccagccacggttcggtcgactcccgcaacggcaagggcggcaccgcttacggtcgcgtgcgcgagcagatcgccgacgccaaggccgaggtcgaagaactcaagctcttccccgcatccacgtcggatggctccgcctacaaagcccccggcacgttctagtcccaatagagctccctcgtcagagggagctctattttgctgttgtcactgcaacggcatacactgagaaatcgtaacgaacgggagccgtgaggctgagaggaagtcgccagacttcgaccggggaacttgacgcgggtcatgccgccgtaaggaatcgttgttgcagatttgccgggttctccgatacagctttcattccgtttgcataattcagccgtgagacggtcgtgatggagccaatacatcacagcggtcgaacggtcgcatgattgggttcatgaatgggcgcaccacttaaggtacggttcgtttcgtgcacccttttttactatctgaaaggatattatgcaggtcaacggagagcaggtcacgctcgagacgccggtcagcgtcgccgattatctcgaagcgcacggattccgcgccgagcgtgtggccatcgaactcaatggtgagattatcccgcgcgataagcgtgccgacgccatgctcgacgaccagtgcgtcatggaaattgtgcagtttgtacagggtggatgaaaggaaaagctatgagcaatattaatccggttactgaagcatctgttgaggcgactccgctgccgccgcagcccgccgtcaccaatccggtcggtaccgccgcgccgattctgccagtggaagacaagccgctgaccctgggcggtcacgagttccagtcgcgattcattctgggctccggccgctacgacctgaacctcatcaaggccacggtcgaacatgcaggcacgcaaatcgtcaccatggcactgcgccgcgcgcagaccaccgagaacagcgtgctcgactacattcccgaaggcatcacgttgctgcccaacacctccggtgcgcgcaacgccgaggaagccgtgcgtatcgcccgactggcacgcgaagtgtgccacaccgacttcgtcaaggtcgaaatcgaacacgagaccaagtacctcctgccggacaacgccgaaaccatccgagccaccgaaatgctggccaaggaaggcttcgtggtcatgccctacatgttcccggacccgattgccgcacgccagctggaggaggccggtgccgccgccgttatgccgctcggttcgctgatcggctccaacatgggcctgcgcatgcgtgacttcatcgagatcatcatcgccaatgcgcatgtgccggtcatcatcgatgccggcatcggacgcccgagtcaggcatgcgacgccatggagatgggtgcggatgcggtgatggcgtacacggccgttgcctctgctggcaatatcccgctgatggctgaggcgttcaagcacgccatcgatgctggtcgtgcggcgtatctgtccggtctgggcaaggtgaccgagggacaggccgtgccgtccagtccgactacgggatatttgcactgacacttttattagctcccctctctgaggggagctggccgcgtagcggactgaggggagctggaaacatggagaaaacatggcattgactgatgaacaggtggagcggtacgcgcgccatctgattttgaaggggctgggcgtcaaagggcagaagcggttgttggcctccagcgtgctcatcattggagcgggcgggcttggctctccggccgccctgtatctggcggcggccggcgtcggccatatcggactggtggacggcgatgtggtggatatgagcaatctgcaacgtcagatcatccataccactgcacgtgtcggagcgcccaaagtggaatccgcggccacggccatccgcgcgctcaacccagatgtgacggtcgacacctactacgagctcgtcgatgccagcaacatcgccggcctcatcgaaccgtacgatctggtgatcgatgccaccgacaacttcgccgcaaaattcctcatcaatgacgcatgtgtactggccggcaagccgtatatccatgcgggcgtggtcgggttctccggccaggtgatgaccgtcatcccaggcgaaggcccctgctaccgctgcatcttccgcgatatgcccgccgcaggtgaaattccgacctgcaaggaggccggcgtgctgggcgcggtggtcggtgtgatcggcagtctggaggcgactgaggccgtcaagctgattgccggcgtgggggagccgctcgtggctcgtatgctcactgtggatgccctgaccatgaacatccgccgtgtgccgttgccgaaccatgtgcccgactgcccggtgtgcggtgagcagccgaccattactgctattgatccggccaactatattcagccggcctgcgcgatttagagctatgtggcacccctccttgaggggagccaagatcggaacgagaggggaagaacatgcctattgctttgcgtaatgcggtcgatgacgatgagagcagtgaagcatcgtaccgccgcatcacgccggcggaatttgccaagctcgacccgaatacggtcacgctgctcgacttgagggaaccagccgacttcgccgcccacccggtcgaaggtgccatcaatgcaccactcgaccctctggcccatgtgctcaaaaccgtgcccacagatcgaactgtcgtagtctattgtgctcaaggatggtggagcgaggaagtagctgaaatccttgccgatcgcggttacgatgtagcaagcctcgatggcggttttcagggttatctcgactatcttgaaacccaccacgattaacggttcccgttgtcgttcttttggatgagtgtgcacggacatacgtgtgccctacaatcggtcacggtattactcgatggattcttgaatatcgtcgggtaatcgtaattcacaacaagggattgcactgaaccaacccgaacggagggtcgaaaccgtgggacatctgctcacccgaacgcagattcaacgcctggtcgccaagcacggccgtgaggtcatcgagcatcgccacatgcagatcgaacgctgctgctaccagcacggcaacgtcaccacgttcgaacattccgtgcgtgtcgcctgcctggctgtgtggatggccgaccgcgcgcacctgtggtaccgcgtcgacctcaaatccctgattcgcgcggccctcctgcacgattacttcctgtacgactggcacgactgggataacggcgaacaccagtggcatggcttcacccatggccacgccgccctggtcaatgccctgaaggacttcaagctcaacgatatcgaacgcaacagcatcgagaaccacatgttcccgatgaccctggtgccgccgcgctatatcgaaggctatctggtcaccttggcggacaaatgctccgccaccgccgagaccttctcgttcgaccggttcaacaagcgcgcgttgcccgccgcgaagccctacgccgagatcgaagcccgtcgatgatcaccacactcgaacattatttcctctggtttctgttctacagtttcgtcggctggacgtacgagtccattctcgtctcctgccaacagcaccgcttggtcaaccgagggttcctcaacggcccgctgtgcccgatctacggcaccggcgcgatactcggcgtcgccattctcggcaacgtacataacccgatcatcatcttcctgatttcgatggtgggcgccacgatactcgaatacacaacctcgtgggtcatggagcagctgttccacgcccgctggtgggattactcgaatttccgcttcaacctccaaggccgcgtctgcctgctgggcgcgttgattttcggtctcggcggcgtgggcgtggtacttggttcgcagccatatgtcgagcgggtcacggatatgattccgctgccgatgctgcatacgctggtcacggtactggctctgatcaccatcatcgacttggcggtcacggttacgggcatgctcggattcgagcaggtgctcgattccgtcgctcaggtggtgcaggatgtggcggcacgcgccggtggcacgtggcagcggggctccagtgcggtatccgacaggatgcgtgagttttcgcaggatacggttgagcgtctgcgctgggccgtcaatggcgtcatcaacgcacagcagaagcgtatgctcaagtccttcccgaagttccaggtgccggatcgtcaggacatcatcgactctttgcgcgaacttatgggcccgcgccgctagaataaggtgttttactgaatcgcgcggctcggctggtgttcggcactgtcgccatgttctgcgaaacttgactgtgcccaattgggcagtctcattcacaattcgatagggagaagcgacaagctatggctcacgtcaccgacttcaaggaagcgggtttcaacaccctgcttgaggaactggaatggcgcgggttgatttcccagtccacggaccgggatcgactcgcagaagcactgaacggcgagcccatcacctattattgcggcttcgaccccaccgctgcatcgttgcatatcggcaacctcgtgcagctcatcaacatgcgtcacctgcagcttgcgggccatcatccaatcgccctggtcggcggcgccaccggactcatcggcgacccgcgccagtccggcgaacgcacgctcaacccgaaggacgtggtggccggctgggccgatcgcctgaagaaccagatcggtggcattctggacaccgaaggcgcgaacgccgtgcgtttcgtatccaattacgattggaccgcctcgatgaccgtcatcgacttcctgcgtgacgtcggcaagaacttccgtctgggcaccatgctcgccaaggacacggtcgcccgccgcctgaactctgaggaaggcatctccttcaccgagttcagctaccaggtgctgcagggcaacgactttctccacctgtttgacgaataccactgcacgctggaactcggcggctccgaccagtggggcaacctcacctccggcctggacctgatccacaaggtgcgcggtgtggacgtcaacgtgttcaccagcccgatcatcactgatgcttccggcaagaagttcggcaagtccgagggcaacgccgtctggctcgacgccacgatgctcagcccgtacaagttctaccagttctggatcaaccgcccggacgtggagatggaaagcctgctgaaggcgttcaccttcctgcccaaggccgaaatcgaacgattggtcgaggaatccaagaccaaccccggcaagcgcgaggcccagaagacgctcgcctgggaggtcaccagcttcgtgcatggcgaggccgctacacaggctgccatcgatgcttccggtgcgctgttcggccgcggtggcaacctcgaagacatcgacgaggaaacgctggaatccgtgctcgacggcttcaaggtggttgacgagaacggcgagcacgtcttccccgtctccaagccgggcgatcgcgtaatcgacgccgcccaggctgccggactgttcaagtccgcttccgaggcacgccgcgccatcaagtccggtggcgtgtatctcaacaacaaccgtatcgaggatgaggagcaggtgctggccgaagccgacttcctggcaggccgcttcgcgctcatccgtcgtggcaagaaggcgctcggcgccgtggaaaaccgttaatcaacaacgaattaaggaaaacaagtaatggcagaaggtaacgagcgttccggcaagtcctacggcggcggccataaggggtatggcgatcgccgaccgggcaaccgcggcggcaagggtttcaagccgcgcggcaagggcggtttcaagccgcgtcatgacggtgaaggtttcaagccgcgccgtcgtgaggatggcgaaggctacgcgccgcgccgtgatggtgatggcgagggccacggcggctaccgcaagtcgtacggcaagggtggcgacttccacaagggcggccgctctggtttcggtggcaagggcggctatcgcggcaacggtccgcgccgcgatggcgacggcttccgtccgcaccgcgaccgcgatggcgagggcttcaagccgcgccgccgtgaggatggtgagggttacgcgccgcgccgtgatggtgatggcgagggccacggcggctaccgtaagtcgtacggcaagtccggtggcttccacaagggtggttaccgcggcagtggtccgcgccgtgacggtgaaggtttcaagccgcgccgcgaaggcggctaccgttcccacgaaggcgagaacggcgagaacccgcgctaccagcaccgtgacaacgatcgtcgtgatttccgtcgcgatgatcgccgtgacttccaccgcgatggtgagcgtcgtgacttccgtcgtgacaatgatcgtcgtgacttccgccgcgatgaccgaagggataacgatcgccgtgatttccatcgtgatggtgagcgtcgcaacttccgccgcgacgacgatcgccgtgatggcgatcgccgcaacttccgcagggacgaccgccgcgacaacaaccgtcgtgacggcgaattccgcgagttttcgcaggaagagaagcgccagtaccgtgaggagaa

SEQ ID NO: 1736 - DNA, 6930 bp, Unknown
  MAG_14  MAG No. k141_21796
ccggacgtcaccgtcaagtggcttgacgccccgtccgatggttacgaagacaagctgtccagccaggctgcggccggcgaactgccggacatcgtcgacggcggcaactccatcctgtacggtcttgccaaggccggcgcgctgctcgatgtctccaagcaggctccggatgcggaaaaggactactacgaaggcgcatggaagtccgtgaccatgcagggcaatggcatcgagaagggtgcctacggcctgccgtggtatgtcaacgatggcccgacctactggaacaccgagctgatgcagaagtgcggccttgatccgaacaagattccgaccacatgggatgagtacttcgccgccggcgacaccatcgtgcagaactgcaaggatgtctacctgggcaccacgatgggttacaacaccgaagatctgatgaccgcaggcgtcaagtccttcatgaacgatgaccacagcaagtacaccttcaatgatgaggccggtgtcaagcagatcagccgcttcgttgagctgtacaagaagggcggcatcccgccggaggccctcgactcctcctggagccaggccgccgatctcttccagcgtggcaacctggtctccatggccggctccgcctactccgctgacggcttcaagcagaacgctccggacctttacaagaacctcgcagtcggcccgcgtatcagcaacgacggcaagtccgcttccgtggcctacgagatgctcggcatcagcgccaactcgaagcaccccgacgttgccattgacttcgcccgattcgtgaccaacgagaagaaccagatcgagttcgacaagaaggcctccgtgttcccgtccgccaaggggggtctggatgacgactactacaagagcatcgacgaaagcacccttgagggcaaggctctgaagatcacgctcgaccaggtcaaggacggctacggctctcgtccatccgagttcaccgacaacaacggctccaagaacttccagcagcagatcgccctcgctatgcagggcaagcagaccgccaaggaagcccttgacaagtccgtcgagttcgcaaacgagaagctcgcacagtgagcaacgcggcactcgccgctgacaggtcggaggcccgcacggcctccgaccggcctgaaccgatgaacctcaaccacggcaagaagcagaatcgtagcttcggcaccatcattgccccctacctgtttgttctgccagcgttcgcgattgtgtttgtattcatcgtccttgcggcactcaacactttcaggcttgctttcaccaactccacactgctccgtccgggaaccttcgtcggactcgaaaacttcatcaaactgttccatgacgagtacttcctcacggcactgctgaactccacactctacgtgatctgcgtagtgccgttcatggtgatcctcccgttgatcctggcctatctggtcaagggcaactcccgcatcatgggcttcttccgcaccgccttctacatgccggtggttatgtccgccgttgtggtgggtatgatctggaccaacctgctggattccgccggtctggtcaactccgtgctcaaggcattgaagatcatctccaagccggttccattcctcaccgatcgatggggcgtgctcttcagctcgatgttcgtgacaatctggctgggcctcggctactacatggtcatctacctgaccgccctcgccaacatcgatgaatccctttacgaagccgcctccctcgacggcgctggccctgtccgccagttcatctacgtgacaatgcccggcgtgcgctccacgatgatgctcatcatgatgctgtccaccatcgccgcattccgagtcttcaacgaaatctacgtgttgaccaacggctccgcaggccccggcggcatggatatgacgatgtcgatgcttatcaagcgcgaaggcaccggtatccaggcccgcactggttacgcgagcgccatctccatcgtcgtgctcgtcatcgtcggcgtcatgctcatcgtgcagcagatcgtacaaaagcgaggtgaggactgatgaataccaacacgcataaggtcaccgtcggcaaagtcgtccagtatctgattctgattctgatgttcctgctgctcgtcggcccgttcgtctgggaactgtccctgtcgttcaagggcaagggcgacaacgtctacgccgtgcctccctacctgatgccgaagaccccgacgctggacaactacatttccgtgttcaagcaggtcccggtattccactacatgctcaacacgctggtggtctgcctgatctccatcttcggcaacgtggtcttctccacgatggccggctacgcactgggacgcctgaagtggcgtggccgcggactggtgttcaccatgttcatgggcaccatggtcatcccgatcgaaggcgtgatgatctcccagttcctgatcattcgctccatccacctgcagaacacactgctggcagtcgcactgcctggcctgtgcggcgccatcaacatcctgctcatgaccaacgccttcaaatccattccaatggaactcgaagaggcggccatggtggacggtgccaacctatggcagcggttcttccatatctgtgtaccgcaggtcaaaggcacgatgaccgttgtcggcatcttcgcattcgtcggtgcctggaacgacttcctgtggccgttgatcgcgatctccgatgaaagcaagtacaccttgaccctcggcatgaaccgactcaagggcatgttcatccaagatccgcgactgatcgccgccggtgcgctcgtctcgcttatcccgatcatcgtcttcttctgctgcttccagcgctacttcttccgtggcttggaacagggtggactcaagggctgagcggactggaaaaaggaggtactccaatgaaattcggagtcaactacacgccgtcgcatggctggttccacgcatggctcgacccggactgggacggcatcgacaatgatctcaagcagatcagcgaactgggtatggaccatgtgcgcatcttcccgatctggccgtatctgcaacctaatcgcacctggatcaacaagaagggcgtggcggatgtgcgccgcatggtgcacatcgccggcgagcacggtttggatgcctatgtggacgtgttccaagggcatctgtccagcttcgacttcctgccttcatggctggtcacctggcatgcgggcaacatgttcaccgatgcggacgccgttgcggccgagcgtgaactggtcaagaccatgaccgatgagctgtccaaggaacccgcgttcaagggtctgaccttgggcaacgaggtcaatcagctgtctgacaggccgcatcccacgaagatgagcgccacggaccggcagatcgacgcatggctggacgcgctgcttccgaccgccgccggtgaagggcacaacgcgctgtacagcgtcaacgatggcacctggttcatcgatgggcacccgttcactccggtgcagtccgccaccaagggtgatatgacagtgattcactcctgggtgttcaacggcatcgcgcaaggatacggcgccaccagtgaggagtgctcgtcgtacgcactgtacctggccgagctggccaaggcgttcggcaaggattccgagcgcccggtgtggctccaggaagtcggtgcgccggagaatgtgctggaaaccgactacacgccggaattctgccgcaagaccgttgaacgtgccatggattgccggaacctgtggggtgtgacgtggtggtgctcgcacgatgtgcccgccagcatggaagacttcccgttcttcgagcactctctgggcttgttcgacgagcaaggccagctgaagccgatcggccgtacgttcggggaactcgccgcacagtaccgttccgcattgccggctcagccgaagaccgtcgccgtggtgattgatgtggatgaggccggaaacccggtgaaccgcagtgcgctcggcccgggaggctcggtgtgcgacctgtggatgaagctgcaggtggcgggccagcgcccgaccatcatcacctcgcaggtggcggccaatcaagaggcgctcgcgcagcgtggcattctggaattgcacgctgacgaacacccctatgccgcccgttactacactgcggtttcggacccatcgttcgaaacggctgattaaaccgatatccggttgtggaatcatctactccttgttccacaaccggatattttcaattgcagtgcgcacaattgcagtgcgcagggcaaaacataagatccggtactcgccgaagagcgagaagaacgagaagacaatatacgagaagggggagcgctcaatgagcatcaactgcgccgcagtggaccgactcattgattcgatgagcttcacgcagaaagttggccagttgaaccagcgtctgctcggttggaagtccgtggaacgcaatgctgcgggacggctggtggcctcggacgagctcaagcaggagattgaccgatggggtggactcggcaccctgtacggtctattgcgagccgacccatggtctggtcaacattggggtaacggcatacgccctgaggagcggactgaggcgattgccgtggtgcagcaaactgtgctggaacgtggcgcgcacggcatcggcgtattacttagcgaagaggcgcctcacgggcatcaggcgctgggcggcacggtgctgcccaccaatctgggtttgggcgctacgtttgacccgcagggggtgcaggaagcggaagctgcggttgccgcagaactggccgccagcggcattcatatcgcattggtatccggtttggacatcgcccgtgacccacgctggggccgttgcgaggaatgcttcggcgaggatccgctgatggctgcccgcatgtgcgaggccatcgttaccggcatgcagggtgagcatcgcagcaaggtcggccacgggggagtggccgtggtgctcaagcatctggcggcgcaaggcgaggccgtgggcggccgcaacggacagtccgccgtactgggcccgcacgatcttcatgaaattcatctgccgccggtggccgccggtgtgcgcgccggtgccttgggctttatggcagcctacaacgatatcgattctgtaccttgctgcgccaacccgtggctgctcaaggattatctgcgcgaccagctcggtttcgacggcatcgtgatggccgatggcctggccgtggatcggctcgaagacatggccggctccattcccgcggcagggcgcgccgcactgctcgccggcgtggacgtctccctgtgggatgaaggattcacccgcctcgaagaatatgcggatgacgaacaggtagtggccgctgtcgacacggccttgcgccgggtgctggaactcaaagccatgttcggtctcttgcccgaagacggtgccgataccgccgcaattgccatgccgagcgccgacgccatcgcgcaggccactgcggatgggcgtgagcaggccaagcgcatggcccgcgaggcgataacgctgatcaatgatggccagtctgccgccacgctcgacgatatccgcagcgtcatagctgatgctcaagccggccctgtgattgtcgccggcccgttcgccgacgatttcggctgcttcctgggcgattacaccgcccctctgcccgccgatgaacagtcaagcgtctaccggcaattggtggcacgtctcggggaggaccgggttctcttggccgccaagccgagcgatgcgccggccgatcaatgggcgcgtgcgtcgaccgtggtattcgtatgcggcagcaccagcgaacgcagctatgacagtgaattcgacgacaatggcgcggcgaaggccgtaaccgaatacggtgccacctgcggcgaaggcgtggacttgtctgacatccgcctgccctggcgtcaggatgacatgctaggtgaagtcgcggcattgaccaccgctccaattgtttcggtggcggtgtgcggtcgcgcgcatgtactgaccgatgtgctggaacgctccgccgtgacgatctgggccggatatgccggccaatatgggccgcaggccgtagccgacgtattggttgacggagccgacatgtctggccgccttcctgtgaccttacccgcatatcccgcagccattcccgttcgatacaatgaccgccaaagtgccgcgcatgtctacaaggatgcggcggaaccgatattgcgcggcttcggctatggatccggttcgctggcggcggtgacgttcagcgagatgcacgccgatacgcaatcgcatccaggtgaagtgctggtgcaggtgacggcacatgctgacgatcacggggccgcgggtgccgtgaatctgttcgcgcatgtcagcggcggccgccgcatcccacgtttggcaatgcttgtcgattcggtatacatggacttgaacgcgggagagcgtcgcgatatcgcgttccacgtgccgtgtgatcgtctgcgggatgtcggtgacgggcaagttcaggtgacctgcacgctggatggagattcgacgcatacggtcacggcgacgctgccgggggaatattaggggggcatgtatgaatgtggggtgcgaagcactggaaccgcatcacacccccggatggagcctgaaaccgcaaggcatccatcctcgcaacctgcaagtctgcgggttgtcacccgatagaggaaacaacaaaggagattatatatgtgttgctcacaaggtagtgaagggcgctcgtccatcggacgcagactcgccgccgtcgcggcgggcgtagtcgccacagcactgatgctcggatgttcgctggccatgggaacggttgcgaacgcccaggagggggattcccccgttgcggcgtc

SEQ ID NO: 1737 - DNA, 11250 bp, Unknown
  MAG_14  MAG No. k141_22276
gcggacgcattacgtaccgttacaagtaaaggtacacaagaaaaggataaccatgaaggtcagccctagcgtgaagaggatctgcgaaaactgccgcgtgatccgccgtcacggccgcgtcatggtgatctgcgtcaacccgcgccacaagcagcgtcagggctgagagcagattctccagcggcactaagtaaataaggcactctctcacagtgcttcccgcaagggaacgacactgaaccacgggtacgtaggcccgtgccgggtaaccgggcgagcgggtgcaagacctacggcaacaagaaggaatcgcaatggcacgtcttgccggagtcgacatccccaatgagaagcgcatcgagatcgccctcacctacattttcggtgtgggtcgcactcgtgccaaggaaacgcttgccgcgaccggtatcagcccggacatccgcgtcaaggatctcaccgacgagcagctgattacgctgcgtgactacctcgaagccaactacaagatcgagggtgacctgcgtcgtgaagtcgatgcagatattcgtcgcaagattcagatcaactgctaccaaggccagcgtcaccgtaagggacttcctgtgcgcggtcagcgcaccaagaccaatgctcgtacccgcaagggcccgaagcgcacggtcgccggaaagaagaaggccaccaagtagtcggtggcatgattcgggccacgggatgatttcatcccatcgcccgaacgtcaacaacaaagttcgttactaggaaacgagggtcaatggcagcgcctaagcaagccgctcgtaagccccgtcgtcgcgaccgcaagtcggtcccggtcggccaggctcacatcaagtccactttcaacaacacgatcatttcgatcaccgatccgtccggtgccgtggtgtcctgggcgtccggtggtgatgtcggcttcaagggctcccgtaagtccacgccgtacgccgctggtatggctgccgagtccgccgcccgcaaggcgatggaacacggcgtcaagaaggtcgacgtgttcgtcaagggcccgggttccggtcgtgagaccgccatccgttccctgcagtctgcgggcctcgaggttggttccatcaccgacgtcaccccgcaagcccacaacggcgttcgtcctccgaagcgtcgtcgcgtctgagcactcagcaataccaaatccatccaaaaccgcctgaccggtgagtgcaccaccgagttcaagctgaaaggataaccacagtgcttattgcacagcgtccgactcttaccgaggaatctctgaatccgcagcgctcccgcttcaccatcgagccgctcgagcctggcttcggctacacgctcggcaactcgctgcgtcgcacgctgctgagctccatcccgggtgctgccgtgacctccgtgcgtatttccggtgccctgcatgagttcaccactctgccgggcgtccaggaagacgtcaccgagatcctgctgaacatcaagggcatcgtgctcaccagcgaatatgacgagcctgtggtcatgtatctgcgcaagagcggcaagggcgaagccatggctggggacatcaccccgcctgccggcgtcactattgccaacccggagcagcacatcgctaccctcgccgacgatggcgaactcgagatcgagttcactgtcgagcgtggccgtggctatgttcctgcccagatgaacaagcaggacaacgatgagatcggccgtattccggttgattccatctactccccggtactcaaggtgagctacaaggtcgaggccacccgtgtggaacagcgcacggacttcgacaagctcattctggacgtggagaccaagcccgccatctccccgcgtgacgcggtggcttccgccggttccaccttggtggagctcttcggcctgtgccgtgagctcaacgcccaggctgaaggcgtcgaggtcggtccggccccggtggccgaggagaccaaccccgagatggccgttccgatcgaggacctcaacctgacgcagcgttcttacaactgcctcaagcgcgagggcatccacaccatcggtgagcttgtctcccacaccgagcaggacctgctcgacatccgcaatttcggtatgaagtcaatcgatgaggtcaaggagaagctgcagaccctgggcctgagcctcaagtcctcgccgatggccttcgataccaataatctcgaaggtggtacgttcttctcgccggaagacgagtgatctgcctctttgaccaatcgttcgttcactaggcaagcggatgttcgggcatatgcccacctgcttgcctgaagaacggacatataaggagtaaacccaatgcctacacccaagaagggcccgcgtctggcttccagccccgcacacgagcgcctcatgctggcaaacatggcgaccagcctgttccagaacggccgcatcaccaccacgctgccgaaggccaagcgccttcgtccgctggccgagcgcctgatcaccttcgccaagcgcggtgatctgcactcccgtcgtcgcgtgatgcgcgtcatccgcaacaagtccgtggtgcacattctgttcacccagattgccgagcagatggagcagcgtgaaggtggctacacccgtatcgtcaagatcgccccgcgcgttggcgatgccgctccggccgctgtgatcgagctcgtcaccgagccggttgccaagaaggctgttgtgaaggaagctgaagccgccgccaaggttgccgaagaagaggctccggccgttgaggctgaggccgctgaggctccggtcgaggagaccgccgccgctgaggctgaggctcccgctgaggaagccgctgacgccgagaaggccgagtgagctgaatagcgtttcgccaagctagctgaaagggctggaatccgtttgggttccagcccttttgcgttgtttcatagaaactacaacgtacgtacggctcgaatggcctcggctcttgcggccagctgatcatcgacggggtatgcgatatgctccaaagtcaggccctgcggcgcaatcggcccgcttgagccttcacgcactggctcggccattttgccggcaaaccattccagagatttgcgtcccgaaccaactttgatgcatgagccgaccaaggagcgcaccatattgcgggcaaaggcgtccgccacaatcgtgaacaccgccagtccggactccagcgacggagtccgatatgcttcatgcgatgccatcgcatccggcaccaggggagtgatcggcacccgccgccaataggcggtcttgacttcgcggatcgtagtgcctcccggattcggagtggcgaaggaaccaaaatcgtgcaggccgatggtcaatgaggctgcgcggttcataagctccagatccagcgattcatccacggtaagcacgcatccacgcaggcgcgggtcgatctcggacgaacgatcggcgacccgatacacataagtgcgctccaatgcggagaacctggcatcgaaaccggccggtgccacggcaatgccatgaatgacgatgtccgaaggcagcacagccttgagtctgcgagtcagcgcctcggtgaccggaatggtcatgtgacctacgcagcgattcagtacctcatcggatacatccaaatgcgccacttggtgggaggcgtgcacaccggtgtcggtgcgcccagccaccgtcagacgcaacggttcggccgcatcatcggccggcacccgcagcaccttgtgcagcgcatcttcaatggtgccttgcaccgtacgcagattgggctgtttggcccagccatagaatccgccgccgtcgtaggccaagtcaatgcgcagtcgtgtcatagccattcattgtaacgagtgcggtcggcgagatgcgcgcggtcggcgagacgagtgcggtcggcgaagtgacctgcctgtaacattctcgcgcgtttgctgaaacggggccgccttaggttgtaaccatcaaacccggttacggcttgcggcgtcagcgtgcgctcgaaacgcctaaccgcttgaggccacagaagccgccacagcaaggagcaggcacgatgatcgaatccgcagcacgcagactggcccatgaactggtaaaccgtcgcgaggcgatcaaccgcgagctgtcccgcaacggcgtacgcttcggcatctacaagaacggcgaataccatgaccggctcttcccgtacgatcccgtgccgcgcattatcgaatccgacgaatacgacgaattggagaagggcctgaagcagcgcgtcaacgccctgaacgcctatctgaaggacatctactccgacaaggccatcatccatgactgcgtcgtgccggaggaatacgtatacacctcggccggctacttcccgcaggtcaacggcgtgacccctcccggcggcatcttcgcgcacatcgccggcgaagacctggtccagggtgaagatggccgctggtgggtgctggaagacaacctgcgcatcccctcgggcgccagctacccgctgttcgtgcgcgacatcgagcgccgcatctccccgcgcctgttccgcgacgtgcacatccgcgacaatcgcgaatacccgcgcctactgcgcaaggccatggactttgtgtccactgagggcatcgccgtggtactgacccccggccgctacaattccgcgttcttcgagcacgcctatctggcggagaaaaccggcgccgcactggccttccccgaagacctcgaagtggtggacaacaaggtctacttcctcgactacgccggcaaacgccaccgtgtgggcgtggtctaccgccgtctgtccgacgaattcctcgatccgtttgccttcaatcctgattcggtgatcggtgtgcccggtatcctgtccgcctaccgcgcgggcaacgtggccatcgtcaacgcgccgggcaacggcgcggccgatgacaaggccatctactacttcgtgccgcagatgatcaagtactatctcggcgaggaaccgattctcaacaacgcgcccacgtatatgccgatgttcgaggccgaccgtaaggaagtcctgaatcgtatgggcgagctggtcatcaaggatgtggccgaagccggtggttacggcgtggtgttcggttcgtcgctggatgctgccgcacgtgaggagcttgccaaccggatcaaggaggagcctcgtcgattcatcgcccaagaggtgattcagttccgcgatatcgatgtggtggacccgaagaccggtgagatgtcgccgcgcaaatgcgatttgcgtgcctttgtggtcaccggcaaaaacacgcacgtgtggtattcgggcttgactcgatactcgtcggtgcccggccagatgatcgtcaactcgtcgcagggtggcggattcaaggatacgtgggtgttggcacccgaatccggcgtggagcatgaatacggtgctgaagtgcaggtggcgaacctgctgagccagtcccgccgccactcgttgtctctggtcaccgcttccaaggcagacaacctgtattggctgggtcggtacaccgagcgcgccttcaccacgctgaaccagttcttcccgttctacgatcgtgtgatggacaccgatgtggacgccttccgtccgttcgctcacgcactcgacctgcccgaagatttcgaggacttcgacgggttcgtgaacagcttcctgtacgacgggtccaaccctgattcggtgcggtcggccgtaacctccgcattcaacaacgccgtgattctgcgcccggaattgagctcgcgtctgttgcagtacgtggagttggcgatgaccaatatcaccgatgccgccaaatacgcggccgacgccgaggacatctacaagcagcgcgatattaccgatgacatgctcgccttctggggcggcatcgagaattcgccggtcgaccccacgctgaaggcgttcatcttcatcggcaagtatcttgagcgcatcgacctgtacacgcgcttcggcctgacgatggaggagatggaagccccgcttaggaagctcgcctcctactcgatgatcctcgacggcatgccgttgcctagttgcttcgccgatgggctgagctggctggtcggtcagctgccgtctcgcgggtatcaggaagtcgccgacctgctgaagaagtaccttgacgattattccggccgtgtcagcgccctggccatcaaagacatgggctcactgagctccatgaacatggatgccaagcgcccctaacccgacgttcgccctgacgggttcaaatgctatggtggtatggcgaaaaaccgtgcgcccgagtgccggccgatgcgtatcggcgaattgccggaatatatgcgtggactgtgagcgcgcggaccatacctcagccatggctgtagtgtcgttatcccgagaatgtgccggttgccggctcgtgtgtaagtgcaggagacgttgtgaaaaaactcgtgttcgactatgagatgaagctgtccttcagcgcaccggtcaccgatcacaggttccagcttcgctgtattcccgccactggccctcgccaacaggtgattgacgtggaagtgaagattcagcccgaaaccgaactcgaaaccaccatcgactcctttggctccgtggtgatgaccggattcatccccgagccgcacgacatattcagctattcggtgaccggcatcgccttcgtggacaatgcgcatatccataaggaagcctataaaccgctgtaccgattcaattcagcgctcaccattcccggcccgaacgtggaggcgatgatcgacgtatgccgcgaacgcttggctgcgttgcctgccgacgccactccggtgcagcaggccgccgaagtgatggatgaggtctacaaggcgtttgtgtatacgcccggttccaccacgattcgcaccaccgccgaacaggccttggcccagcgcaagggcgtatgccaggattatgcccatgtaatgctgtccgtgtgccggcatgtgggattgaccgcgcgctacattgccggtttgcttgggggagagggcgcgacccacgcttgggtcgaggtgtatcaggatggccgatgggtcggactggatcccacgcataaccgattggtggacgacagctacatcaccatcgcccacggccgcgattaccgcgactgcatgctcgacatcggcatcttctccggctacaacgtccagcagacccaatgggtcaatgcctccgtccacgaacaggtggcgtaaacaaaatttcaagccccctctgatgagctgagccgtgaagaaaacgccggaggcgtttttaggcgaaggcgaatgacagtgagcaaataaaatggcagctggaaagctgtccttaaattgcgttcgagctgtcgagcgtagcgagactgagagagaccgctcaatgcagagtggccccgtcaccgcttctaccaccaccaatattcggattttcgtcgttgcaacattcggattttggtagttgagaaattcggattattgcgatggcggacgtgaaataacgggaggtgcgcggaatggccgattctctggcgagcgacatcaagccgaaagcctatcgccctcgtatcgtggatgcacagatcgaacgatatatgcgcatctttggcgcggtggagattaccggcaccaagtggtgcgggaaaacttggtctgcgcgggcccatgcagccagcattacctatgtggatcgcaataacaatttggctgcggctaaggcggatccgtcattgatgctgctgggagataggcctcatatcgtggatgagtggcaattcgctccagctatatgggatgaagtccgtcatcgcgtcgacgatgattccgcgaataaaggtcagtggattctgaccggttcatccactcctctcaatgagaatcggccgaaccatagtggtgcgggacgaatcggacgtatccgtatgaatcctctgactttatatgagtccggactctcgacaggtgcggtaagtctcagtggactgtttgaacataagttcgccgctgcaaaatcagagataagtacacaaatgttgttggatgccgtatgccgaggtggatggccggaggcggtggctctgcctgtatctgacgcacagattctgattcgggaatacatgcgactcacgctgactgagagtgtgcccaggcaaggcaaggatcctgatgtggctcgtcgtctgctggattcgcttgcgcgcaatatcagtcaagctgtgacattcaaaaccttacgtaaggatatgtacggtactgaagaaaaccttgacgatttcatttcggagagaacggtatccgggtatacggccatgttcgagaacatgttcgtcatcgatccgataaagggctgggtcccgccggcacgggatccaaagcgactccagaccaaggcgcgtcggtattttgccgatccttccattgcggccgcaatgttgggcatgagtcctgctgctcttatcggcgattggcagacttttgggtttctgtttgagaatctatgcatccgcgatctgttggtgtatgcgagatctctcctcgatattgggatagaaccggttcggtattatcgtgacgattccggtctggagtgtgatgccattattgaattgtccgatggacggtggggcggcatcgaaattaagtccagtgaggataaagtccctgaggcatcggcaaatctatgcagactgaaagataagctgctgagaaatccgagtgcgcgaacccgtgaaccggagttcttggcggtgttggtgggggtcggcgagttcgcgtatcaacgcgatgatggagtgtatgtaattcctgtcggagtgcttggcgcgtaaacgcaatgccagcgcttcgggcgaattccgggattgtgatctgacatgtctcaagcggcatacactcgagacttgctcagcgaaactccgatttgccaggtcggcagaatgtggcataatgaacaagttgccattttggcagcatggataagtgtccgagcggtctaaggagcacgcctcgaaagcgtgtgaggtgaaagcctccgcgagttcgaatctcgccttatccgcctttagggttccggggtttgtcccggaaccctttttgtttttgatgcgaacgtccgtattcggggttataggccaaaatgtatgtccggcggtctagtcgttcgactgccattcgaccctggtgtggaactcgttccagtcgatgccggtgccgtgtctcatgggaatgccgaacgtctcgtgcatgctctgcgggcttctctcccatgcccgccggtagaggcgctcgagtcgttcgtcggtcatcgcgttggccgcgagccacgcgtcgctttcgggccgttccgtgtgctggtggcaccaccagcagatcgccttcagccgtctgaccagccgcagtccgcggtggcggcgcggcatgtcgcgcaggcgcgcgttccatgattcgacgaggttgttcgtggacggcactgggccggctgccgcgagcccctcgtcgaggaacatgaacggttggccctcccggatgcgcctgcggatcatgcgccgcgccttgacgagcctttggtgcatgtcgttcacgccatgaccgacgtgcaacgaatgtccggcacgttcgacccgcctacggacgacggcgaatacgccgtcatcgcaggcggggcaccggtgagcgagatgcgcgactacgcgatggacgtgaacgcgtatacgcacggccgtgggcgcttctccgcctcgttcggcggctaccggccctgccacgacgaacggcgcgtgatcgaggaggccgcgtacgatccggaagccaatctggagaacacgtccgattctgtgttctgcgcctacggcgccggctacccggtcaagtggtacaaagtgcccgaattcgcgcacgtggagtacgtgacggcgtgaggggccatctgactgtcgcggatatgcgtccggcatatcgggaccgtgccggtggatgtcgattgtaatcgacacctcatcccgatgggatacgaagtgtccgggtatgcctgatacctcgtgcctcatcggaatgagacagaatgaggcaagtgacggattcgggatatccgtccgagttcattgtgaaccattggaataaactcgttttgagtccgtctgcatgtcctgtgttgacaacgtcttgggtcgtgtgtattctgaatacatcagaacataaacgtttaggacttcaatgatgaaacgacacgacgttactatcaccgatatcgcaaagcggatgggactgtccgtttatacggtttctcgcgctcttaacggtctcagcggtgtatccgagagcacccgtgcatcggtgcgcgaaacagccaacgaggtgggctacatccccaacgtcaatgcgcgtgacctgcgcacgggcacgcaccggttcatcaccctgctcaccgcgggaatgtcgaactcctattatctcgatctgatcgacggcatcgagagcgtcctgcaggacaagaaggagagcctgttcattgccgatatggccgtcaacggccggtacagcaaggagaacgaggcgtatctgttgcgtcaggtcgtggagaaccgtcctggcggcatcatctccaccttgggactcagcgaatacagcaggaaccagctgaagaactggaacattcccgtcgtattcgtcgattccactcccggatacggtgatgatgaggaaataaaagatggtttctcgtatgtagccaccgacaacgtggatgccgccgccaagcttgggcgtcatctgaaactccatcatttccatcgttggctgcttgccatctatccggacacctggaacagcaggttcgctcgcgagagcggcctgagggccgccgccgaggagtgtggggcggagattcgcgtgctggaatgcggtaacaacgatgtggaagcgtgcaccgaagtcatccgttttcttgaccagaacgattattatccggatgtgatcatcgccggcaacaatcccatcctgttgggcgtcatgtcggctcttaatcggaaatccgtcgacattcccggggatatggcgctggtcgcgttcgatgacttcgcctggtcggacctggtatcgccgaagataacacttgtcgccgaagacagccgattcatcggtgccaaggcggcgaactacctgcttggacagatggaaggaaaggaggaggtgaataaa

SEQ ID NO: 1738 - DNA, 5965 bp, Unknown
  MAG_14  MAG No. k141_22318
cgatgcgctcggacaggtcaacttcctgttcggcgttcagcaggctcacacggccgatctgcttcaggtagtccttgaccgggtcggcggttgcgccggccgcgattacacgacgcttcggattgcccgaagggatgatgttctcttcctcatcatccgtgtcggagaccacgtaggcacccttttccttgggctgctcgggtgccttggacttggcttcttcctcgtcctcgtcgtcttccacatcgtcgtcggcatcgtcctcatcgaggtcttcgtcgtcggcatcgtcttcgtcaacgtcgtcaagatcctcgtcgagatcgtcaacgtccaaatcgtcgtcgttgacctcggcatcgtcatcaagcccgtcatcgacctgagtgtcctcgtctttgacgagctcatcgtccttggccttcttcgcggttttcttcgcggcggacttgcgcgtggtctttttcgagggctctgcggacttggacttcttggcagaagtcttgcgcgcggtggtcgtagagctggccttcttcttggtctcggtctcctcgctggactcggctgtctgcttggttgccgtcgtttccttcgtggccaaaactgctccttctgatctctcgccgtgaagtgcatataccacacgggcccacttctggcaagggcaaatcgtcaactatgtgagtaaaccaccctccacggacgattattcccacatcgttgcccgacgtgttgccgatcaccacacgctttccttccgcgcatcgcgcataaaacctcggaaatccgccgtttctgttcattcagcccgagcaccatgccggtgccacgcctcgatcggcggctgagaatatcatcgccgccagcgaacaatcctcatcgagcagcaggcatcgcaaggcgaacaccattgctcgcggatcgcccagccaccataaggtgtaggcgattacggccaatggttgtatgcagtacggcaccggtgaggcttccgcgatatcgagcaacataccgatgccggcatggcaacgctccttatccggcatcatgccttcatcctcgaatgcgcaggtcagcagctcgcccattcgtgttctcgtacgtgccagatgcggtcgcgccgcgaattccatgagccatgacttggggcaacggctttcatcaataaccaacgagagaatcagcgcatcacgaatcgataaggtctcgcgcatgcccaccgcaaacgcggccatcgtctctcggcctaggtcggtgttcccggcatcaagacaagacagccattcatccaatggttcggccacccagtcggcattagcctgttgcgcgcctcgaagtcggcgatcattgcgaaattcctgtgatctcgtctccaactcatcaaagccaaagggctccgtctgctcggcggcgtgccgtttggcgtgtcggctcttacgcggcttgtgcggcgtgttgttgttcatcatgtcctccttgactaatggtgtgcaatctattggtgttgtggtgcgcgccgagccggatagctcatgcgccgagggggtgtgtgcccactatggctgaaaacgccgtatgacgcaggaaaaaacgaccattgtggttctagcttcaaaacccttgattcccaacgttcttgtgttcttcaaaccctgtggataagttattaggcatgtgcacaactgctaacaaccgcgaaatcatcgagccacgcatcattcagttggtgcgggaactgactgccgcccccgccaccgacgaggttgccgacgccctgaaaccggtgatggaacaggttgtgggccaagccgcctcctccagccaaggaggcaaacgactgcgtgcgttgctcgcattggacgccttcgatattcttgccggcgacgtgactcctgatcggcgtgacgccatgatcgacctagcctgtgccattgaagtgtttcagacggccgcactggtgcatgacgacatcatcgacgaatccgatctgcgccggggcaagccttccgcacatcgtgccttggaacaggccgtacacagcggtgccataggccgtggcttgggcctgatgctcggcgacattctggccactgcctgcattgaaatcacacgccggtccgccagccgtcttcccaacaccgatgccttgaacgaggcgtttcttaccatgcagcgcgaggtggagatcggccagatactggacttggccgtcgagatgaccccgttgtctgatcccgaagctctggcgaacgcctcattgaacgtattccgctggaagacagccagttacaccaccatcgccccactgctgcttgcactgctggccgcaggagagagcccggatcaggccaggcattgcgcgttggccgtaggccggccgctcggactggcgttccaactggccgatgacctgttggatgtcgtcggatcaagccgcaataccgggaaacccgttggcggagacattcgagaaggcaaacgcacagtgctgttggctgatgctctgtctgcggcagatacggaggataaggccgatctgattgccatcttcgaagcggattgtcgcaacgacgaccaggtagcccgcaccattgaactgttcacgtcgaccggtgctcttgatcgatcccgcgagcgcatcgctgccctatggggtgagtcccgtaaggcgattgccggtcttgagctgaattccgaagcgcagcgccgtctgaccgaggcttgtgcgcgattcgtccccgaatccttgcgatagtccacaatgcgagccgccgggtcatgagaccatgaacaccggtgaaaacccgtgacaactatgcgccgatgctccggccgcgtaaccggggccatgtacactgaacatgtttagtcgtgattaaaggaaccgtacgatacaacatgagtgagaacgagcccgcgcagatgattgagggacgctaccgcatcgtgcgcaatatcgccgagggtggtatggccaccgtgtatgaggccatcgatgagcgtctggggcgcaccgtggcgattaaggtcatgcacacacaactcgccaaaggcccgcatcgggagcagttcgtcgaacggttccgccgcgaggccaattcggccgcgtccatcgccaacccgcacatcgttcaggtgtatgacaccggcgagttcaatggacttgattttctggtcatggaatatgtgcatggcgtcaatctgcggcatgagatgaacgcccaaggcacattctccgtacgtgagacgctgcgcgtggtcgcggagacgctggatggtctggcttccgcacatcgcgccggcgtggttcaccgtgacatcaagcccgagaacattttgatcaatgatcgcggccatgtgcagatcactgatttcggtctggccaaggccgccagccaggccacattgagctccaccggcatgctattgggcaccgccgcttatctggctcccgaaatgatcgagaacaatcaggccaccgcgcaaggcgacctgtattccgtgggcatcatggcatgggagatgctgaccggcaaggtgccgttcgattcggataatccggtgacgcttgtcttcaagcatgttcatgaggacgtgccgtccgtggccacggtctgtcagggcattgatccgtccgtggcggcgttcatcgcccatctgaccgcgcgtcaggtggatgcccgccccgccgatggcgcggcagcagctgaggaattgagccagttggccgccaaattgccgctggaggcgtggcaataccgtttgcatgccgaacccatcggaggtgatcataccgatgccaccgctgcagcgctggtaggcaatatcgccgagcaggccccgctgaccggcgtacctgccggtgcagcaacgttcaaaccgtccgtaccagcgtttttggccgatgatgtcgcaagcaataccgtcgataccggtggcgccgcagacgtcaatcctccggctcctccggtcgcccccaccacggcacttgattcgtcgacgccagccgatgcttcggctccccataagacgcaaatcatggcacagtccggcagcgagacacaagtgctgcctcaggccggcgatgccttcacccgagcgcttgccctttccgatgagccggacgtcgcttccaacggcaccgggccaaagaagcagcgcagcaaaaaaccgctcatcatcgtactggtgatcgtgctggtactggctgcaatcggcggaaccgccggctggtggtggtttgccggaccgggcagctattggagtgtgcccaagccggatgacgtgacctgcgatgcgaatgcaagcaccgaatgctcgttggccggcgcggattgggccacgtatgagagcacgttgaaggctctcggcatcccctacaagacgcacaaggaatacagcgacgacgtggcggaaggcaagatcatctcttcttccgtgaacaagaccaaggccgttgtgaacagccgcataagcaagcgagccaatcaggagcttacggtggtggtgtccaagggcgtgcggatgaccaccatcccgaaggatattctcgacgcgaattcggccaatggcaaggacccgttgaacgcgctcaagaaggccggcttcgataatgtcaagcatgacgagtcgaaggatgagtattcgatggacacgccgcagggtgcggcattgacgatctcccctgatcccggtaccacggccaagcacaacgatgaggtgacggttactttgagcaagggaccgatgccggtgaccatgcctaacatcgtcggtaagacccaggatgagatgcaagccgcgctcggcgagttgaagctcacggccaatgtcaccgaacagtacgatgacaaggtcgaggccggtcaagtcatttccgcgtctcaggaagccggagcccagctgaagtggggcgatagcgtggacgtggtgatttccaagggtccggagatggcgacgataccgtccggccttgtcggcaaacaggaaagcgccgtaaccaagacacttgaaggtctcgggttcgaggtgaaaaccgacaaggtgctcggtggcctgttcggcacggtacgtaccgtgaaaagtggcgatacggacctatccaacggcggcaagattcgcttgcgcgatgccaacggcaaccccaccgtcatcaccctcaccatcgtgtgagatttgaatgaggctccctctgtcttgagacgagggagcctcatttgttaattacttttcggcttcttcagcggcctgctgggccttgagctcggccttgaccttctgggcgtattcgttcacgaattcctgaccgctcattttctggattgcggtggaaacacgatcggtcagcgaacgcaaatcatcatgtgtaatttcatcagccggcttcttcgcaacctcaatcggcttgccatacaacaccttggtcttgcccttcttgggaatcgacgtgccaatcggctgcagcttgtccgagccgatgatggcggtcggaacaatcgggcaaccggtctcgagcgcaagtcgtgcggcaccggtgtgtcccttgtacagtcgaccgtctgggctgcgcgtgccttcaatgtggataccgaacaggtgcccatcctcgataatctcgcgtgcatgctcgagtgcgccaagcgacttgctgccaccggaacgatcaaccgggaacacgcccacggacgtgaaccaccacttcttgaacttgcccttcaatcccttgccctcgaagtattcggctttgcccatgaagtgcaccatgcgcgggcaggtaatcggaatcaaagcatcgtcaatcaccgccagatggttggctgcgataatcgcgccaccctctcgaggcacgttattcagtccgctgacagcagggctcaaacgatgatgagcaatagggccgagacctttgacgaagaaccagtagagcacttggcattcctcccgcagacgaactagccattggccg

SEQ ID NO: 1739 - DNA, 2722 bp, Unknown
  MAG_14  MAG No. k141_22471
ccagctgagcgatgccgagcgcctggatctgcaggactacacgtacgacctgctcaacgagctgtacgacaacgaagtggagtacacccagtcgctgtacgaccgcgtgggcctgaccgatgacgtcgagaagttcctgcggtacaacggtaacaaggcgctgatgaacctcggctacccggctttgttcccggctgagatttgcgatgtgaaccccgcgatcctggccgccctgagcccgaacgccgacgaaaaccacgacttcttctccggctccggctcctcctacgtgatgggcaaagccgaagaaaccgatgacgacgactgggacttctgattcacctcggcagcagcaccgtcagcacaaaccagtggtcctcggtgcgaatcgtcacttcgccgccgtactgcatggcgatgtgccggattgacttcacgccgaacccgtgccgcgacgaatcacgcttggtggtgcgcagcgcgccggtcgaatccttcttgagcgcggaatcgtagtagttttccacgcgaatcaccgtgaactgcccctgcccgtacagcgcgagccgaatcagccgctgctgcgggtcgggcagtttgctggtcgcctcgatcgcgttgtccagcgcgttgccgaacagcgaggcgatatccatcgacgacatgccctccagcagcttgccgtccgccacggcggtcagcgtaatgccgcgatccgcgcacgtgcgcattttggtggtcagaatcacgtccagcaccggattgccggaatgctgctgggcgctgacctgcgccaccgaagcctccagctgctcgaagccggccgccgcatgctccgggtccacctccgcgcgcaacgccgcaatctgatgcttcagatcatgcgcaagccgcccgatcgactcgatattctccttggacgccagatactcctgatgctggctttccagctgagcgttgatggacgtcagctcggcgctcgcctccatgcgccgcgcctgctcctgctgcgcgtacagaatcgcgaacccgcagaaatccaccaacgtgcggatatagaacacctcctggcccactgtgccggagaacggcgtattggtggacacaaagctcaggttgctcatggcgaacgtcacgatggtgatggctcccgtaccgattgccagctgcgctgtggcgacggtcggcgcatcattggcaaaattgccgcgttcgattagccacgccaccgtgaagcagacggcgtacgtgaccgccagtaacagcagtgagaacaactgcgcccgctcgaggttctcgcccaagttcaggaacatcaccaactgccagtgcaacgaggcgaccagttcggccagcacgaacgcgcgcgccgcaatatacatgccctcgcgcttgccggtgcccgcgccgaacaagataatcgcccacatgccggcgaacgcaagcagcataccgatgacccagaaccagatgggcatcacgccgtcgaaatactggatagcgatcatcgccggcagtccgataagcccgaccgcaatcgtgcgccgcagcggcacgcgccggtagatgaccagcagatagaccacgcaggccagccattcgcagatgccggtgtacaggcgcgggatgtccggcagcgcattggtgatggtggtgctcatcacgccgcgcccatgtagttcgccagcgcggtcaggaacgccttcttgcgcggccggctcacccgcagcagctcctcgttcgacatcacgcagtcctgcccctcgacgcccaccacatgccgcagattcaccagatagcaggagttggaacggaagaagtcctgatcggccagtcgctcctcgaaatccttgagcgtgccggacaccgagagtttgccgctcaacgtatgcacgatgatcgtgtgccgaatcgactcgagatacagcacatccgccagctccacgcgcatctgccgcccgccggcctcgatgagcagcgactcgctgccacgccgacgcaccatatcgatcgaccgtttcagctcctggcggaatgcgaagtacggcaccggcttgagcagataggagagcgcctgcacttcgtacccgttgatcgcgtactgcggggcggcggtgatgaacacgataaccacagtgttgtcgcgctcgcggatgcgccgggccgccgccatgccgtccatgtgctgcatctcgatgtccagaaacagaatgtcgtacatcggcgtatatttctcgacgatttgctcaccatcgtcgaatacggaaatcgtgaattccgtaccggtttcgctgcggtactgattgagatagtcaagcacccgttggcaggaggcgggatcgtcctcgaccactccaaccctgatatcgcgcatgaccgcaccttcctgtcgcgtcttctccaagcatcttatcctgatgtccctgatatcggccggattccagccgcgttcgcacggcggcgctacgctggagatatggaacaggatccgttggtcagcatcattattccggtgtataaggtcgagaagttcctcgacgaatgcgtggcgtccgttgctgcgcagacgtacgccaatctggagattctgctggtcgacgacggctcgcccgacaattgcccggccatgtgcgacgcctgggccgcccgcgacccgcgcatacgcgtgattcacaagcccaacggcggcctgtccgacgcccgcaacaccggcatcgccggg

SEQ ID NO: 1740 - DNA, 3323 bp, Unknown
  MAG_14  MAG No. k141_22585
catttcaaggagctgaccgtctcccatccggtgattatgggtcgtaagacttgggaatcgctgggggtcaagtaccggccgctgcccaaccgcgataacatcgtcgtttcccacgatccgatgtaccgtgcgccgggggccactgtggtcaccagtcttgacgacgcgctcgatatggcccgtcaggaggcgattccggacgacggtctggatcgttcggagatttggatcaccggcggcgcccagctgtacgccgaggcgttgccgttcgcggacaaagcctatgtgactgatctggccgccaccgtggatgccgacagctacgcgcccgatatggcgtcgctggtcgaggccgggatgtggcgggaagccgaagtgggcgagtggcatacgcccgccaaggaggagtccggcatcgattcctatcgtttccgtatcttggctaaaaccaagtgagcatgcgaatccggcttatgccctttatagcggcatgagccggattcatattcattcgaccccaacaatacagtcgggccgtgtgcggcccgttgaagtccgattgaggatttattcaaagctatgagcaatacccagccctacaccgtaatgaccgtctgcaccggcaatatctgccgttcgcctatgggcgagatcattctgcgtcacttttttaatgagcgcggtcttggcgaccaggtgaacgtggaatccagcggtgtgtccgacgaggagtggagccatccgatcgacccgcgtgccgtgcgtgtgctacgcgaacgtggctatggtgatgagattccgcgtgaccacttcgcacaccgcatctcacgtgaggaaatcgaccgtaccgacctgttcctgccgatgaccgcctcccacatgcgcgccctactgcgcatgctgccgtccggcaagcgcgccgaagtgcacatgtaccgcagcttcgacccgaatctgcccaagccgaagcccggccgcgaggatcagattgatttggtggatccgtggtacggcggcaagcacgagttcgaggtcgccatcgaccagattgaggaagtcgctccgtacatcgtcgattgggtggcgaagcagctgtaggaatcggcctgtggccgatgctgtgtgtttcgcagtcttacgaccgcgggtctctacctccgcttcgctgcgttcagcacctccctcacagagggaggtggtcgccgaaggcgaccggagggagagatcaacgaaggagaagccgagcccaacctcagaacaccagctgcaccagtagcatgtatacgatcgtgccgccggcgattgaaagcagcatactgcgtttccagacgtgcagcagcacgatgacggtgcaggcgatgagttccggaaggccgtgtgaaccggtcagaatcggggtgttgcgcagtgcgtataccaccagcagaccggtcatcgcatagggcaggactcggccgaaatattcgatgacgcgcggcggctgcttggattcgggaaataccaggaacggcagaaaacgggtgcacatcgtccccagcaccaccgtcacgatggtgagcgcgccttgccagatggtcatcgtcatcgcgtctgtccttccttctgctggtccgctgcgtggctcatggcacggtctgccgtggcttccggggcgtcggcggccggccgcaacacatccagatgcgggcgcaacgcgacgaacagtatcagcatggcgatcattgagggaatcatgaaatcattggccccgaatatcagcaggcaggccagcgacgtcagcacaccgatgacggcggacagtcgctcgcgatgcttgccggcgagccactgatcgaggaagatcaccagaaacagcgcggtcagtacgaaatcaagaccgtcggtattgaacggcagatgcgcgccaatcagcccgcccagtgtggcgccggtcacccaatacagctggttgcacagcgtgacccagaagtagaaccagcttcggtcgataccggcggggattttcgcggtggagttgatggcaaaggtctcgtcgcacatgccgaaaatcaggtacggacgcttccagccgagccccttgaatttgccgagcatggatagtccataaaacaggtgacgggcgttgaccatcagggccagcagaaagccggcgagtgggttgaacgcggagagcagcagattcaccgtgacgaattccatcgaaccggcgaagatgaacgcgctcatgcacatcggccatacaaacgagaagcccttggtgcccatgagaatgccgtatgaggcgccgagaaacaggaatcccaggcaaatcggtatggtcagcggaaacgccgctttgagcgccggcaaccaggcgttggtgttggcggtgtctgccatgtggatgatgttctccttgtgcaactggtctgccggccgatattcgccgataatgccatatgtggttatacacgcatggtgccgataaacgaggtgaggacggtgtcgggactctgtgcgcgaagtcacagtgtggatgatgtcacatcgtctacggtgggacagtccttgtggtgggcgtgaacacgtgctgagatgaaagcatgagcacatatcaaggtaacgaaccatcgcaaatcgtctacaccgctacggcgcaggttacgggcggccgcaacggccacgccgtgagccatgagccggaactggagttcgacctggacacgccggtcgccatgggcggcaagggtcagggcacgaaccccgagcagctgttcgccatcggctggggcgcctgcttccaaggagcgttggcgcttgccgccaaggagcagcgcgtggcggccaccaagctggccaagagtcaggtgcgcgccagcatctcgctcggtcctgaaggcgagtccttcggcctgaagggcaagattgaggtagttctgcccgatcttgacgatgaggctgccgccaagctcgtcgagcgtacgcaggagctgtgcccctactccaaggccaccgcgggcaacgtgcccaccgaggtcgttgtggtgaagtcgctggactgaagccttccgggttgaaacccgagtccaagcattcggcccgtttccttcagggaagcgggccgaatgctttcaggcctggtcccgcgaatacgaaaagacctcggtcgctatgaccgaggtcttcaaagaagtacccccagagagggggatacgaaaggcaattgcctcaagagcaaacggcaaatccttcaaatgtatatttacttattatcaatctgaattttaggtatagcaacgattcccgcctccttccagtagacacgcgagcggtgttgctcctta

SEQ ID NO: 1741 - DNA, 20119 bp, Unknown
  MAG_14  MAG No. k141_22590
attacaaccccgaccaatggcctgaggaagtgtgggacgaagatgtagccctcatgcagaaggccggtgtcaacctcgtctccgtagccatcttctcttgggccaagcttgagcccgaagaaggcgtgtatgacttcgattggctcgaccgcgtcatcgacaagctcggcaaggccggcatcgccgtcgatctcgcctccggcaccgcatccccgccgatgtggatgacccaggcccacccggagatcctctgggtcgactaccgcggcgacgtctgccagcccggtgcccgccagcactggcgcgccaccagcccggtcttccttgactacgcgctcaacctgtgccgcaagatggccgagcactacaaggacaacccctatgtggtctcttggcatgtgagcaacgagtacggctgccacaaccgcttcgactattccgaagacgccgagcgcgccttccagaagtggtgcgagaagaagtacggcaccatcgacgccgtcaacgacgcctggggcaccgccttctgggcgcagcgcatgaacaatttctccgagatcatcccgccgcgcttcatcggcgatggcaacttcatgaacccgggcaaactgcttgactggaagcgcttcagctccgacgccctgctcgacttttacaaggccgagcgcgacgccctgctcgagatcgcccccaagccgcagaccaccaacttcatggtctccgccggcggtgccggcatcgattacgacaagtggggttacgacgtggacttcgtgtccaacgatcactacttcactcctggcgaagctcacttcgacgagctggcttactcggcctccctgtgcgacggcatcgcccgcaagaatccgtggttcctcatggagcactccacctccgccgtcaattggcgcccgatcaactatcgcgtcgaacccggcgaattggtgcgcgactccctggctcacttggccatgggctccgacgccatctgctacttccagtggcgccagtccaaggccggtgccgagaagtggcactcttcgatggttcctcacgcgggccccgactcccagatcttccgcgatgtgtgcgagctgggtgccgacctcaacaagcttgctgacgagggcctgctgagcaccaagctggtcaagtccaaggtcgccgtcgtcttcgattacgagtcccagtgggctacggaacacaccgccacgcctactcaggaggtacgccattggaccgagccgctcgcgtggttccgcgcgctggcggacaacggtctgaccgcagacgtggtgccggttcgcggcccttgggacgagtacgaagccgtcgtgctgccgagcctgaccatcctgtccgaagagaccacgcgccgcgtgcgcgagtatgtggcgaacggcggcaagctgttcgtgacctactacaccggtctggtggacgacaaggatcacgtctggctgggtggctaccccggttccatccgtgacgtggtgggtgtgcgcgttgaggaattcgccccgatgggcaacgacttccccggtgccatggaccacctcgacttggacaacggaaccgtggcgcacgatttcgccgacgtgatcacctccgtggccgataccgctcacgtggtcgcctccttcaaggcagataagtggaccggtttcgacggcgctcccgccatcaccgtcaacgacttcggcgacggcaaggccgcatacgtcggtgcccgtctcggccgtgagggtttggccaagagcctgcccgtgctgctggaggaactcggcatcgagacttcggctgaggacgatcgcggtgaagtgctgcgcgtcgagcgtgcggacgaaactggcgagaaccacttcgtgttcctgttcaaccgcacccacgatgttgcggtcgtggacgtggaaggcgaaccgctggtcgcctcgctggcccaggtcaacgagtccgagcacacggccgccatccagcccaacggcgtactcgtcgtcaagctgtaaaacgcgcatagcgcctaattacccaacggctcccttgctgctcatcgtagcaggggagtcgttttcgtatctccagcaaagtcgggtagggtggtcaccgtgcgaggcaaaaacagagtgacgatggcggacgtggcccatgaggccggtgtttcggtagcctcggtgtctaattttctgaacaaacagccatatatgagcgaggcgatggccgcgcgtattgcggaagccatcgacaggctcggatacaaagtcaactcgtcggccagaaacctgcgttccgggcgtacccggttgctcaagctggttattcccgatctgcggcaggtgtacttctccgaactcgccgaggatattctggccgaggcccggcaacatggctacggcgtcatcgtggaatccaccactaacaatcgtgcccgcgagctggaaagcatcgcatcgatgggcacgcacagcgcggacgggctcatcttaagccctctgatgatgacggttgacgatatcgcagctttggagggcgattacccgctcgtactgttgggtgaacgtttgttcggcgtcaacgcgccgcacgtggtgattcgcaatcgcgaaggggccgccggcgcgaccccgttcgatacacaaagccccgtgacgaatcccgtcacggggcttttaccgttttaagccccgcctagtacactcgtcaccatgcgagtgatcggacagcgaatcaaaagaatggcaaccatagcagtgactgccatcctttccgtatccctggcctcgtgcgggcaggccacggacgacaaccgtacggagatcagcgtatggagctgggaaccgagcatgggggaggtcatccgccgtttcgaaaaagccaatccggacatccgcgtgaaatggaccaatatctccggctacggcaatcttaataccgccattcaagacggttacggcacgccggacgtggctcaaatcgaatactatgcactgttgcagtacgcggtctccggccaattgcttgatctgaccgacaaaatcggctcggattattccaacttctttaccctcggcacatggtcgtccgtgcagctcgccggccgtacctatggactgcccatggattcgggcccgatgggcttcttctacaacgaagacgtgttccgccaagccggcgtggacgccaccaagatcaagacttgggatgactattacgaggccgccgaaaagctcaaggagatcggcgcgtatatcgccgccgactcgggcgacggcagtttctatgacgcgatggtctggctcgccggtggtcagccgttccacacgtcggccgacggcaaaaccgtgaccatcgatttggatgaggatgccggcacccaacggttcaccgaattctggcagaaaatgatcgatgaggggcttgttgacactacctccgccacatggtcggatcggtggaaaagcagagtgggcaccggcaccatcgcctccgtgttctctggggcttggatgccgtcgttgctgctgtccaatgtgccgggcgcggccggtctgtggcgcgtggctcccatgcccacctatggtgggcagcctgccaacgccgaaaatggcggctcggcgctgaccgtgttgcaactgacccgtaagccggatgcggcctatcgtttcgtggactttgtggcgcatgacgcccaaggcattagcgcgcgtgtagacggcggtgccttcccggccgattacgccaccctgaattccgctgattttctggataaaaccacgattaccaatgaccgtggcattgaaatcccgtatttcggcgggcagaagttcaaccgggtactgtcggaggccgccgaggatgtgtcggtcggataccagtatctgccattcgaagtgtatgcgcgcagtgacttcaaatcgacggtgggccaggcatacgagtggtccggcagtttccacgcctatcagcagcgacaggaagccattgagatgggcatgaaggacgaggaaggcaacccgctcgaaccattggagaagcctggcaagaaagtcagtctctccggcggcctggcccaatggcagaaagacctccgagaatacggcctcaatcagggctttacgattaagtagggttttgagtaggtttttcggggagggacggaatcgactgcgctatgcgcggccgatgcctgcacaccgcgttacttcacattgcgcgagtagatgtatgccatgcctttgaagatcaggtctgaatcgtagacgtcgatcatgtcggtgtcgttcttgaaaatgcggctgagccctcccgtggctaccacttggaacggctcatcgatttccttgcggaactgctgaatcgtgcgctcaatgccaccgaggaacgtgtaatacagtccggcctgcatagcagtgcgcgtattggtggccagaatcgactgcggttgcgtgatctccacttccggcagctgggcggtctgcccccacaacgcctcggccccggtgcggatgcccgtggtgatgaagccggagcgaatcgtgccggaaccgtccacatagttgaacgtggtggcggtgccgaagtcggccaccagcaccgggccgccataggtgtggtaggcgccggcgcagtcggcgatgcagtcagagcccaaggttttggggtcgtcgagacgaatgttcatgccggtcttgacgccagggcccaccaccatcggttccaatccgaggaatttgatcagcgaggcgcggaaggaatacatcaccttcggcaccaccgagcagacgatcacatcgtccacatcgtcggccgtgtaatcgctcaaagccaggaactgcgtgatcatcagaccgtattcgtctgaggtgtgcgtcgccttggtggtgatgcggtaggagccgacgatgcggtcgacctccagaaaaccgatcacgatattcgtattgccgatatcgaccgccatcagcatgggtcaggcctccttgttctcgtcatcgacattgctcgcgccgccggaacgcaacgctgcgagccgcagcaacagtcgttgcgcaagcacggttttgtccatcttgtcccaatgctcgatcttcggggtgccggcatcctccgctccggacgtgagcacggtgacaacgttggtgtcggtgccgaacccggcaccggcgtcgcgcagattgttggccaccagcatgtcgcaatgcttggacgtcagcttcttctccgcattacgaatcagatgctcggtctccatcgcgaatccgcacaggatctgcgagccgtcgtcgcgcttgcgttcgccggcccacgccagaatatccgggttggaaaccagctccacggtgatgctgctgcggccggccttcttgattttctccggcgcaatctcggtcacgcggaaatcgcccacggcggcggccataatcgtgatatccgccgccgggaaggcgtcggccaccgcatcgaacatatcctgcgcggtcatgacgcgcaccacatccaccgcatcgggcgcggtcaaggcgactggaccggagaccagcgttacgtcggcaccaaattcggctgcggccgaggcaatcgcataccccatcttgccggtggaatggttcgtcagatagcggaccgggtctagcggctcctgcgttggcccggcagtgactagcacgcgcagccccttgagcggggaagatgagggagcctggtcatcctgcgcatccgccagcagccgagcggccacttcctcgatgcgcgccggctcttccatacggcctcgtcccacgtcgccgcaagccagattgccttcctccggctccacaatctgccagcccaattcggcgcaggttttcagattgcgctgcgtggccggattgttgtacatatgcacgttcatcgccgggcataggatcttcggcccctcataggccagaatggtggacgtcagcgtatcgttcgccaatccacaggcgatgcgggcgatgacgtcggcgctcgccggggccaccaccagcagattggcccaggccgcatcggccacatgattgatggtcgttggcacggtcggattggccgtcacgtcgccgtgcgcggccggataagcggggaacatcgtggtacgggtgggttgatgggtcagtgaggtgaatgtcaggggagtgacgaagccttcggccgctgtggtttcgataacccgcacctcgtggccggccttggtccaatcggatgccagatgacaggccttgaatgcggcgatgctgccggtgacgcccagaagaatatgtgccatagctgcctcccggccttatgccaaggccgcacgtgtgcccacgccagcgcttcccgcgtcgttgcccgacgatgcgccgcgtgttgtggtcgccgcggaccctccgtcggcgccgcaatccagtatagccattgcctccggcgtgtccggggatatagtagaacgtggtgatcgacccgaatgggcggtcaaccacgcaagataacaacgaaaccatattcgggcgtaagcatgcccgaatgcatcagggagtatccatgtcccagaacaatggtgtgcacggcgagtccggcgcaaccgaagacaggaacatcgacggcgcgaatcaagccgccagcaccgacgcgagcctgaacgcgcgcgcgaaatcatcaaacaacaagaagaacggcggcccgaaatggtggctgtggacgctgatcgcggtcgtcgtggccgcggcgctcatcgtgggcgtcaccgtcttcggcgggaaaggcaagggcaaggacgcgaacgcctccgtctcggccagccgatccgacaccgtggccgtcggcctcaaactcgccccggtcaatcttgacatccgccaccagtcgggttcggcccttgagcagatcctcatcggcaacgtgtacgagggcctcgtctcgcgcggctcggacaacaaggtccaccccggtctggccaagagctgggagatctccaaggatggcctgacctacacgttccacctcaacgagaagatgaacttctccaacggcgacaagctcgacgccgaggatgtggcgtggtccatcaacgagctcaaggcccagaagtactacgactacgagcaggtcaagagcctggacaaggccgaggccgtggacgccaacacggtcaggctcaccctctccgcgcccaactcgaacatgctgtggtacctcaccagccgtcccggcctggtctacgacaaggacgccacctgggatcagaagaacggcgcgttgggctcgggtccgtacaccgtggtctccttcgacccgaacgacaagatcgtgctcaaggcgaaccccaagtattggggcaccgagcacaaggcgaggaccgagaacgtgatcgtccggttcctgccggacgagaacgccagcatcaacgccctcaagagcggcgacgtgcaggtgctttcgcccatctccgccacccttgccgatccgttccgcaaggatccgaactatgtggtcaagtccggtgacggttccgacaagttcgtgctcgccttcaacatggccaacgacaagctctccgacaagcgtgtccgccaggccatccgatacgccatcgaccataagcagatcatcgcctcgcgcggcggcgtggatgcccccctcggcggtccgatccccaaggtcgatcccggttacgaggatctgagcggcctgtacccgcatgacgtggccaaggccaagaagctcatggagcaggccggatactccgagtcgaagccgctggacctgaccctcacctacgccaacgtgtacggcaccgagctcggcgaccagctcaagagccagctcaagcccatcggcatcgacctgaagatcaactacgtggagttctccacttggctgcaggacgtgcacgccaacggcaactacgatctttcgctcgtggaccatgccgaaagccacgacttctacggatggaccacgccgagctactacttccactacgacaacaaggacgtgcaggccctgtacgccaaggcgctggaggccacctccgatgacgaggcctcgaagtatctggccaaggccgcgaagatcgtctccgaggacgcgccggccgactggctgttcagctggaaggtcaccatcgcctacgccaagggcgtggacggcttcccgcagaacctgagccagaccgtgctgcccctctggcggatcacctacaccaagtagtcccggaacccatcgctcgggcgcggcgcgggagcgattccgctgcgcgcccgaccgtggacggcccatccggccggtgacgccacgggcggtggcgagggaatcgataagggaggcgttatgcggttcttgatgcaacgcttgctgctgttcgcggcggcgctgttcggcatttcggtgctggtgttcgcgatgctgcgcatcctgccgggcgacgtggcggtcgtgatggccggcatgaacgcatcgccggcgcgtgtggcggccctgcgcgccgaattcggccttgaccggccgtatgtcgtgcagtatctcgactgggccggagggctgctgcacggcgacctcggcgtgtcggcgctgaccgggcgggcggtgacctcccaggtcggccaacgtgcgacgatcacgttcccgctgatcgtgatgagcctggccatcgcgctcaccctcggcttgtccatgggcgccgccgccgtgatctcccggtcgccggccgtgcgcggtttcctgcgcgtgctgtccatcgtgggcggcgccgtgccggccctgtggagcggcctgctgctcatcctcctgttcgcacggggcgtgggccttgtcggtctgctgccctcgcaggggttccccgccgctgggtggggcgctcccgggcgggcggtctcgtccctgatcctgccggcgctggccaccggattcgtgtccggtgcgggcatcatgcgttacacgcgctccattctggaaggcatcgccgatgagggagggccgatcgatatggccatgtcctgcggcatgacccgcacccaggcgttggtgcgcgtgggattgcgattggcggctccgcagctcgtctcggtggtggggctggcgttcgcctcgatgatcaccggcgtgatggtggtggagaacctgttcgccctgcccggtctgggcgccctgttggtgggcgatgtcggcaaccgcgatctggtggccgtgcaaagcgagctgttcctgctcgccgcgttcttcctgctgatcggcctggcggtggatctgctgcacgcgctgcttgacccgcgtctggccgccggaaaggaggaatgatggttgatcgcaatggtcgatggcgtcgttcgggcgtggttctgggcaccatctggtcccgtggcaccggccgctactcgctgatcgtgctggggttgtggatggtcgtcgccctggtgtcgttgttctggaccccgcagtcgctgctggccaccgacggctaccacgtgtgggacaagccgtcgtccgcgcattggctgggcaccgacggcaccggcgcggacgtgctgagctggctgatggccggatcgcgtacgaaccttgccatcgccctgctgaccgttgtctgctcggctgccatcggcatcctactggtcgggctgatggtcgcccgttcttcggcgctcgcttcggcgtcggtcgccgtggtcgacgcgctgatctccatccccaccgtgctcatcgccctgctgctcgccgtgccgttcggcgcatccgcggccgtggtgatcggcgcgtgctccatcggctacgggctgcatctggcgcgcgtcgcccgtccggccgccctgctcgccgcccgctcgggatacgtgcagtcggcccgggcgaacggcgccagcgggttcggcgtactggtcagacacatcgtgccgaacatcacgccggtgctgatggtgcaatcgtcgatgtcggcgggcacctcggtgctggccgaggcgggcctgacctatctgggcgtgggcgtcggcgcgggggtgccgagctggggccattcgctggccacctcggtcaaactcatcaacgtgtttccgttgacggtggtgtggcccggtctgatcgtcaccctggtggtggtcgcgctgaacctgttcggcgacgcgttgcgcgacgccaccgacccggtggctaatcccgcgttgcggcagatgactgtgcccggtgcggttgtgccggtggctaggggagccggtgacactgcggcgcagtccgcagtggcagcgccgaaggagacggatgatgagcgttgaaattcacgggctgaatattgctatcggcggcaaaccgattgtcatggatgtcgatctgtccatcgcggacggcgaacgggtcggcctgatcggttcctccggttccggcaaatcgatgatcgccaagtcattgctcggcctgttgccgcgcgaggccgtgctgtccggcaccatcacgatgggagaaaccgccatcctgtccggagaaaccgccgagtcgcggcatgggcaggaagatgactcaggatctgacgaagaacgcggcgcggcagataggcaccatgttgccggtgaacgcagggttgccacctcgggccacgattccgctgcgtacgccgacgagcatacgcttgccgatctgcgcggccggtatgtgggtacggtattccagaatccggcccatgcgctgaacccggtgatgaccgtggcgcagcagattgcgttgccgttgagactgcactacgatctgaccaaggccgaacgtgctgagcgagtgaataccatgctggacaaggtcggactggaccgtgacgtggccggcacatacccgcacgaactgtccggcggccaacagcagcgcgtgggcatcgccacggcgctgatcacctcaccgcgattcatcatcgcggacgaacccaccaccgcgctcgactccatcacgcaacgtcagatcgtggacctgctgacctcgttggtggacgacgccggcgcatccatgctgttcatcacccatgatttctccgtactcgcgcgtgccaccacccgctgctacgtgctggacgccggccgcatcgtcgaatccggacccactgccgacctgcttgctgcaccgaccacgccgcaggcccaacgcttggtcgccgccgcccaaaccctcaccctccacacccccaaggaggattcgcatgagtaacagcagtgtgccactcctctccgcccactccatcaccaaatccttcggaccgcgcaccgcacgccaccaagtcctcttcgacgtctccgccgacgtccacgccggcgaatgtctggccgtgatcggcggctccggatccggcaaatccacgctgacccgcattatgctgggcttggaatccgcggactccggcagcgtggaatacgagagccaatccattgtcggcggccgaaaatcgccgggattcgcgaccctgcgccgcgaatcgggactggtgttccaggacccgttctcatcactcgacccgcgttggcaagtcgccaaatcggtggctgaaccgctgagtctgcagcgacgtgatctgaacaacaccgatatcgacgagcgggtggtcgcggctctgaccatggcgggtcttgaaccggcggacttcctgaaccggtacccaatcgacctgtctggtggccaggcgcagcgcgtggtcatcgcccgcgccatcatcaacgagcccaaggtaatcctcgccgacgaaccaatgagcgccatcgacgtggccgcgcgcatccagatcctcgacgccttcgccgctatccgtgaggcccggccgagcaccgccatcatcatggtctcccacgatctcggcgtggtgcagcacatcgccaaccgcatcctcgtgcttcacgacgggcgcgtcgaagagacgggtcccaccgccgaagtgctcggcaacccccaatccgattacacccgtcagctcatcgaggcagcctcgttatagacctttttggctcccctctctgaggggagctgtcgaatgcagtgaggctgaggggagttacgggtgccgtcgtactcccctcagtccgccggcgacacgcgcttgtcgcgggttgtgctatggtgtgaggcatgcagattatctcatgttgttgtcgctaaccgacgcccctgggcgagcggtcagtgacgcataacttgagatggagcattcgaatcgcggcgaatctgccgcatacttttcatgtatccgatggcacaagcgtaatcgtgtaatgcgcgagccgtggttaacatgaaaaaccggttcacttttcggattcaccgtacagtgagcgggaatactcgattttcaaaccaaagccacagtccattcgtctgggaacgtcggttcacgaacgcaacgcagcaaaacccccacaaccccagcaacgaaggacttcacatgaccatccacaacagcctcgcagaactcatcggcaacaccccgctcgtcaagctcaaccacatcccgcaggcggccggcgtcaaagccaccatcgccgtcaaagtcgaatacttcaaccccggcggctcctccaaggaccgcatcgccgagcgcatcatcgacgccgccgaacagtccggccagctgaagcccggcggcgtgatcgtcgagcccacctcgggcaacaccggcatcggcctggccctggtcgcccagcagcgcggctaccgcacgattttcaccctgccggacaaggtttccgaatccaagcgcgcggtgctgcgcgcctacggtgccgaagtcatcgtcacaccgaccgacgccggcccggacgacccgcgctcctactaccaggtcgccgaacgactggccaacacgattcccggcggcttccgcccgaaccagtacgacaacccgaacggcccgctgagccactactacaccaccggccccgagatctgggaggctacggaccacaaggtcacgcacttcgtggccggcattggcaccggcggcaccatctccggcaccggcaagtacctcaaggaagcctccaacggcgcggtcaaggtcatcggctccgacccggaaggctccatctactccgcttcctcacgcgacgaagtccaccagtacgacatcgagggcgtgggggaggacttctaccccaaggctttcgaccggaacatcaccgacgacatcgtgcgcgtatccgacgccgaagcctttgaaatgacccgccgtctggccggcgaggaggcgttgctggtcggcggctcgtccggcatggccgtggccagcgccatcaagtacgcgcttgccaatgatttggacgagaaccagattgtggtggtgctcgcccctgattccggccgcagttatctggagaagatcttcaatgacgactggatgcgtgccaacggctacggcgacatcgtggaacgcaccagcaagccctccctcgccgagcagtaccttaacggaactccctctgatgagggagctgcggatggactccataactagctatcaaaagaatcaataccaacatccgcactaactaaccgcacctgttttaccttcgaatacggaacaatcccgaaaggaacccaatatcatgtccgctgaatacaacgccaagttcgccaacaccgacatcgccactcgcgccatccacgccggccaggagcccgacccgaccaccggtgcggtcgtcacgccgatcttcgccacctccactttcaagcaggatggcgtgttgggcctcaggggaggccatgactactctcgctccatcaaccccactcgcaccagcttcgacgagcagctcgccgccgtggaaggcggcaagtacgcgctgagcttctcctcgggcttggccgccatcgacgtgctgctgcgctccaccatcaagcccggcgacaacatcctgctcggcaacgatgtgtacggtggcacctaccgcctgctctccaaggtgttcgtgccgtggggtgtgggcctcgacgtggtggacatcaccgatctgaaagccgtggaaaccgcattggcctccaagcactaccagtatgtgtgggtcgagaccccgtccaacccgctgctcaacatcaccgacatcgcggccaccgccgaagttgcccacaagtacggcaccaaggtcgcggtcgacaacaccttcgcctcgcccgcccttcagcacccgctggccgatggcgccgatgtggtggtctactccaccaccaagtacatcggcggccactccgacgtggtcggcggtgccgtggtggtcaacgacgaggagacccgtgagaaggtcgccttcctgcagaacgccgccggcgcagtgccctccccgttcgactcctggctggacatccgcggcctgaagaccctggatctgcgcgtcaagcgccacagtgccaacgccctgaaggtggccgaatggctcgaatcccagccctctgatgtgattgagcgcgtctggtacccgggcctcgagtcccacccgggtcatgaaatcgccgcccgccagatgcacggcggcttcggcggcatcgtctccgtgcagctcgcggccggtgccgaggcggccaagcacttcgtggaccacacgcagatcttcacactggccgaatcgctcggcggtgtggaaagcctcatcgaggtgcccgccgccatgacccacgcctccgtggccggcaccaccctgcaggtgcccgccaatctggtgcgtatttcggtcggtatcgagaacgccgacgaccttatcgccgatctcaagcaggcgttggatcgtatctgaccgtactgacggtactggtgacaccgtattgacggtgccaccacgcttatcggcggactcgctatcgattggtacctacaaaaaatccccggcccacaagggtcggggattttccgttatcgattgaacatggatcgaatcagctggcgttgccgccctgccatccggtggcatccgcaccagccgggcgcaacgcctgaccggaagtcggtgtggtgccatcaacgaccacacgagtgccgatggtggcaaagtcgtacatccacttggcgtcggccacctgcatgttgatgcagccgtgcgagcctgggataccctgctgcacatagatggggtgctcgccccacatgtatgcaggaacaccgtgcagggcctcgccgccgttatagtaggaaatccacggcgtgcctggctggttgtagccttcgccaaccatggtctgcgattcgtacttgagatacacgtagaacgtgccggtatcggacagcatggaaccatcggcggtgggcttgccagaagcgatgttgaacttcttgaccaccgtggtgccctgatatgcagtggcagtctggttcgtcagatcaacatgaacccacttatcgccatttgccgtatcgaagttatgaggcacctcgacctgcttgacatcatatgggctgtctttcacagccacagtggaatcagtggactggttctgctcgatggcggtagccagacgttcgggggcgtccccggcaccagtcacttcaataccatccacaccgagtgtcttatcggcaccaatttccacgccgccttcgtctttcggcgtgatgtagacctcgcgtgtcaccttgggaacagtcagttctttggttacgctgtcactggtgacgtacttggtgatggcatcgcggtcgactaccagactcatggtgccacccgccttattcaccgtgggcttgaggaatgaggcaatggtatcggccgggatggtgacgctcttgttcacgccgttgtccacggtcagtttgaggccaagcttggcattggcgtcaaactgtgtttgctgtgcgctcgcgtcatcaatcggattctttgcagtctgtagcttgaccggcaccgtcgcattttcgcccggggtcgcgacggcctccttgactgcagcattgacaacattgatatccgggcccttgccatcctgacccgcggtgtaatcgaactgcttggtgctcttgttgtagacaacggtggcaatctgcgctcggtcggcctcatcgaccaggccggcggtgacgaattgttcggcagtctctttgtccctggtggcggtcagagcgatatgcggctgatcgaaaatattgagcttggccacgtcgccggtcttcgcgttcaacagcgcatctacggttttatccgtgtcgacggtgacgccaaggtccttcagcgaggctttgacgctgttgccttcggcggtgaacgtcactgtggtgttattcagctgctgcttcacagtattcgcaagttcttcgcgggtctggcccatgacagagacattgcccaaatgaacaccgggcgcagccttgtcttggaagtaccaacgtccgacgaagaaataggctattaatgcggcaagcaacactgcaaatatggttatgatggcaatccgtgcggccttgccatgtgatttagcggtggtagatgccataacatgttcacccacataggctgtattgtcggcatggttattggtgccattgtcgctttgctgtggcgtggcggtacctgtggccgcggctgcgaacagcccatcggcggccacaggctgcagcaccgccgtctcctgatcgtcaggagaggagaaggaaaatgtatcgttggccataaaatgccccgtcttagttctctcaaagcggcatatcgtgtgatatgccgggaataacgtttcttgacgcataataatacggaagggctacgtacatcgttacgaggtattccgttatacgatgaaatccatccgcggtcggcctacactggtcgtttatgacagcacatcaggcggcgctggaggcgctcacacgatacttcggctatgactcgtttaggcccggacagcaaggaattgtcgaggctttgcttgccggacgcgatgtcttgggcgtgatgcccaccggcgcaggcaagtccgtgtgctaccagattcccgccgcgctcagcccgggtgcgactttggtcatatctcccttgatttccctgatgcgcgaccaggtcgatgcgctgaacgacctcggtctgccggccgcgttcatcaacaccactcaaactcccgacgagcaggcgatggtgttcgcccaagccgccgccgggcagatcaaactgctgtacgtggccccggaacgcttggaaaccgggcgattccgcgactttgccgcccgtacgccgatctcgctgatcgccgtggacgaagcccactgcgtctcccagtggggtcaggacttccgctcgtcgtacttaggtatcggcgatttcatcgccgggctgccgcagcgtccaccggtgggtgcgttcaccgccaccgccaccgaacgggtgcgtcgggacatcgtgggactgctgggattgcggaatccggccgtcaccgtcaccggattcgaccggccgaacctgtattttgatgtggtcaaactggagaccaaatacaaggccgcatgggtggcgcggtatgtggccgaccatccggacgaatccggcatcgtctactgcgccacccgcaagaccaccgaagcgctcgccgacacgctgaaccagatggggcatccggccgtcgcctaccatggcggcatgtcgccggacgcgcgtgaggtggcccagcgcgacttcatcaccgacaaggtgccggtggtcgtagccaccaacgccttcggcatgggcatcgataagtccaacgtgcgttacgtcatccaccacaatctgcccgaatccattgaagcctactatcaggaggccggccgcgcgggccgtgacggcgagcccagccgatgcacgctgctgtggaatgagtcagacatcgtcacccggcgtcggttgctggataacgattatgagaacgagcgattgactcccgaagagcaggagatcgttcgccagtccaagcgccggctgctggacggtatggtcggctactgccgcaccaccgactgcctgcaccggtatatgacccggtatttcggtcaggaattgtcgccgaatgctggttccgcggcgggtgaagacattgcggcggactcttcgcagtccggcagatgcggtgcctgctcgaactgcgaaagcacgttcgagaccatcgacgtgacccgcgtggcgcaggcgatcagccgttgcgtgcatgacgtggggcagcgcgtcggttccggcaagatcgtcaagatcctgcgcggttcgcgggcacaggatctggcatggctgaacccggagcggatgcccaccttcggcatgctcaaggacgtgaacgaggctcgcgtgcgcgacgtgttgagccagatggccacggacgggtacctgtcaatcgccgaagggcgtatgccaatcgtcatgttcggtgcgcgggcggccgaaaccgccgctcccgacttccactatgagatcaaacgggtggaacgcaagtcggcggcggccggttccggtcggagcgggggagtggctgatactgccgattccgccaatgttcccggcgatgcgctgggctcgtatatcccggacgatgacgaggaatcgctgttccagaagctacgcgaactgcgacgcaccatcgcccaggaaatcggcaagccgccgtacatcgtgttctccgacaagaccttgcgcgacatggcccgcatcaagccggttaccaacgcgcaatttctggcggtcaacggcgtcggtcaacacaagctcgacctctacggccagcgcttcatgcaaaccatcgcctcgttcaatgccgggagtgcgtcataacaatctcctatagcgaaccgcggagtatctgcgggcgttcttgggctggcgcgactacgatgactgttcgatacttcatgaccgaacactcagcaagtagaaaggcaacagcatggcagaagacaaggccgaaaagcccgtcgtcgaatcattccagcttgatcacaccaaggtcaaggcgccgtacgtgcgttacatcgacaccgaaacgggccctcacggcgacgtgatctccaattacgatctgcgcctgacccagccgaacgagcaggccatccccaccggcggcctgcacaccatcgaacacaccatcgccgtgctgctgcgtgaacgcattcccggctacatcgactgctcgccgttcggctgccgcaccggcttccacctgctgacctggggcacccactccaccgaggatgtggccaaggcgttgaaggaatcgttggagttcatcgcatacaaggccacatgggatgacgtgcccgccaccaccgagaagagctgcggcaactatcgcgaccacagcctgttcaccgccaaggaatgggccaagcagatccttgaggaaggcatcagctccgacccgttcgagcgcaaggtcgtctgattcgtctgattcgattcaattctgattcggctcccgctggcgggagccgggggcgaagccgactgagggtggctgtcctcaactcggctggactgtccggctcctgcggacgggagtcattgtttattagtgtccgtcatgcaacgcggacgggatttcttgtgcctacggcatggtaggttggccgtcagttagtcgccggtcaccgtgccggcaacccggcatgtcggagaggtgagaagtgactcagtcgaacgctgcaaacaaggcgacaggccgccgtttccgccacgccaccatgcgcgatctgccgcagatgcagaaaatctacgcacgcgcacgcgcgttgatggccgccaacggcaaccccacccagtggggcaacgaatttccgcgtgaatcggtgattgaggacgacatcgccaaccagcgtacgatgctgctggtcgacacctgcaatggccacgaacgcattctggcccagttcgccctgtgcccgggcaaggatccgacctacgccaaaatcgacggcgcctggctggacaacgacacctatgtgaccatccaccgcatcgccgcatccggtctggtgcgccacgcggcccgcgactgcatcaggtgggccctgaagcactacggcaacgtgcgcgccgacacccaccccaataacaaggccatgcagcacgtgctcgaaagctccggcttcgcccgttgcggcctgatccagctgctcgaccggccggtcgacaccaccagaatcgcctatcagcgccacgagtggtgagtgtggctg

SEQ ID NO: 1742 - DNA, 7993 bp, Unknown
  MAG_14  MAG No. k141_22823
ccacccaccccagaaatcggcaattccccagcaaacagctgccgggctacctcatagcaattctcaacagcagtagggaagcggtattcaggagccagccggtactcgaccgagatcacacggcgttgcagacgtacggccatatgcgcgcaagcctgcgtgtacaggttgatgccgcctgtggtccaaccgccaccgtggaaaaacaggatcgtgccacgcggcgtgactgagggaagttccgtgttggcattgccggaaataccgtcggtgttgccgctcgacgtgctttccttgatgggtattttgggtaggactttgggtaatacggcgggcagaatcgcggatattgccgaggccactggcgtgccattggcggaagattcctccagggcttcgggcaggggcgctccataggcgaccagcggcgtgaacactcgcaatggtacggcatatccatccgccataggcgcgaaggcgtcctcgacacggcatttcggattggcgggtgcctgcttggcgataagctcttccgccacgcgctgcaatttgtacgacttgcccgcgttgggcttgatgtagctggcggccttcatcgcggcgaacaatgcctcgttgatcggcatgacgacaggtcctttcagcggcggattcggtagtgcgaacaccccaaccttagcccatgaccggcatgaacaaaaaagggaaggaacccgagagttccttccctgtgtgccgtatcagacgcgatacgcgccgattatcaggcggcgaagtattccacgccggcctcgaagatcggctggtacttgttgccgggcacgttgacgtacaggccgttgccggaacgctccgagtgacccatcttgccaaacacgcggccgtccgggctggtgatgccctcgatggcgagcagcgagccgttcgggttcacatctaggtccatgctgggggtgccggtctcgtccacgtactgcgtggcgatctggccgttggccctgagctgggcgagtacctcgtcggaggccacgaagcggccctcgccgtgggagatggccacggtgtggatgtcgccgaccgaagtcttggacagccacggggagaggtcggaggccacgcgcgtgcggaccagtcggctctggtgacggccgatggtgttgaaggtcagcgtcgggcaggtgtcggtcatcggcacgatgtcgccgtacggcaccagacccagcttgacgagcgcctggaagccgttgcagatgccgagcatcaggccgtcgcggttcttcaacaggtcacgcacggcctcggtgacggccggcgcgcggaagaacgcggtgatgaacttggcggaaccgtccggctcgtcgccgccggagaagccgcccgggatcatcacgatctggctcttgttgatctcatcgaccaacgcctgcgtggattcggcgacggcggccggtgtcaggttgttgatgatcagcgtggtcacgtcggcgccggcgcgctcgaaggcggcggcggaatcatactcgcagttgttgcccgggaacaccgggatcaccacatgcggcttggccacggaagagccgacgtacacggtcttcttcggcgcgtggaagtcgatggtctcgacggtcgcgcccttgtcctcgcccttggaacggtacgggaacacggattcgatgccggactcccaagcttcctgcacagcgttcaggtccagcgtctcgccggcggccttgaacacgtactcggaggtggtggtgccgatttcgccgatctcgaccaaattggagacggccggaagcttggcatcgtctgtcagctcgacgatgaacgaaccatatgccggggtgaacaggtcgtccacggcgatgctgtcgttcagagtcacgccgatgcggttgccgagcgtcatcttgaacagggcttcggcggtggcgccatagcccggcgtggagacggccagggcatcgtggaagtcggtgagctcctcgatcacggagaacacctcaagcagcgcatccttgtccggggtcagaccgtcggccaggtagcgcggcgcgatgcgcacgatacggtgatcggcgtccttgaattcaggggaggtggcgcgcttcatgttgcccacggccacggcgaaggagatcagcgtcggcggcacgtcgagatcctcgaacgagccggacatggagtccttaccaccgatggcgccggcgcccaggtccacctgggccatcagtgcgccgagcacggcggccgccggcttgccccagcgttccggctcgtcgcgcagcttctcgaagtactcctggaagctcaggtaggccttctcatgctcgaagccggccgcgaccagcttggccagcgactcgaccacggacaggtaggcgccggtgaactggttcttggacatgatgtacgggttgaagccccacgccatcgccgaagcggtggtggtctcgccgaacaccggcagcttggcgaccatggccatgttcggggtgagctgacgcttgccgccgaacggcatgagcacggtgcccgcgccgatggtggagtcgaagcgctccgaaaggcccttgttggaggccacgttgatgtcggtgaccagcttgttcatacgctcggccagcgtgccctcgccccacggggtctcgtaggactgctgtgcctcgacatgcacggtctggtgcttggaagcgccgttggaggccaggaactcacgggacagattcacgatcttgtcgccgttccaggtcatcaccatgcgcgggtcctcggtcacggtggcgatcaccgtggcttcgaggttctcttcgcgggcgtagatcaggaactcgtccacgtcctcggcggccacgtccacggccatgcgctcctgggattcggagatggccagctcggtgccgtccaggccctcgtatttcttgggcacggtgttgaggtccacgaacaggccgtcggccaactcgccgaccgccacggacacgccacccgcgccgaagtcgttgcagcgcttgatcagacggcaggcatcgccgcgacggaacagacgctgcagcttgcgctccaccggagcgttgcccttctgcacttcggcgccgtcgagttcgagcgattccacgttatgcgccttggacgaaccggtggcgccaccgatgccgtcacggccggtgcggccgcccagcaggatgatcttgtcgccgggggccggggtttcgcggcgcacatggtcggccggagtggcggccacgaccgcacccacctccatgcgtttggccacgtagccggggtggtagatctcgtcgacctgaccggtggccagaccgatctggttgccgtaggagctgtagccggctgcggcggtggtcacgagcttgcgctgggggagcttgccttccagcgtctcggagaccggcacggtcgggtccgcggcgccagtgacgcgcatcgcctgatacacgtaggaacggccggacagaggatcgcggatgcagccgccgatgcaggtggccgcgccaccaaacggttcgatttcggtggggtggttgtgggtctcgttcttgaacaggaacagccagtcctcgtcgtggccgttcacgtcaaccttgaccttgacggtgcaggcgttgatttcctcggactcgtcaaggccggtcaggacaccgttcttcttgagccatttggcgccgatagtgcccatgtccatgaggcagacgggcttggcatcgcggccgagctcgtggcgcatctcaaggtagcgctcgaatgcggccttgacggtggcgtcatcgatggttacttcgtccagctcggtgccgaacgtggtgtgacggcagtggtcggaccagtaggtgtcgatcaccttgatttcggtgatggtgggctcgcggccctcctcgctgaagtacttctgacagaattcgaggtcggccaggtccatggccagaccgcgctcgtcgatgaacttctggccggcttcggcgtccatctcgttgaaaccggcgatggtctcgaccttgccgggcaccggcacctgggtcttcagggtttccttggtctccaggctggcctcgcgggcctcgaccgggttgatcacgtaatgcttgatggtgtccacgtcggcgtcggtcaggtcaccttccagcgcgtacagcttggcggagcggaccgtcgggcgctcgccctgggagatgagctggatgcattcggcggcggagtcggcgcgctggtcgaactggccgggcaggaactcggtggcgaagaccttggcaccggcgaagtcgggcaggtcgtaggccacattgtccacctgaggctcgctgaacacggtgggcacggtctggccgaacagctcctgggagatgccttcgacgtcgtagcggttcacgatgcgcagggccttgaggccggtcagtccgaggatcgtgcgcagttcgcccgcaagctgctgggcttcgacatcaaagccgggcttcttttccacgtacacgcgaaaaaccatggaaatcctttcttgaaaatattgaaaaattgaagaagtgcggtaaaagaacttggctcccctctccgaggggagctgtcagcggagctgactgaggggagttgtcatggcggtgaacgtcttgacctcccctcagtcgcctatcggcgacagctcccctcggagagaggagccagctgtatgttctgctacctgcacctaaacgacttattcggcgacttcgatgccttcggacttggcgagctcggccagacgttcctcgatctcctcgtaggccgggatgatgctgcccagaccacggcggaacaggtccttgtcgaggtgctcgaccttgccggagtggtccttctgatcccacagacggcaggaatccggggtgatctcgtcggccaacagcagcgtgccgtcggtggcgcggcccatttcgatcttgaagtcgaccagcttgacgtcgatcttggcgaagatctcgatcagggcctcgttgatcttgcgggccagcggggcgatctcggcgagatcctcgcgagtgcatacgtcgagggccaccaggtcatcgtcgttgacgaacggatcgtgcagatcgtcgttcttcaggaagtactcaagcaccggctccttgagcggcaggccttcctccacgcccagacgggagcagaagtggccggcggccacgttgcgcagcacgatctccaacgggaacatgttcaccttgcgtaccagctggccggtgtcgttcactcgcttgatgagatggctgtcgatgccgcgcttcttgagcaggtcgaagatgatggtggtgatgaggttgttcaggcggcccttgccggtgaagtcttccttcttttcaccatcgccagcggtggcggtgttcttgtattcgacccacagaacctcgggatcgtcggttgcgtacagttgcttggccttgccctcgtagagcttttccagcttctccatgactcacctttcaggagtggaatttctgggtgaactaacggtaaaagggtaccaatcgagggctacaacaacactcggcatgacgctacgatgcggccagcgcatcatacgtcgctgcatcgaacgaccatacgctgttgggatggcggaggcggacggtattggtccgacaatcgactcattgccggtcgcatagtcgttcggagtaacagtatctacgcaagcacgcggacactcagatgttcgtcaatagacaaaacgtgagtgtacggccgcgcacgcacgataatgggagtgacgaaatggtgcaaggaggttcgtcatgatcgatcatattggtttgtttgtttccgacgccgcacagtacgcggatttctacgagaagctgctggccccgctgggctacgtcaagaaagtggcgtacccgaccgccgtgtgctttgccaatgacgaggatggcgacagcgtttggctggagtctccgaaggacggcaacccggtggtgccgtcccatgtggcgttccgcgccaaggatgaggccgccgtcaaggcgttccatgaggccggtctcgcctctggcggtaccgacaacggcgctccgggcccgcgcccgaactatggccccacgtattacgccgcgttcatccacgacccggacggcaacaatattgaggccatgctgagctgatcaggccgtggactactccacggtaatcgtcaacgcatcggcaacacggccggccttggcacgggcgtcggcttcggactcgccgacggccagtgccacggccatacgacggtggccatgcacttcgggcttggcaaaaatgcgcaggtccgtgccgggttcggcaagagcagcggccacatcggtgaactcggcctcaccgtcgccggccaccacaatcgcatggcttgccgccaccgagccggccggaatcgtgagcgccacatgctcgggggtgatcggcaggccgagaatcgcgcgggcgtgcagcgcgaactcgctcagacgctgggaggtcatcgtcaccataccggtatcgtgcggacggggggagacctcgttgaacagaatcgagccgtcggtgagcacgaacagctccacgccgaatacgccccaaccggtttcgccggtcgcctgagccttggccaccaagccttcaacggcggtacgtgcgatgtcgcgcgcccgctcggcctcaccatcgggctcggtagccggctgccaggactcgcggtaatcgccggactcctgacgttggccgatcggcgcgcacgtcacaatgccggcggacgaagaaacggtcagtaccgtcagctcacgctccagcggggcaagcgcctcaacgatcacgcgcgacacatcgccctcatcggcggcgcggcggccctcctgcgcttcggtccaagcggcatcgatggcgtcggcggaacgcaccaccgactggccgtgaccagacgagctcatcaccggcttgaccacgcacggatagccgacttccgaagctccggcgcgcagctcttccagcgagccggcaaaacgatacggtgtagtcggcaagcccaattcttcgtgggccagtacgcgcaggcgctcgcggtccatgcaaatcgcggcgatttcggcgctcggcaccacctgggcgcccgcggccgcagcaccggccagcacatcggtggcgatggcctctacctcgggcacgatgatgtccggcttgatttcatcgaacaatgcctgcaattcggcggcattcgccatatccaacgcgcggtattcatgcgccacctgctgggccggagcgccggcataggagtcagcagcacacacccatgcgcccagtcgcatgagttcaagtgtgacctccttgcccagctcgccagcgcccaaaaacagcacacgggtggggtgcttgcccagcggtgtgcccagcgggtggttggctgcgcgagttgcgggggggacggcggaagtctcggcgggaattgcgggagaggaggcggaagtcacggcagtattcacggcgttctcagtcatacccacattctgccatgacgcgatgatttcggtatgtcgcgtgagcggagtgcctcgcgcggcaaaattacgggcggaatatccggcttcatggggcggtaaattccccatggggcggtaatgagtccatggggcggtttgttggttttgtgaaaccgcggaattaagccgttttgccttaccgccccatgggaatttcaccgccccatggggtaaataccgccccatgggcaggttgccgccccatgaagattcagatgcccgtaacccgccataaatactgcgtatagacatgccattgcgtgcgtaacagagccgtcgtaccttagcaattaccggccgatgaagtatggggcggtcgggccaacattttgggatgcgacatatagcgaatagcggcgtgtcggttccggcgtttcaggctacaagccggcacgctggcaatagtcgaagtacttaacgattccgcctatgcggggctcgaattcggtgacgta

SEQ ID NO: 1743 - DNA, 7906 bp, Unknown
  MAG_14  MAG No. k141_22865
aaccacaacaagtactcgggtgacgaaggcggtgtggacctgtacatcggcggcgtcgaacacgccgtgctccacctgctctactcccgtttctggcacaaggtgctcttcgacctcggctacgtggcttcggccgagccgttccacaagctgttcaaccagggcatgatccaggcctacgcctataccgacgaccgcggccagtacgtgccggcggacgaggtcgtggaagggccggccgacgcctccggcgagccgacgttcacctggaacggcgaacacgccaaccgcgaattcggcaagatgggcaagtccctcaagaacatcgtgactccggactacatgtacgagaactatggcgccgacaccttccgcctgtacgagatgagcatgggcccgctggacgagtcccgcccgtggaacacgcgcaacgtggtcggcggcatgcgcttcctgcagcgtctgtggcgcaacgtggtggacgagaccaccggccaggcccacgtgaccgaggacgcgcccgatgagaagacactgaaactgctcaacaacacgatcgccgaagtgaccgcggaaatggaaggcatgcgtccgaacaccgccattgccaagctcatcgtgctcaacaaccatctgacaggtctgaaggccgtgccgcgtgccgcagtggagccgttggtcctgatgctcgccccgatcgccccgcacatctgcgaggagatgtggagcaagctgggccaccccgagtccctgtccgccgagccgtggccggtggccgacgagcgttacgtgggccacgacaccgtgaccgccgtggtgcagatcaagggcaaggtacgcgccaagctcgaagtgccggtcgacatcgacccggccgacctcgaacggcaggcgctggccgccgtcgccgaccgtcttggcggcaaggagccgcgcaaggtgatcgtcaaggcccccaagatcgtctccatcgttcccgcggagtgattccatctaagctccccttgtcaggggagctgtcagcgtagctgactgaggggtagccaatgtgcgatatcgccccacctcaattgtggataacttcataagctagaaccacataccccgtttcagctggacaaacgcccatgaatccatcagcgtggatgcatgggcgtttctcataaccatcgcgcaggccatgccgccaaccgtttgcgcgcattcagcaggcagagcgaagccatgccccaaccgcgagtggaacggcccacgacgcctccgccgcctcccggccatgcacggattcgtccggccggccacccgccccaaagggagcagagcggcctgcggcaggcgacccgtgacaaacgtgcgttatcggatctgattggcgtacgttccgccgatgccgtcggcgaatcagccagactcacccgggatcagccgcgattgtcgttcaccattgggcatgccttggccgtgatattgctgctgatcgtcgcccttggcatcagcttggcattgctggtccaacagtcgatgaatatggccatgctgtctcaaccgaccgccatgcagaccacgggcggctccgctggagatcagacgatgccatcgcagaacaccacggacgagaaacgcacggatccgcagcagtcggagcattccgatgccacagcgaaccccgaatcggataccacgcaatctccgcacatgcagacggacggcagcgatgccggcgcttccacgcatggtctcatcaacctcaacacggccaccgctgaggaattgcaatccatcaaaggtattgggccggttaccgctcagcggatcatcgatcatcgcacggcgattggcgggtatgcatcagtcgatcagctgctggatgtcaaaggcatcggctccaagacgttggagaccatgcgagggcaggtgacggtcggatgagcagggatcggatactgcgcgagcaggggagccgcgattggaggatgctgccgatcgccatagtgatgtgggcggcgagtctgggagcgcacgcattattcgcatggaggatgtctgatggactcggcaccggtcaggtaaaagccgatgccggagctggcattgacgtcaccataatcggcatggaatggcctgtcacacgaatattgcctataacagtggcgtcatgtgctgccgtggcggcgataatcgtggtgtctttccgcctgcggatccggtggacgggaacattgaccgtatgcgtcgcggtggcgtgcatcggcagtatgacggcaatcgcgtcggacaccattgcctggcatgatcctgcctccgcacaagctcgccaatccagttcataccacgaagtcatggccacggtgacgacgcccgtgatcgcttcggaccaacgcacatacgattgtcagacggacatacggctgagcggcatcactgtggatggcgcggacgtacgttccacggtcgccgtgcgcgtatacgccgatgaatcgtattgtgggcagttgcgtcgaggcgcggtctatctgttgacgggcgtattgcagcaagcgcgatatggacgcataccgctatggctgctcttggaaggaaaacagccggtagcgcaggtgcgggctccgccgtggcatctcgccgcgatcgcacatatgcaggaggcgtttttcaccgtgaccggacaattgtccgatcaggggcgtgtgttggtgccgggattgacgatgggtgtgcttggccaggattatatcggcggcgatgccggtccgatgccggtcaacagcacgtatgcgcaaacgttggaaaatcagttccgccggtccggcatcatgcacctcatggccgtatccggcggccacttcgtactggtggcaggactggtgcgtcggttatgcatgtggatgctgcttgatcggcggctgacggcgttgctggtctctggagtatatgcgctgctggcattggcgatgttccccagtgattcggtcacccgcgcgttcatcatgggattgataggtgcgttggcgtatgcgatgggacggcgtacgcaagcgttgagcgccctatgctggacgataatcggtgtattggcggtgaacccggatatgtcggccagctacggattcgccttgtcttcggccgccgtactgggtatcgtgctgtttgcggggcggctggccggtgtctttgagcgagcgatgccgcacagcatcgccgagatgatggcgatgaccgtggccgcgcaattgttcaccctgccgattcaggtgttgatggaaccggaattgccgttgctgtccgtgccggcgaacctgctggtgtcaccgttcgtgggattggccacgatggcgggattgatggcactgacgtgcgcatggtgcacgccatggctggccggcgtattcgcgtggatatcgtcatggggcacgctggtgatggaacgggtggcgttgtggctgggcggcagcacgatggccgtcatcccatggaaagacggcgttacgggcgccgtgctgattgtggcggcggaaatcggtatcggcatgctactggtgttcgtcagccgttgcctccagcatgtccgtcgttatgaggccggaatgtctggcgtgcgcttcggttccgcttggcgcgtccgcctcagtctctggtgtgaggagacgagacgcctctttacgcggcggcaagccgaatagccaatgcggtattcggtgcagcaaccatcgcaatcccagccgaataccactatcttgacggcaccggcaaaatcgtgatgccggcaggtcattgtccaacctgtgtggcgagatgggggcatgacgaaaacagcagcgaatgcaccggtaaccgtggtgcccggaggcgactcgtatttgaacgacgcgcgcaccaaggcactgtgcgcgcaggcgttgaaggcgcggcccgacgccgacctcatcgaactcgacgccacatcggccgaccagtatgccttcgatgaagccgtcagcccatcgttgctttccgacgttgccgtggtcaaactcgtcaacctgcagaatgccgacgacaagctcgccgaagctctggtggcgtacaccaagcaggccgccaaggatccgaacggctccagcgtggtgatctgccagcacgagggcggcgtcaaagggcgcaaaatcatcgaccaactggtgaaagccggcgctcgcaaagaggacgtgccggatttgaagaaaccggatgcacagctcaatttcgtgctcggagaattcgagaaacgtggtcgtagagtcgaaccgatggccgcacagcagctggtatccgtactcggcggcaaaaccggcgaactcgccgccatgtgcgagcaactgtgtttcgactttgacgataatccgatgggcctcgaccgtgtcaaccagtatttgaccgccaatccgcaggtcaccggttttgccgtggcagacaaggccgtggaaggcaaaaccgcagaagccatcgtcatgatgcgtgcagctgtggaacaagggaccgatcccatcgcgctgatcggcgcgttggccatgaagctccgtaccattgccaaagcctcggcggtacgggccggcacgatttcccaggccgaagcgaaaaccaatccgtgggtgctgaagaatgcgatgcgccaacttggcggctggacttcggcaggactcgcgcattgcatccgtatgctcgcctgggcggatgagcaaagcaaaacaaacggtggcgacccggtatatgcgctggaacgctgcattgaagacatcagtcataaaggtcggtaaaagtcgataaaggggtatttatgagcgaacacactattgcggctcccaccagcgaggccatgcaggagctcggccgtcgtgtggccggaatggtacacggcggcgatgtattgctgctctcaggccctcttggtgccggtaaaaccacattcgcccagggcttcggggcggggctgggcattaccgaacccatcgtgtctcctacattcaccattgcccgcgaactcgacgggcatttcgccgacggcactccgtctcatctggtgcatgtggatgcctaccgtctgggcggctcagcctatgcgccggggcaggacgccatcgggcgtttgttggacgagctggaatcgctgggattggacgaagaacttgaagaccccggcgagaacacggtggtgcttatggagtggggcgaacaaatggccaccgccttggcgccagaacgacttgaaatccatatcgatcgacctctcgattcctccgatgccgcatccgctggatcagacggcgaactcaccagcaacggcactcgtaccgtcgcattcgtcccagtcggcaagcgatgggccgcgttcgatctgcagtaagccatgcgcctatagactcctcgatgtacactctctagaggctttacgactaggaggattcatgggttgcacgttggtgattgacacctcattcggctcgacggtcggcattgtggggcgcgatcccattgtagagaccgattcgcgcacccatgtggagaaactgcaggtcaatatcgcgcgcgcggtcgaggaggccgggttcccagcatctgacattgcaacagtcattgtgggtaccggtccagccccctttactggtctgcgtgccggtatcgttacggccaaggcactggctttcgcaacgggagcgacgcttatcggccataatgttcttgagcctcaggtgcaatggaatctcattcgccgtggcaaagccggcactctcggcgatactcataaatgccatgtgctcactcttgccgtaaacgacgcacgccgcaagcaactctattttgcgttgtactcggacccgctcgttggcgatcccgatggcgaaaccgtggcgacggctctgattgacatggatatcgattaccctgcatccatcgcgcagcgcgtgaatgatgccgttcatacgtaccgcgacggacttatgccagaagacagcaatgtggatgtggtcgtggatgttgtgggtcatggggcccgcaaatatgcggatgcgctgggtgcaatcgagcagcttggcgacatcaccgatgaatccgtattggaccaaggggagcaaggtctcgctatctttgccactgatgcggaactggttgccaaccgtaatcccgatacgccggtcgaaccgttgtacctgcgccggccggacgccgaagtgccgaacccgctgaagcacgtgctcggccatgccggcgccgataaggcgtgagacgggttgattcgatgattgttgacatcactgccgtaagtcgtgatcttgcggttcactccatcgcacagttggaaggcgaactgttcggtcgtggcgcgtggaacgagaacatggtgcgcgaggaactggatgcacccacccgcacatatctgctcgacgtgtttggcgagacggaacagactgttgttcgcggctacgccggcttctggtacgacggcgaggacgccgagctcatgaccatcggcgtgggcaaggcataccagcggcaaggcatcgccgttgcgttgcttcaggcactggtcgacgaggcgaagcgtcagggcgcctcgcgcatgctgctcgaagtgcgtgtggataacgaccctgcgctggccctgtatcaccggttcggattcgaacgcatgggattgcgcaaacgctactaccagcctgaaggcatcgacgcatacaccatgagcttggacctgaaacctagggtcgtgggctttgccgccccgcagacggcatcggcggacactgaagacatcactggcaagcaaacggagaagaacggagaagcacgatgagcgaaccggttgtactgggcattgaatccacctgcgacgaaaccgcggctgccatcgtacgcggccgcgaactgctctccaacgtcgtggcctcatccatggaggaacacgcgcgatacggcggcgtgatccccgaaatcgcctcccgtgcgcacgctgaggccttcgtgccatgcgtgtccaaggcgctcgccgacgcgaacatgacgttggcggatgtggacgccatcgccgtgtccgccggtcctggactggccggttgcctggccgtgggcgtgtccggcgccaaggcgctggcctgggctgcgaacaagccgatttacggcatcaaccatgtgatcgggcacatcgccgtcactcagctgcagttcggcccgttccccaaggacacgctggctctgattgtctccggcggccacacctcgctgctgcatgtggaggacatgccgcgcaagatcgatgtggtgggcaccacgctggatgacgcggcgggggagtgcttcgacaaagtcgcccgtctgctcggcttcccgtatccgggcggcccgcacatcgaccgccacggacaaaacggcgacccgcacgccatcaaggtgccgatgggtctgacccaaggcaaggccggtgccgcgcacccgtatgatttcagtttctccggtgtcaagaccgccgtggcccgttgggtggaaagcgagcaggccgccggccatgagattccggtggacgacgtgtgcgcatccctggccgactccgtggccaccgtgctagcccgtaagtccatgcgcggctgccggcagtacgattccaacacgctgatcgtgggcggcggcttctccgccaactcgcagctgcgcgccaaactgctcgaattcggcgagaactacggcgtcgacgtccgtatcccgcaaatcaagctctgcaccgacaacggtgccatggtcgccatgctcggcgtgaacctggtcgaagccggcgtggcccccagcgcccccgacttcccgatcgactccgccatgcccctgaccaaggtctcgatgtgataacgaatcatgcgcgacatgcatgacacgcatgtaagttgtattttcctcaggtacg

SEQ ID NO: 1744 - DNA, 38621 bp, Unknown
  MAG_14  MAG No. k141_22999
aaaatcaggcagcgagagcgaactcagtgcggttagatttagcacttattcttttgccggggtcatccacgagcggacccggcgttctcggcacgcttccctgcagcgaacaggtcaccgtcgaaaccgatcgcccccaatcttgagttatcaagcttccggcttttcggccggacttttcagcatacaccctatggcgctactcgcgcaaatcgccggcagcgaacatcgccccggcattgacgggaccaacgttgtcagcagaaccaacggagcgaacgccgccccggaaccaacggaaccaactgaatcgccgtcacttgatgatgggcttctgggatgcggaaacatcaatctgatgtttgccggcaaagccagccgtgccagcggtgatgttcttgtcgatttcctcgacttccgccagcttcagcttcagttgcgaggagtctccccaaatgattacgcggtcaccgtcgttaagcgtggtggtcaccgaatcctgcgtctcagcggtgaccttggtaatggacttacgcatcgattccggcaatgcgcccagaatcgccagcgcctccttcaccgaacggttcttgagactggcgtctatatccttgacctcgatcaccgggatgccatccacgttggcgttcttcaccgagttcaacacacgcgcctgggaatccaccgcggtcagggtatcgcctcttttcagcatggccgcaggccgttgcgccttgacttccacgctcatcgacttggggaactgtttggagaccttggcctcgctgacgccgggaatggacttgagttgctctgtgacctcatgggtggagaccaggaacaacgactttccagcctgcttatcggcgatggcatggatggtctgcgcgctcacccattcgttggcaccggatacgccgatctcgctggtttccagacgaaacaccgacgagaagagcagcagccacgttagccccgtcactacagccacgctgacgacagcaatcaacacgcgtaacgcaacgacacgtacgttcgcacgcttgcgttctttggcgcgttcggtgaaattcaccactttcgggcgtgatacgactcctagggagccggtggtctggtgcagcgtttcggcaacgtaatcctcgctgtgcagccgtcgtgcatcgacgaaggcaccggcctggcccttggctaccgtcacatcgtcgatgatctccggctcgttgatctcatgcccggaagacacggaccggggagcgcgagacttcgacgagtgacccgtgtttccgcgtgaaccgatggtgcgcggcttgcggggacttccggacgaacgacgtgagccgttgtcattgcccccggatctgaccgtgcgcccggacatcactcgcagctttcccgatgggcctcaagtgcggtgagcagcacctgatccatgtcggtgatgtcgcccgcgcccacggtgaagatcacgtcgccgtggtgggcgcgcatggccatcatcttggcggccaggcacatatcctcgaccggctgaatccacgtgcctgcggaagcgtccttgagtccctcagccgcgtccacgatggtggaggggctgatgtccgggaaatcggtctgcttttcacgggccgggaagatgccggtgataatgacgtcatcggctttggccaaggattcggcgaactggtgcgcgaagaacttggtgcgggagaacaggtgtggctggaagatcacacgaatggccgaatcggggtaccggcgtcgggccgcatccagcagggccgcgatttcggtgggatggtgggcgtaatcgtccactacagtgacctgcttgaccgtgccgcgcacctggaagcggcgtgccgcaccgaggaatgtgccggccgccttggccgcgtctgcggggctcacgcccagcagcacggcagcgctgatggcggcggccgcattgcgcgcattgtgcacgccaggaaccttcagggcaacgctctgagacaccggctcccccgccgtcaccgcggccggcagatgcagggtgagctgttcgacgccgctgcctgcggtctcgctttccgaagcgatccagacatacgcggcaccgcccaaatcgggcagggattcacgcgcggtagtgccgtaggcaacggtatgggatttcacgtcggcgggcatggcctccagcacggcaagtccgtcggggtcgtcgatactgatgatcacgtgaccggtggcccggccggcgtgggcaacgaacgcggcacggtagtgggcttcgtcgccgtaatggtcgagatgatcggcttcacagttggtgataatggcgatggtcggatggtatttggcgaagctgccgtccgattcgtcggcttcggccaccagaatatcgcctttgcccgcgtgtccaccgtccagcgtggtgccgtccgggccttggataaagccgccgatggcgtagcttggatcagcaccggcgttcaccagaatgtgggacagcatggagctggtggtggttttgccatgcgctccggccacggtgacggctcgtttgccgttcatgagcagggcgaggatgtcactgcgatgcacaatgcgcttgcctgccgcgtgcgctgcgacgatttccggattgtccggtttgatggcgctggagtagaccacggtctcggcctgggcgacattttcggctcgctgcccgaattcaacggtgatgcccagcgtttcaagtcggtcggttttggcgctgtgtgcgcgatcggagccgtccaccgcgactccttcggcgtgcagcatttcggccagaacgctcataccggcgccgccgataccgatgaaatgggtggcgccgagatccgcggggcgggccgcagcatcgaacgaggcatacgtggggtcaagcacgatgggctgatcttgagacaattcaaaactcctttggggattccagcaccctatattatgaccgtatctcgtgttgcgggacgggattggtctgtatcgcgcacgggatgatatctgaatactatttggatggttcggctaattgcagaacgtgccgggccatgatttcggcagcgtttctgatgccgtattcccatgccttgcggccgaattcggcaagtcgttcgtgatcggcgagcagatcgggcacatgctcatgcacccactgcggggtcaggtccttgtctgcgaccagaaggccgccgccggcgttcaccaccggttcggcattgaaacgctgctcgccgttgccgattggcagcggcacgtaaatggccggcagacccagtgcagccagctcggataccgatccggctccggcgcggcaaatcaccaagtcggcacaggcgaaggccagatcgattcgttccagatattcggcggtatggtagtcaccttgtccggccgattcggggccgatgccggtaagcacgtccgcgccggccgaggccgtgaccagttcgcgtacttcgctgattttgcctcgcccggtcaagtggatgatttgtgcgtgggccaacaggtctgcggcggaggaggcgatggcgcggttcaggctttgcgctcccagcgatccgccagtgaccagcaccagcggacggttcggatcgacgccaagctgcgcggccgattcacggcgtacggcggcacgatcgtcaccgatgcgtttggtcagggaggcgatggtcgggcgcaacggcagaccgacacgctcgacgtcggctccggcacgcggtttgagaccggtgccttcgtacacggtaccgatgaaatcggcccaacgagcgcccagtttattggccatgccggcacgcgcattctgctcatggatggcaatcggaatgcccatcttgtgtgcggtggcgtagacgggggcggaagcatacccgccgaatccggccacgacatccgcatgccgcgtttcaagaatggagcgcaccttggcggtttctcgcttccattttgccgggaagcgaagcatgtacaggtcagggcgacgcgggaacggcactttttcgatggtgtcgagctcgtagccggcctcaggcaccaaatccttctccaaacccaccgcagtgccgatgacggtgacctgtgccgtgggttcgatgtcgcgaatcgctccggcgaccgcgagcagcggattgacatgtccggcggtaccgccgccagcaagaacgatatgtggtgtgccttgattcatgattaccgagtctacttacgcgctctgacgcgactgttttatctgcggttgagaacgcataagtcccacaaccagtccggccgccgtcaagcacatgatcattgatgagccacctgcggagacgaacggcataggcacgcccaataccgggaacacacccacgaccacgccgatgttgaccatggcctggcccacgatccaaatggtgacgcacatcagcaccatggcaacataacgatcggtgacctgcaatgcgatgacgatcatgcaccaggcgagaatcgcgaagaacagcaatacgatggcgcaaccgacgaatccggtctcctcgccgatgatcgcgaaaatgaaatcgttatgggcggccggcaggtaattccatttctcacgcgaattgccgatgcccaatcccagaaagcctccggaggcgatggcgtacttggcgtgaatggactggtagcatacgctctgcgcgtcagcggccgagcaatcaccatatgtggccagaatacgacgcatgcggttcgggctggaaaccgccaatgcaccgaccataaccaccgcgcccaatacgccgattcccatccatttgccggggaatccgacgatcaggaaggccacgcctccgatggagaccagaatcatggccgtgccgaggtccttgccgcccatcaccagcgccacgcctatcgcatacaacaccaacggcgcggcatatgctttgattcccttcttgtggtacatcttgctgcaggcatgcaacgacgagggcagccatatgcacatcgcgaacttcatgaattcggccggctggatagtggtgaagccgaggttcagccaacctttgttgccgtagacgtcgatacccagcggagtaaaggtcagcgcctgcaacaggcaggcacccaccacaaagaacacgccggtccgtttccagaacgtcaccggcatcgtcaatgccacgaagcccagcaccaagccgatcaggcaaaacgcgccctggttcagaagctgaaggaacggcgacttgcccagtgcggccatggtgaccgtggagctggagaacaccatgatcaggccgaagcatgtcagccccaccacggccatgcggaatccgtggtagcaccatagcgggttgagcaagcttcgccaacccgtgtagtcggtgatctcgagtgcgggcctgtcaggggctctgtatgccttacgcttatgggtatcagtggaggccatgcacctcgctccacgtcttggctgcggcggcgaatcgattgcctcgatccgcataggacttgaactggtccatggaggcgcaggccggagccataagcacgatgtcgccggcggcggcatacgtgccgcaggcttcgacggcacgatccatgacggtatcgttgtcttcgggatcgatgatggtcaccgggatgtccggagcttggctggcaaacgcttcgaccatcggctgctggtctttgccgatgatgacggccgctttgatggtatgtgcctggtccttgaccaggtcctcgaatcgactgcccttggccagacctccggcaatccagatcacagacttggccgggaagctggacagcgaggcgcgtgccgcatgaccgttggtggctttggaatcgtccacgaaacgaacggagccgccctcgactgcggcctcagccacggtttcgatgcgatggccgcccggcttgaacgaggtaagcgccttcaacgcggtatctcgatcagcgccaagtcccagcaccaacgccaatgccgtcaatgcatcggccaccagatgcgggtacagtgagccgtccggctctgccagatgcgtgaaatcggtgatggcggccagtctgaccggctcccccactgcgccgccggccacgccgctcctgtccacgatccagccatcttcaatgccgatctgaccggcctggggggcctcgagcgtgaatcccaccttgcggcatccttcggcggtttgggcctcggccgccagttcgctgactttggcgtcctgcgcattgtagacgatggcgcgtttggcgttgtggaacaccttggatttgtcggcggcgtaattctcgcgcccgccatgccagtcgaggtgatcgtcggcgatattggtgatcgccgcgcagtcaagtgccagcgaatcggtgaagtgcaattggaaggagctcagttccacgcacagtacgtcgtgctgaggattggtggcgcaacgagacaggctcatgctcatgtctccggaggcgatattaccggcggtcggcgcgtcgagtccgcaggcggtgagcatttccgaggtcatctcggtggtggaggttttgccgttggtgccggtgatgccgatccatggagccggagtaccggtgcgctcgttattcacacgcagctgccatgcgaattccacctcgctcatcacggggatgccacggcgttgggcttccagcacgaacggggtgcgggggttgaacaccggggacgacatgacgtagtccacatggtcccagtccacgtcatcaaaggagcggagaccggcctcgggcttcctctcgtcgacgccaatcacgtgggcgccgcattccctcaatacctccgccaacgaggtgccggacacacccagtccagcgatcaccactgtcttatccgctacttgcattgttcctcctgatataggaattccgtgggtgagcataatcccacccagatttccgctagctgaacagcaggccggagcgggtgacccagtcgccgtagaaaatcgtcagggcgagcagcacgaagatgagttcgatcatccagaaccgcaccaccaccttggtttcggtccaacccttcagttcgaaatgatggtggatcggtgccatcttgaatacacgtttgtgggtcatcttgaagtacccgacctggatgacgtcgctcatggcttccatgacgtacagtccacccagaaccaccgccaggaattcggtgtgcgtggcgatggacagggctgcgaacaggccgcccaaggccagggacccggtatcacccatgaaaatcgatgcggggttcgagttgtaccacaggaagccgaagcaggcgacggccgcgcatacggcgatgacggtcagatcgagaggatcggacacagcataggaatagccgccatggctgccgcccttgatgtggtagctttcccagaatgcgatgatgccaaaaccggtgaaggcgatcatcgacgaacctgccgccagaccgtcaagcccatccgtcagattcactgcgttagtccatgcggtcatcaggaagttcacccagatgacgaacaggatgatggttacggcacggccggcgaagtcgaagttgaagaacggctgttcgatgaagctgatgcccgcctgcgcactggggaatcccgatttggtgggaatcagcagcgcaagtaccgcgtagatggtggcgaagatgaactggccgatgaacttgccgcccaccgataggccttcgttctgcttcttacgcaccttggcgaagtcgtcgataaagcccagcagacccatcgacagcatggcgaacagtacgagcaccgcggaccaggagggcacgtcgcccgaacgcaggtatcggtacagtgcggaggatgcccaaccgagcagaatcgcgaagttgatgaccacgccgcccaacgtgggggtgccgcgcttgaccagatgcgactgcggcccatcctggcggatgtactggccatagtgcagcttgtggaccagccgaatcagcagcggggtgccgactaaggtgacgatgagcgacaccagcattccaatgatcagagcaatcacgtgcagcttctctttcttgtcggtttcttggggtggttatcgggtcagttctttgcccagcgttcagccaaagcgctcaggcctgacgtgtgcgatcccttgagcagtaccacagcgtcggaatggttgcgcgccaagtcgatgaccagctgttcggccgcatcgatgtcgtgtacgcaatccaccgacgcggattggctctgacgggcaccgtccgccagagcctgtgccagtgcatcgagatgttggtcttgggcggaaccgaccgcgatgatcgcgtcgatgcccaattcggccgcatacgtgccgatagaggtgtgcaatgccgtctcatcggcgccgagttccagcatggcacccagcagcgccacgcggaacggatccttgccgtcatttgagttccaagccttcaacccgttcaggccggctttcatggagtcgggattggcattgaaggaatcatcgatcagtgtgaaggaagtcccctcgcgattcaccgtggacaatgccatgcgatgagggctgatggtgtgctgcgaggccagaatccgcgccaccgtttcgggtgccataccgtaacgcatcgccacggttgcggcggccaacgcgttcatcacgttgtgacgtccaggaatgcccagatgcaccggcgtatggttgccgtccgcatcgaccaacgtgaattcagcatgatcggaccggtcggcagtgacatcaatggcccgcacctcgggctcctgcgacgatcccaagccgaaccacagcacatcgccgctggccaggccggccatgggaaccacgtgttcgtcatcggcgttcagtaccgcggtgcctccgggaagcagtccctgcacgatttcgcttttcgcctgtgcgatgcgttcgcgggagccgaattctccaaggtgagcgacgccgaccttcaatacgattgccgtgttcggcggtgcgatacgggtcagtcgcgcgatttcgccgatatggctggcacccatctcagccacgaagaaccgggtgtgctcatcgacccgcaacgcagtgagcggcaggccgatctcattgttgaacgatcccaccggagccacggtcgggcctacggtggcaagcagggaggagagcagatccttggtggtggtcttgcccaccgaaccggtcaatccgatgatgtcgaagtcgccgtccagctcgcggcggcgaacgatgttgtgtcgggcgagctcgccaagggcgtcgaccgtgtctttcactacgatctgcggcaggccatcggactccacctcatggtcgacgatggccaccgtggctccctgttcagcggttttcgccacaaagtcatgcccatcgacacgctcgcctcggatggccacaaacaccgatccggggccggcctgccgcgagtcgctgaccgtattggtggctcgagactcggaatcggcgtctccgatcaatcgaccatcgacggccttggcgatctcctccacactcatcggaaccatggtgtttcaaactcctttacgattacgcttcgtcccgcatccacggacttaattgagattgttggccacatgcagggcactgcgtatgttgtttttcctcacgccggcggccagtaccatggcgatggccaaggacatgtgcccgagtcggacgcggtcgtacattgccggtgaatccgcagccatttcatccgattcgggtgtcgacgaggtcatggacatgtcatgttccgcaacgaatgcgtagcgtgtcttcaattcgtccaagcttgcgcttgcgttgacatcttccgtgcccagcacatccacgttcaccgattccaacgcatgctcggccaatgtgcggtcatccatggcgatgatcacggccgccacaccgtcttcggcgcacacggacagcgcgcgctgcatatcgaggatgcccagaggatagttcaggttcatggtacgtgtcatcgacgtggacccggatgcggtgattaccgccaccggattgcccagcatgtgcaggaattcggagagctgggacacgcctgcgtcaacggcctgctcatccgcaccggtcaccgcgaacaccgccatggcgttggatggtccgccggccaggccgctggccagatcgccgagtacgcgatcgtcgcaatcgccgtagagcaacggtatatcggcattggcgatctgccctttggacgcgcgtggcagcaacgccgcataggcacctgcctgtgcggcatgcagtacatcgggttcctgctcatgcgtgcagatgaacagcgagccgggaatcacggtatccacggcatcgctgagtgaggtaatggtgacattggtggcgaagggtggatcgacttcaaaaccgtaccgttcgaccagcattcccaaggtcacccgctgggcgatggattcgctcactgcactcatgggctatcgcctttctcccctgatccttaccacgtgactggaatagcattttttcgtggactggagacaggcacctcgtatttctgcataaggaactcacaaatctgtgcggaaacagggccggccgtcagaccgccgaacacaccattcggatccttcagcaccacggtgaccgcatagcgcgggttgtccgcgggaatcaccacggaataatcggagataatggacgagagcgcgccatccgaaccctgcacctctgcggtaccggacttggcggccatgcggtaaccatcgaccttgacgaacttgttgtagctctccgccactgattccatcgcattcatcatgtccgatgcgaccttttcatccaccacgcgggtggcttcgcccttcttggtctcagtggtcttgccattggcatcggtggttgatctgatgatcgactgctgctgcttgacgcccttgttcgcgatggtggccaccacgttgttgagctgcagggcgttgacggtgtagccctgaccaaacaggatggtgttgcgcgtacgcagatcccatgccgaagggctggtgagcagaccgctcgattcaccgggcaggttcagtccggtcggttgtccgatgccgaatttggtcaggtactcgtagcgttgctcatccggatagttctccccggccataatcatgccgacgttcgatgagttctgcagaataccggcgagcgtccagcgctcagtgccatggtcgaatgagtccttgtaggtctggcccttctgtgtgatgtggtccgggaccgacaattgatcgctcatcttatgcagtcccgtctgcagatagccggacatggagatgaccttgcccaccgaaccaggctcgaaggtttcggacacggcccgagacgggctcatcttcgccgcatcggtaccagcctgtacttcatcgctatcggccagtgcgagaatctccccgctctggacatcctgcaccacggcgatcgcccacgctgcgccatacttggattcggcctccttcaaggcctttttgacataccattgcacatcacggtcaatggtcagggtgacatcgtcgccatttttggccgccaccgattcggtcatggtgccgggaatctcttcgccgccattaccacgctggtaggtttcatggccatcggttccggtaagcgtcttgttctcgacctgctcgatgccggcgacgccatcgccgttgtcgttcacgccgccaagcagcgcgcccatgagatcgccatccgcatacagtctttcactgctcagctcaccccagacaataccgcccaggtgcaacgcctcgatgctgcgcttgacctgtggggtcacgtctttcttcagaatcacatactgcccggtaccggacagatcagctcccagttccatggcgttcatatccaggactttggccagcagtcggcccacggccgccgctccggtagcacccacgggtttgccgtcaatttcgtggcagtaatcacgggtgttgtcattgcaagtaatcggctcgaactcctgtgcagcctccggattggcgacgatagtataacgctccacgctttgagcgagcacggagccgttggcgtcgaggatacgcccacgcttggcgctcaacgtcacggtcagggtgcggttagccgtggccgcttgtgcggtttgacggccgccgatgagctgggtggaggccagctgaatcacgcatgccgacgccaccaacgccaatgcggcgccgatggcaatgcatttgaacgcgaaggtcttgaccttggcgaactctacgatgcgacgaatggtgttcactgggttccgcctttgttggactggtatccgcttaagtcgatggacactgatccttgctgcgggaccatgcccatgtcgctggccttgtcgggcaggttcgcgactaactgatcgagtttggcctgatcgtcttcgacatcttgggtaagtctgttgatattggtttcgatctgtgccgcctcaaacgagttctgcaccatctgggtacgcaacatcagcgcaccgaacaaggtgccgacgaggaagatcactgcgatggccacgtgcaccagcggtgcgcttcttgttctggtccattcgatgacccgtccgacgacattgccccgctcgtctccacgcgggttggagaccacccgcagctcaggtcgggaggaggactgatgcttggtgtgcggtcggttcgaggccggagccgcgttcgatcgaatgttacgtgcggttgccatatgccgttatcccctccttgtacgaattcgcgctgtgtttttggctctgcccggagacgcggagccttgtatcttgacgtcattcaggccctgcgcggtttgcgtaaagcgtttcctccatcgtgacggaatctcacggctgacttccaccgcccgcaaccgcaccgaagccgatctcgggttggctgcgatttcatgttcgccggccttgatggcacctcgcgtgagatccgtgaaaaacggttgggcatccggcggtatgacaggcagaccagccggaacatccactcgcagcccttgtgccatgaacgatttgacggttttgtcttcgagcgaatgataggactccaccaccagtcgtcccccgacatgcagtcggttcgcggcttgcggcaatgtggaggcgagcttgtccaattcgccgttgacttcaatgcgcaacgcctggaagacgcgtttggcgggattgcccgccgggcggtgggcttgcggcaccacttcatcgaccagacggttgagctgtgcggtggtggtaaacggctccttgtctcgacgtgccacgatggcgcgggcgatctgacgcgagaaacgctcttcaccgtattccttgaatatacggaccagttccgccgcatcataggtggcaagaatccgttcggccgtcaacggctggctgacgtccatgcgcatatccagcggcgcatcatgcgaataggagaagccacgatcggtttcgtcgatctgcaggctggataatcccagatccatgaatacggcgtccacacgttctatgcctcggtccgtcaacacctgatcgagctgatcgaaggcggcatgcaccgggatgaatcgatcggcgagcccctcccgttccatgcgttcggtggccagccccagcgcttcactgtcacggtcaatgccgatgagccgagcctgcggcgcggctttgaggaaggcgatggaatggccggcaaggcccagggtgcaatccgctgcgatggcgttctcatgttccagggcaggcgccatcaggttcacgcaatcgtccagcaataccggcagatgaatattcgccacatcaaccatcagaattccacctccggcaacacatcgtcagcaatatcggaatatccctcttccttctcggcgaggtaggactcccacgtgtccttattccacagttcggcacgggtgccaacgccgatcaccacgacgtcggaacccagattggcgtaatcgcgcagcatctgcggcaccagcacgcggccctgcttgtccggctgctgatcgacggcaccggaaaggaacacacgcaggtattcgcgggcggctttgtttcccaccgacacacgctgaatctgcgaggcgatacggcgaaattcatcgaacggcagcaggtacacgcaccgttcctggcctcgggccatgaccaggccctgccccagctgggagcggaatttggccgggagcgccatacggcctttggcgtcgatcttcggcgtatatgtgccgagaagcagcggcggcagaccagccatgagatcagccatagtggtggagccttgtgcgttggcatcagcgtcgcgaatcgtctgatcggcaaccatggctccacctccttcatcgttacgtgggatacacttcggccaactggttcaccactctaccccacgattccccatttctccccactcatgcacgatttgctcacccttttagggcaattaccgatggattgcgcgtgtcggccacgactgtcgcacgaatgggcgctccgcacatccaatccacgttgcgcactccaccgaccgaacagcatggcgaattcacgctgaattcacctattccgggttgtccgcatcactgacgtagggggtgtgcggtaaatttgaatgccttaagttttttctgccccacggaaatggaacgaagagaacagcatgtcgagttacgcctcccagctgcatgaggagcagcaggccgtcgatcgcgcctatggacgattggatgatctgcgagccgaaatgtggcaacgcctggacaccgtacgcgccgccggctcccacggatcccccacgcaacgcagcgaacgagactcctttgccacaatgtacgaaaaccgcctcacgcaattgcgcagcgttgaggatcggctggtgtttggtcgtctcgacgccaagaacggcgaccgtcattacatcggccgcatcggcctgtcgagcccggaccatgagccgattctgaccgactggcgtgccgaagccgcacgtcctttctatgaggcgaccccctccaatcacggcgacatcgtgatgcgcaggcatatcaccttgagtttccgcgaagtcgtgggcgttgaggatgaggtgctcgacgtgcattccgaccaagtcggccaggcgtcttccgccggcacgttgaccggcgagggtgcgctgctggcttcgctgagctcacgccgcaccggcaagatgaccgatatcgtggccaccattcaggccgagcaggaccgcatcatccgctccgacatgaatcgtgccgtggtggtgcagggcggtcccggcaccggcaagacggccgtggcgctccatcgcgccgcctacctgctgtacacgcaccggcgcacgctggaacgttccggcgtgctggttgttggccccagctcggcgttcctgcactacatcgatcaggtgctgccctccttgggcgagaccggcgtggtctcacgcaccatcagcgatctgattcccggcatcaccgccacggcggtcgactccccttatgcagccaagctcaagggcgatcgacgcatgacctccgtagtggccaatgccatcgccgcgcgcgtgcgtgttcccgctgttctgccgacagtaaccattagcggcattcaggtaccaatgctggccactgatatcgagcaggcgcaggcggacgcgaagcgcacccggcaacctcataacaaggcccgcgagacctttatccgttcgatgctgaccagcatgcagaaccgttatgccgaacagcttgattacacgccggatcaggcggagctgaaccgcgcgatgtcgttgctgcgtatgaacgagcaggtgcgcaagaccctgaacctgtgctggctgccgatgaccgccccatggctcatcgatcagctgttcgcccatcccgaacgtctgaagtctctggctggttggctgaccgacaacgacatcgcggcacttgcccgccccaagggctccccgctgacccgctccgatattccgctgctcgacgaagcgatggatatgctgggccccgatcccaagacggtggcccgccagtccgccgccgacgcacgtcgtgccgccgaagagcagtatgccaaagacacgctggccgcgaccggtctgggtggaggcatcgtctccagtcagatgctgctcgaccagatgaacggggacgacgccgagctgaccgcgcagcgggccgcggccgaccgtgaatggacctacgggcacatcgtggtcgacgaagcgcaggaactgaccgccatggactggcgtatgttgatccgccgttgcccctcccgctcgttcaccatcgtgggcgatgtggcgcagacctcggcgctgggtggcacccgacgctggagcaaatcgatgaaccgcctgttcggcgaaagccactgggatctgaacgagttgaccatcaactaccgtaatccgcaggaagtttccgaactcgcctcacgatttgccgagaaggaaggcctctacatctccacggtcaatgcggtgcgcaccatccccgattcggtgtcccgcaatgtggtgcccgacatgtcgtccttgctggaaacgacggccgagcaggcggcgcagcttgccgaacaattcgtttcggcagacggcaccggccgcatcgccgtcatctgtccggatgatctcatcgccccggtgcgcgacgccgtgcgccgcaaactggccgccgttcttgacccggccgaatacgcaaggctcatcgagcagcccgaatgggatgagcaaatcagcgtctgcggcaccgaaacggtcaagggtctggagttcgatgccgtcgtggtggtcgagcccggtctcatcgaggatgacgcgccgagccgcctggtcgccgcctcggacctgtacgtggcaatgaccaggccgacccagaaactggttatagttcggacaagaacggacgaaaagtccctgaacatctaaggtatgaagcatgcccaaagcactgttattggaaaacattcaccccgacgcggccaaatcgctgcgtgatcacggtttcgaagtcgagaccatgaagggagccctgagcgaggacgaactcatcgacgcgctggatggcgtggacttggtgggcgtacgctccaagaccaacgtcacagcccgcgtgctggatgcgcgtcctacgctaagcgccatcggctgcttctgcatcggcaccaatcaggtcgatctggcacatgccggcaagcgtggcatcgccgtgttcaacgccccctactccaacacccgttccgtggtggaattggtgatttgcgacatcatctgcttgatgcgccgcattcccgcacacacgcatcacatcaagcatggcctgtgggacaagtccgcttccggctcgcatgaagtgcgcggcaagacccttggcatcatcggctacggcaacatcggctcccagctgtcggtactggccgaggccctcggcatgcgcgtggtgttctacgacatcgaggagaaactggcactgggcaacgcccaccgttgcgataccctcaacgaactgctggaacagtccgatgccgtgaccctgcacgtggatggccgcaagtcgaacaccggcttcttcggcgaagaccaattcgcccacatgaagcaggacgcgattttcattaacctttcgcgcggtttcgtcgccgatctgggagctctgaagcagcacctcgattccggccatctgtctggcgcggcggtcgacgtgttccccgttgagccgaagaagagcggagatccgttcgagacctcactggccaacgaagacaatatgattctgactcctcatattggcggctccaccttggaggctcaggaatccatcggccatttcgtctctcagcgtcttgaggattactggttcaagggttctacctcattgtccgtgaacctaccgcagatcaacctaggtgaacgcaagggcgtgtgccgtatcgcccatctgcacgacaatcttcctggtgtgctggctcatgtcaatcgcgtgctcggcgaagagaacatcaacgtttccttccagtcgttggccaccgaaggcgaacttggctatgtggtcaccgacgtggctcagaagcccagcgccgccacgcttgaagcactacgcaacatcgagggcaccgttcgcatgcgtgtcatcagctgacgcagctcatcctcgattgatatgaaagagacccgtcgctgacgggtctctttcataagtgcagggcttcatgattggttcgcaccatggtttgcgaatcactcgcatatcacggtgcatggcattcgcatattattcacgcaaaccatcaatggcgctttggaaatcctccagacctgcaaagttctggtacacactcgcgaatcgaaggtacgccaccacatccaagtcacgcaacggtttcaggatggctttgcccacttcatctgaggtgacttcggcaaggcctcgggagcgaagatcctcttcgactttctgtcccagcagcttcagatcctcttctctgaccggccgcccctggcaggctttacgtacgccggaaatcactttgtctctgctgaatggctccacgccacccgaacgtttagtgaccagcagcatactggtttccaccgtggtaaaacgcttgttgcatttcgggcatacgcgacgccgacggatggaatgaccgtcatcgctaatgcgcgtatcaataactttggtgtcggggttctggcaaaaagggcaatgcatgctctccagaataacgtgtacgggcggaaaaaccatgccgctcgggtttcatttactcaaccggaacaataatgcgctgcccggcctgcaatgttccggactcgagattgttcagcgtaatcagctcatccactgtttccgatacatcatggccagcaggtgtaatagccgaagcatatgaccagagcgtatcccccggccgcacgatatagctggtcacctgcgtggcacccgtatctgattgggcccgctgagcggtaagcgcgccgaaaccacaccaggccagcgccaaggcgatcatcactgcgataatccgcccacgcacattccggcgggacgttccagcatgctgcatagctacacgtgcgctacgggccggggccatcaccattgaaccagtcatcacgaccacctctctcgaacagatgttctatcgaacaactgttcttataatggcacaaatgttcgacacggtcaagtcgaaactcgaacagatgtttgatttcacacgaacaacacgttatgctggtgacataacgaaaggagccctgacgtgagcaccattcccctctcccccaagcagaagccggacgagtccaccctgaccgaccgccagcgcaaagtgttggacgccattcgcacgcatatcgacgaacaaggctttgctccctctttccgggagatcggaaatgccgccgggctcaaaagtccgtcttcggtcaagcatcagctacaagttttggaagacaagggcttcattcgcatgaacgcgaacaagggtcgcgccatcgaggtgatggcaggatccgccccgaatgccgaaaagccatcacaagccagcgaagaggcaaccagcgccagcaatgtggcggagatataccaattccccgccgaagccattgccgaatcacatgacgtaccgctcgttggccgtattgccgccggcgtgccgattaccgccgaacagcatgtggacgacgtcatgcgtctgcctgaacggctgaccggctccggcaccctgttcatgctggaagtccacggtgattccatggtggatgccgctatctgcgatggcgactatgtggtggtgcgcgaacagaattccgccgtcaacggagatatcgtcgccgctctgttggatgacgaggccacggtgaagaccttccgcaaggaaaacggccacgtctggctgatgccgcacaaccccgcatactcgcccatcgacggcacacatgccacgattatgggcaaggtggtcaccgtactgcgcaaattatagcctgttcgccaccagctgatcagcgtgcgctgaatcgcgctggtcgtgctatagtcgcacactgcttacgaaaccccggcctcgcgccggggtttcgtcgtattcagaccatatcgcaaatggtattgagaagcggtttcaactcgatagagcgaaggagtacacatggcccatacccatacacccgcaccatccacatccgtaaaccctgccgcgcaccagcgcaggctgattgccacgttgaccgtcactggttcggtcttcctcatcgaagtggtgtcggccgtcttaaccggctcactggccctgctggtggatgccggtcatatgctcaccgacatgtccgtgctggtggcatccacaatcaccgccatactgatgcgccgcaagcccaacaacactcgtacttggggctgggccaggcttgaggtgctcaccgctgccgcgggcgccgtagtattgcttatcgtcggcatctatgcgttggtagaggccggcatgcgtctgttcggcggctccaaagcggaaatcgacgatatcggcttgctgctgttcgtaggcattctgggtcttgtcgcaaatatcatctcgatcttcatccttgcctcgcagcgcgaagacaacatgaacatgaaggccgcgttcctcgaggtaatgaacgacgcacttggctcggtgtctgtggtggcctctgccctggtaatgatctccaccggatggaatggcttcgacgccgtggccggtgccgtcatcgcactgatgatgattccgcgcgccatcaagctgctgcacaacgcggtcaaggtgctgctggaggaaacaccggatggtcttgatctcgataaggtacgcgagcatctggaagacgtgccgcatgtgcttgccgtgcatgacctccatgccagcacggtgtccaccgacatgccgattcttatggcccacgtggtagtcgacaaagacctcaccatggaagatgccgccacaatcctcacccaactgcaggattgcctgcgcgagcacttcccggtctcggtcccccacaccaccttccagcttgagcccgagggctatagctccccctcctccaacgaattccacgaataaaaaatgctccctctggaagcattcagcagggtataaaaaatcgctgtacgtgtgcgatttttcgtgccgcacaaggtgaaggcctacaaaggtagttcgaaccttgtgcggtgtgaaaggcgctccgtacagcgattttttatcagaagccgaactgggcggcggtttccttcagcgtctcggcggagcgcttcagagcggcgagctccttgtcggagaccggggtgttgatggtgttgttgacgccctgacggttgaggagggtcggcacggacatgcagatgtcggagatgccgtggaagtccttgagcatggagctcacgggcaggatgcggttggtgtcgtgcaggacggcttcgatgatgtcgacgccggacatgccgatggcgtagttggtggcacccttaccgttgatgatcttgtaagcggcgttcttgacttcctggtggatctcctcgcgcttggcggcgtcgagcggatcgtggccgggcagcggggtccagtcgcacatggggacaccaccgatggtggcggactcccacagcgggacttcggagtcgccgtgctcgccggcgatgtaggcgtgcacgttcttgacgttgacgccggtctgctgggcaatcaggaagcgcagacgagcggagtccaggttggtgccggaaccgaagacctggttctcgggcagaccggtgagcttctgagccacgtgggtagcgatgtcgaccgggttggtgatgagcatgtagatggcgttcggagccaccttgaccaagttcggcatgatggccttgaggatgttgacggtagcgccaacgagctcaagacgagactgacccggcttctgacgcggaccagcggtgatgacgaccatgtcggcgtcgcggcagatctcaggatcgtcggaaccgtcgatggacacggtcgggtagaagctggagccgtgctgcatgtcgagcacttcggcttccacgcgctccttggcgatgtcttcaagcacgatctcgcgagcgacgccacgctgggcagcggcgaaggcgagggtggagccaacggcaccggcaccaataacagcaagcttcgtgggcttaacggtagtttccgccatgatggatgaacctctcttcaaaggcggtctgctgatgaatggcaggccttgtaactaacggttttcactctataaacccgctaagacgttttgctaccagcacaccaccctgtctgataacggtatggtaatgtttccaacggttgttagcgctcacaaacaaactgtgatgtttatcacgttagtcaatggactgttcgaccacctgagcggcaagatgggcgtcaacgtccgcttcaagctgtatgccatcatcgcggtactccaccttgtccaccttgccgtattcgcgtacacgagagatcagggagccagcggtatacggcagcagagcgttgacatgcacatgcgggaccggcagcagactttcgaccgcggtacgcagctcgtccaatccctcaccggtataggcggagacgatgaacgcatccggctgcagtgcggcgagtcgttcacgtgtcgcctcgtccgcctgatcggccttgttgaatacgagaatacgcggaatcgaggccgtgccttcgatgtccgccaacacgtcattgaccgcgtcgacctgagagaacgggtcagggtgggagccatcgaccacgtgcaggatcacgtcggcctcggccacctcttccagggtggatttgaacgcctcgatcagctgggtgggcaggcggcgcacgaagccgaccgtgtccacgtaggcgtaagcgcgtccgtcgcgggttttggcgcggcgcacggccgtgtccaatgtggcgaacagcgcgttttccaccagttcggccgaaccggtcagacggttggtcaacgaggatttgccggcgttcgtgtagccgaccacggccactgtgggcaggccgaagcgacggcgtgaaccgcgcttgacctcacgtgccggagccatctcacgaatctgacggcgcagtctggcgatacgcgtgcgaattacacgacggtccatttcgattttggtctcgcccgggcctcgcgatccgatgcccgcatccgcgcctgccgcgcgaccgccggcctgacgggacagcgaaccaccccaaccacgcagtcggggcagcatgtattcgagctgcgccaactccacctgcgccttaccttcacgcgaggtggcgtgctgggcgaagatgtccagaatcaccgcggtgcgatccaccaccttgactttggctgcgtcctccaatgcacggcgctgtgacggcggcaggtcgtcgtccacgataatcgtatcggcttcctcacgcgccacgatgtcggcaatctccttggctttgccggaaccaacgtacgtggctgcatccggcttggagcgatgctgcagcaaaccatcgcataccaccgcaccggcggtttcggcgagcgccgccaactccctcaacgattcctcggccttggcttgcgtggtgacggcggacgaccagacgccgacgagcaccacacgttccagtcgcaccttgcggtattcgacttcggtgacgtcctgcagctcgccgagaccggcgacatgcttgagctcgttgcgggcctcgcgctcctcccattcctggttggcgtcctcgtgccagccggtcgcgcgctggctgtcgtcgagcagcacttcggactgcccggccagcacaccttcaggggtaacgtcgttgttgccgcggtcgatgtcggtgtactgggtgttgtcggtcaagtgcgcctcgtttggttggaatggttcacgattcttctatggtcctttattatcatcacatgaggtgacatgctggcatagatcggcacgtaccggcataggccggctgatacaggtcggcatacgagagcggcgaatcccgcagaaatggagcgaccatggcagaacagtatttctctgcggaacccgcgtcgaaggacgtgcgccgcacattgaacgtaacgttgcgcggccatgaggcgaccgctcaggtgtcgaacggcgtgttctccggctcgcgcgtggacctcggtacatcggtattgctgaagcatgcgcccgagccgccgcttaccggcgatttcctggatttgggctgcggctggggccctatcgccctgacattggcgtttgagtcgcccgaagcgaacgtgtgggcggtggatgtcaacgagcgcgcgctggacctgacccatgccaacgcacaggcgaacggccgcacgaacattcatgcggctcaggtggacgagtccagcactcccctgcccgccgagaaccagccggcgttctgcgagacggtgccgggcgacctcacgtttgatgcgatttggtcgaatccaccgatccgtgtcggcaaggaagcgctgcatacattgcttatggcttggctgccgaagctcaaggtgggcggcgccgcctatctcgtagtgcagaagaatctcggctccgattcgctgatcccctggctggacgatgcgctcggcgaggggttcactgcgagcaaatacgcgagctccaagggcttccgtatcattgaagtccgtcatgaaatatgagtatcctgcagaacttcccgtatctgccgcgcgtgatgagatagccagcgcggtcaaacgttcccaagtcgttattgtgtccggccagaccggttcgggcaaaaccacacagctgccgaagatcctgcttgagcttggccgtggcacgcacggcaagcagatcgtgcacacccagcctcgccgtatcgccgcgcgcacggtggccgaacgtatcgcctcggagatgggcgtgaagctcggtgacgaggtcggctatcaggtacgtttcaccgacgaaagctcgcccagcacgcgattgagagtcgtgaccgacggtattctgctcgcccagatccagcgcgatccgaaactcacccaatacgatacgatcatcatcgacgaggcgcatgagcgcagtcttaacatcgactttctgctcggctatctgacggcactgctgcctcagcgccgcgatctgaagctcatcatcacctccgcgaccatcgattcggtcaagttccaggagcatttcgagcacgccttgcatgagaaggtgccggtaatcgaggtttccggccgcaccttccccgtgcaggtggtctatgagccgcttggcaccgcgcccgcgttgatgcgcgaagtgccgggattcgcggtgggcgcccgccccggcgacgccgattacgacgagctggccagcgccatcgcggaatccgattccgaccggccccgcggccggtccgacgactcctatgccgatgacggcatcaccgatatgcccacggccgtggctcgagcctgcgccgaactggtgatccactcctcccatgagcgcggtccccgcgatattctggtcttcgcttccggcgagcgcgacatccacgagttcgaggccgcactgcggcatcattacggtccgcgcgccgacgacatgcgccgaccggacgccatcgagatcatgccgctgttcgcgcgattgtccgccgccgaccagcacaaggtgttcgaatcgcatttgcatcagcgcatcgtcatcgccaccaatgtggctgagacctcgctgaccgtgcccggtatccgctacgtggtggaccccggttccgcccgtatctcccggtattcgaagaccgcaaaggtccagcgtctgccgatcgagccgatcagccaggccagtgccgaccagaggtccggccgatgcggccgcgtggccgacggcatcgcgatccgcctgtattcgcgtgaggattacgagacccgaccgcgcttcaccgagccggaaatcctgcgtacctcgctgggtgccgtggtgcttcacatgctgtcggtgggcgtggcccgcacggccgaggacgtcacgaacttcgggttcatcgatccgccggatatgaaggccgtgtcggacggtttcaatgagctcaccgagctcaaggccatcggccgaaagcgcggcgaggtgacgctcacccataccggccgtcagctggcgcgcatccccatcgacgtgcgtctgggacgtatggttatcgaggccgcgaaaaccggttcgccgaatcttctggcccaggtgctcgtggtcgtggcgttcctgagcttgcaggacccacgtgaacgcccggacgacaagcgtgaggatgccgaccgtatccacaaccgatatgcggatgagacttccgatttcctgacggccctgaacatctgggatcgcgtgttccaagcggacggcgacccgagcaacaacgcgctgcgccgtatctgcaaaaccgagtatctcagctggctgaggatacgccagtggaaagatctcgtctcccagctacgccagatgtgcaaggagctgaagttcaaggtcggcgacccgttgcccgcctcccgcccaggcttggagattcgccagctgccgttgaatcagcaggccgcgcattcgctgtgctgctcgtgggatgcggatggcatccacaagtcgatgctcgccggattgctgtcgatgatgggcatgcaggtggtgcgtgagcccaaggcctccgatttcgcggggctgaccggtgcggcgcgcgcccgtgcgatgaaacgcgcccagaagcagtcgaagaacgattatcagggcgcgcgcggcacccgtttcgccctgttccccgcctccgccgtggccaagaagaccccgtcatgggtgatgagcaccgaactggtggagacctctcgcctgtgggcccgctattcggcggccatcgacccggcgtgggccgaaccgttggccggccaattgacccgcaccacgtatgcggagccgcactggtcgggttcgcgtggctcggctgtggccaccgcgcgcgtgctgctgtatggtctgccgatcgtacaggaccgtgccgtgcagtggggacgcatcaatccgcttgaggcgcgcgacttcctgattcgccagggtctggtcgagggcgatattcagcagcgcttcagttacgacgactttgtgggcaaaaaccgtgacattctcgaggatgccgccgatgacgcgagccgcacccgccagctggcggacaccgtgtccgacgaggatctgttcgacttctacaacgcggtcattcccaacgatgtgaccagcgtggccgatctggcgaaatggtggaagtccgagcatgaccgtcagccgaatctgcttgatttcgacccggccaaggtggagcgtctggcatccagtgattcggtgagtctggacgattaccccgaccattggcatacgaccggatcggacggccaacccatcgacctgcgtttgagctacgtatacgatccggccgacccggccgacggcgtcaccgtgcatgtgccgttgaaggcgctctcgcgtatcacgcccgaccagttcacatggaatgtgccgggcctgttggatgagctgattctgtcgatgatcaaggcgctgcccaagcagctgcgcgtccagttcgtgccggccccggatgccgcgcgtgcgattcgtgactggatcgacgagcattacccggatctgccgggctcgggctcgcagcagaagccgaatctgccgccggtggatgaggatggcacgaccgttggctggcctgatttggcacatgtgttcaccaaggcggccatcgccaccaagggtgcgcagattcatcccgaagtgttggggccggaactggtcgagcgtctttccccgtatctcagggtcacgttctcggtggagcagcaactgccggccggcaagcaccctcgtggacgccggcatgcgcgcggccccgtcaaggtgctgggtgtgtccaaggatctgaaggcgctgcaacgcaagttcgccgcgcaggcggaggcgtcggcccgtcaaatggtcaagaagcaggccgatcaggctggagaacagggcaagctggtcagtcaggcgaacctgttgcataaggcgggtgccaccaccgagtcccgggccacgatgctctggcgtggcgcattggatgcgctgcggttgccggccgaacgcatttcgtcgcgctggctgggtaccgaggcgttgatgctggcttctgctccgtacaagttcaccaaggatctggtcgaagacctgcagctggccacggtcaaacggctgatgccgaatgtcgacaggctctcggacgatgaggcgttggccaatgcggtgctcgatgtgcgcgaagtgtacgaggacaccgtctatcaggtggcgcatgacgtgatcgccgtgctcaaggcttatgccgaagtcgacaaggccactggcggcaaggctgatctgccgatgctttcggtgttgcagtcggtgcgcgagcacatcgccacgctggtgttccccggattcgtcggcgccgctcccccggacgcgctggcgaacatctcccgatacctgcaggccgatctcatgcgcctggccaaggcgaagaccgacaagaaccgcgacgtgcgatgggcgtgggaggccgacgaggcccgcacgctggtcgacaaggcgatggccaaggccaaggcggagccggccggcccccgccacgagacgctgatgaagcaggcgaccgccgcccgctggatgctcgaggaattctacgtgtccctgtgggcgcaggagcttggcaccgccaagccggtgagcctgcagcgcatcaagaaggcactggcgtagcgatggcgacgacgcaacggcgcaagccggccaatccgcgcggcagggcgaacgtgattgtcgcggggcggggcgtgtcaggaggcaatcgcaaacgtcgcccgggcaaacgcccgcgcaatcgcaggtatccgctcagcccggcgcgctggtggaagcgggccgggttggcgcagcgcgtcgcggctgtgctggtcaccgtggtggcggccgcatgcgtggtcgcgctggtcgtgggcactgtgcgggtcgtccagtggcgtcgcgacgtgcaggaggccgaggcccgccagctgcagctgacgcagcaatacgacttcaatcccggcgacatcatctcggacggccagttcttcaacgccaatgcgatgagcgaggccgaggtccagtcgttcctcgacaagcagggcgcggcgtgcagcggttcccggtgcctgaaaaccatgaccttcgacaccgaggaccaggcggcgaacgagtattgcgcggcgtacgagggcgcgagaaaggagaccgcggccgcgatcatcgacaagtcggcgcgcgcgtgcggcatcagccagaaggtgctgctcaccgtgctgcagaaggagcagcacctggtcacggccgtcgatccgacggacttccagtacaaggccgccatggggctgagctgcccggacaacgcgaactgcgatccggcctatgccggcttcttcagacaggtgtacggggcggcgcaccgctaccaatactacgtggcgcatgaaagcgcctacggctatcacgccaacgcgctgaactacatccagtaccacccggatgccgggtgcggcggcaccaacgtgtacatcgagaacaaggcgaccgcgctgctctacatctacacgccctaccagccgaacgacgcctcgctggcggccgggttcggcgagggcgactcatgctccagctacggcaaccgcaacttcgccctcatatacaccaactggttcggtgccgcgcgccgataggggcgggaacggcaaaaaaccgaaaccacggtaaggctaggtgtcatccgcgccgtcgccgccccgccgcacggccggagaaccggccggatgacgggcggcacggctcacaggtcgatcttcggggaggcgtcgagcagggtacgcgtgtactcggccttgggatggttgagcacgcggccggtctccccgctctccacgacgcgcccgtggcgcagcaccgtgatcacatcggacatctcctgcacgatgcccaggtcatgggtgatgaacaggcatgcgaaaccgtgctcgcgctgcagccggcgcagcaggtcgagcaccttgcgctgcacggtcacgtccagcgacgacgtcggctcgtcggcgatgagcagcgacgggttgagcgccaaggcgcgcgcgatgccgacgcgctggcgttggccgcccgacagctggtgcgggaaccggccggccacatcggcgggcagctccacctgatcaagcaattcaaggacgcgcttgcgccggttcgtctcgctgagcccgccctgcacgagcatcggctcgccgatgctccatgccacggacttgcgcgggttgagcgccgatccgctgtcctggaacacatagcccatatgcttcaggatctcgcgcttgcgcctgccatgcgccttggcgagatcctccccctcgatgagcaccgtgcccgaggttggcgcgagctggccggagatcaccttggcgatcgtggtcttgccggctcccgattcgcccaccagcgcgcgggtcctgccggccaccagatcgaacgagatgtccttgacggcgaagctgccggccttgtacgacacggccacgtcgttcacctgcgtgatgcgcctgccgccgccgagcgcgtcactttccgtgatgcgttcgccgccggccgcatgttcgccgtctgccgcatgctcgtcgatgcgcaggcgcggcacggcgtcgagcagcatccgcgtgtagtcgtcggacgggtggcggaagacctgcgcgacgctcccctgctcgacgatcacgccgttgtgcatcacgtacacgtcctgcgcggcctgccacaccacgcccatgtcgtgggtgatgagcagcacggccagatcgaggtcgaccgccagcgaggagatcagggcgagaatcgccttctgcgtggtcacgtcgagcgcggtggtcggctcgtcggcgatgagtaccttgggtcggttgatgatcgccatggcgatcatcacgcgctgcagctggccgcccgacagctcatgcgggtacgacgaccacacgcgttcggcgtcgtcgagcccgacctcgcgcagctgttcgagcaccttggccttgcgctcggcggcgctgagctgcttctggtggtatttgagcgattccgcgacctgtacgccgagcgtgaacaccggattgaacgcggtggacggttcctggaacaccgtgccgatgtattcgccgcggatgcgttgcagcggcgcgtcggcggccagcagatcgatgccgcggccggcggcgtccttgccgtcgccgcccggaccggagtccggcccgtcatccacaagggcgtcgtcgaggtacgcgtggcccttcacgctggccaccgacggatcgagacggggcagcgccatcgccgtcaccgacttgccggagccggattcgccgaccagagcggtgatgcgccccgggaacagcctgaggctgacgccgtgggtcacctcccgctcgtcgaagctgacggccagaccgtccacggtcacgatcgcgcgtggttcactcattggaagctccttggatgcacaagcgttggaatgcgtccggcgcgcgcgccagcggaccatgccgccggcgcgcgccggatgcggatgccggctcagttcgcgctggcgagcgagacctgcgtgtagtccgggtacgccgggaagttgccgatgacgaagttggtcacgttcgatccgtggatgaacgtgttcttcgaatagatcagcggcacgaccggcgcgtcggccatgatcgtcttgtcggcctcggcccagatcttgccggcctcggtctgatcgatggtctcggtggccttcttgatcagctcgtcgaccttcgggttcgcgtaacgggccaggttgtagttgccgtggccgatctgcgaggagtcgaacagcggggagatgttggcgtagggcgacgggaagtcgggctgccacgagctgatggccagatcgtagtcgcccttgtcgttggtcagcgtatcggaatacacatcgtcgttgagtgtctggatgtccaccttgacgccggcccgcttgaggctcgtctggatcgaggaggcggtttcggcctgagcggaggtggcgatgagcttgagggtcggggcctgctcgcccgactccttgatcagctgcttggccttgtccacgtcgccggtcggatcggccttgtacaggtcgtagtcctcgcggccctcgatgccgggcgtaatgagcgtggtggcgaagttgccggcgatctcgccgccggaagccgtctggtaggccttcttgtcgaccgcgtactgcagcgcttggcgaatcttcgcgttcttcacgtgttgggtgttgatggcgaggtattccagcgcgccgtcgccgctggtggtcagcagcttcttgtagttcgggttggcctgcgcctgcgcgagctgcgcggccggcacgaatccggacaggaacgagttcttgccttcaccggtgccctgcatgatcgactgggcggccaccgaggtgtcctgtcccatcttgaacacgatcttgtcggggcccgcggtgcgcaccggatcggtcttcttgtcccagtaggtgttgcgcacgaagacggcctgcttgccggcctcgttcgactcgaccttgtacggggcggaggccaccggcagcttgccgtagccggacgccgggcccttgccgtcgggcacgggggtgaacgcggcgagcgagacgacccacggccagtcgccgaacggcgcgttgaggtggaagatgatggtcttgtcgttcggcgtctcgatggagctgagctcctggccgtcgaacgggccgtggtagtcctgcgcgccctcgagcagcgtcttgtggtagctcaggccgccggtcagcgagtcggcgaaggaacgctccagcccgtacttgacgtccttggaggtgatgggcgtgccgtcggagaacttgagcccgttcttgagcgtgtacgtccacgtcttgccgtcgtcgctcgacttgccggtgtcggtggccagatcgggcacgaccttcgtctcgcccttgtcggtgatcttccacgcggtcaggcggcggaagatgttgccgttcgtggtggtcggcagaccctggctcttggccgggtccagatccatctccgtgctggacagcagcacgttcagcgtgccgcccttgacggtggtgccgctcgccgagccggtggcggcgttgtcgttggacgcgccgcagccggacagcgccagtaccgcggcacaagcccccgccgcgaatacgcgccatgcgttgttcttcatgatggttttcctctctatcggtgccggtccgtggagcagaccggcaagtatcgcgtgttgcggccgcagccgcactacttcgtgccgagcgcgaccctggggtcgagcaggctgtagcagatgtccacgatcaggttggcgacgatgaccagcacggcggcgaacatcgtcgcgccgaccagcacctgcaggtcgaggttcgacacggaatcgagcagcagcgagccgagcccctgcatcgagaacaccttctcggtgagcaccgcgccgccgagcagcccgcccagatcgaggccgaacatggtcatcacgggcagcagcgcgttgcgcagcgcgtgcttgaagatgatcaccgattcgggcacgcccttggagcgggcggtgcggatgtagtcctggctcagctcgccgatcatctgcgtgcgggtgaccctggtgtagccggcggcgctgagcacggccagcaccagccacggcagcagcagatgcgtgaaccagccgacagggtcgtcgtggaagttcacgtacccgccgctggggaatatctgcagcaccagcgaaaaggcgatcaccgtcagcaggccgatcaggtatgacggtgccgaaacgcccacgatcgacagcccgagcagcgtgcggtcgatcagcgtatcgcgcttgagggccgcccacacgccggtcgccacgccgatgaccagccacagcacggccgcgccgaccgcgatcgacgcggtgatcgggaagcggtcgaggatcagctggctcaccgattcgttgagacggaacgaatacccgaggcatggtgccgagcagaccacggcgccgccgccgctgccgaaggtgcgcccgacgaagatgcccgccacgtaattgcccatctgctcgtaccacggcttatcggtgcccatgaaggcggagacccgctgcagctgctcgggcgtgcatggcttgccgcacgacagctgcgccggattggtcggcagcaggaagaagatcaggaacagcgccagcgtgatgagcaggatgacgacgatcgagctcgccacgcgctcgccgatgtattgcaggattctcatgcacgcacccccttgcgcgggtcgatggcgtcgctcaggccatcgccaagcaggttgaagccgaaggtcagcaggaacagggcggcgcccgggaagatcagatacatcgggtcgaccagggcccactgcacggcgtcggagatggaccggccccatgagggcgtcggcgggttcatgccgacgccgaggaacgacaggcccgcctcggcgccgatgcgcccgggaatcgacagcgtgatgttgacgatgagcagcggcatgaggttcggcaggatctgatgccacagcacatgggcaggcgaggcgcccatcaccttggacgcgacggcgaaattgcgcttgctcagcgtcagcgtctgcccccggacaagacgcgcgatgccgggccatccgaagaatccgagcactagcgtcagcagcaccggcctcgggaagccctgcggcaccaccgccgacagcgcgatcgcgaagatcaggaacgggaagccgaagaagacgtccatcgtgcgcgagatcagcgcatcgaccaacccggggaaatagccggccagcagcccgagcgccacgccgatgaccagcgagatgaccgacgagacgacgccgatgcccagcgagatccgtgagccgtacgccacgatggagaacaggtcgacgccgcgcagcggggtgacgccgaaccagtgccgggcactgatgccgccgccgaatccggccggcaccgacccggcacccaaggcctcgggatgctcggcgtacgggtcgttgccggtgatggccgacaacggcccggccagcggcgccagcagcacgaagaacagcacgatggcgccgccgaccactatcgatgagcgagcgccggaacggagaacgcgccgccgtctttccgccttcggcgcggctttcgccgtcgcatccgtcatattgtcatccccattttcacgctgaacatgccgataatcatcaatccgcgcaggtgggcgcccgtgagccgggtccccctgcagccggtgtcctaacattaaggtttcgcagcaggatgacatgctgtggccttatcggttatttggatagcaggttatcaatggacggcaatcggcggataaggcatgccgcggggacacgcgggaaaaacccttcgttcccgcgcgtcacgccacccgtcattccccgaccgggctgacgtacggacgcagcagggtcgtggtgccgaccgcgagcagcgcaaaaatcgcgccgaccgggccgagccaggtcaggccaaggaggtcgttgaccaggccgccgaccgcggagccgatggcgatgccgatgttgaacgacatggaattcagggaggcggccagattcaccgaaccgggatgggattggtaggccacatccatatacagcacctgggaagcggaattctgcagatacatgagcatgccaagcgccaccagcagcagtgcgccgccggccggcaccagcgaggcgaaagccagcaggcacaggcagacggcctgcacgcagtagatcggtcgaatgtgggtcagcggctcgacccccctgccccgatcggccagcttgcctccgtacaggttgctccacaggcaggcacagccgtagaccaccaagccgacgctgatatagcgttcgggcacaccgatttcgtcgcgcatgatcggcgagaaatacgtgtagaagacgtaggaggcggctgcgccaaagaccacatccgccacgccgagctggatgcggcggtcgaagaacagacggaattgcctcaggaaaccgatcttcgccggatgtgagttgcgtggcagagacactgccatcgatgccatcagcacggcggtgagcaccgaaaccaaggcaaaggtgacacgccagccgaaagtattggccacccaagtgccggccggtacgccgaccacagaggcgatggagaaacccgagaatacccaggcaatgaacttggtgcggtatttgtcggtggtcacgtcgggcgcgaaggtcatggagatggccaccagcgtgccggacaccgaggcgatgagcagtcgggcgatgagcagcaccggatagttcggcgcgaaggcgcacaggatattgccgacgaggaacacgcccatcaacgtcagataggtgagaaagcgcgggaatcgggcggataatgcggatccgagcggcgtgcagggcgcgtacacgaatgcgaagatggccaccagattacccacggtcacttcggagaccttaagtccggatgcgatgtccggcaggatgcccactaccacgaattcgctcatgcccagcatgaagctggcgaagatcaggatggtgaccggcagattgaagaagcggtcggtgcgcgcggtgttcgcaggtgtgttcgtcatgggtgctctcttgagtgctctcgctcgtactacaagctgattcgtcggttacgtcaatcgtttttcgtatcaactcagcgacaacactattcccacctctgcccgctacccaccaccacgacacgctatagaaaccccgccgatgaccaatcatcgacggggttcggcacatgtgcaacgcttgcgattacagcttcggcagatacttcttcagctcgtaaggcgtgacctgctggttgtactcctcccattcctggtgcttgttgtccaggaagtagccgaaggcgtgttcgccgagcacgtcggccacgaagtcggatttctccatgatcttcagcgcctcgtccagcgagcgcggcagcggctgaatgcccatagcctgacgttcgccgtcggtgagctcccacacgtcatcactggtgggttcgcccagctgcatctgcttatcgatgccatcgagaccggcggccagcagcaccgagtaggcaaggtatgggttggccaccgggtcgagcgcacggaactccatgcgcgcggagttgcccttgcccggcttgtactgcgggatgcgcagcagcgcggaacggttgttgtggccccagcagatgtagcttggtgcctcattgccgccccacaggcgcttgtacgagttgacgtactggtcggtgaccgcgcagatttcggccgcatggtacaggatgccggcggcgaactggcgggcggtcagggacatgttgaactcctgaccggcctcgtagaaggcgttggaatcgccttcgaacaggctcaggtgcgtgtgcatgccggaaccaggcgcgtcggccaggggcttgggcatgaagctggcgcgaatgccacgctccaaggaaatctccttgaccaccgtacggaatgtcatgatgttgtcggccatggtgagcgcgtccgcgtatcgcagatcgatctcgttctggcctggccccgcctcatggtgcgagtattccaccgagatgcccatttgctcgagcatgttcacggtggcgcggcggaagtccatgcctgggctgcgcggcacatggtcgaagtagccgccctcgtcgatcggggtcggggccttggaccagtcgtcctggctttcgaacaggtagaactcgatttccggatgcacgtagaacgtgaagcccttgtccttggccttggcgagcgtacgcttcaacacgtgacgcggatcgccgagcgaaggctcgccgtctggggtcagaatgtcgcagaacatgcgggcggtaccttgcgggccaccgcgccacggcaggatctggaacgtcgcgggatcgggttgaacgatcatgtcgtcttcggacacgcgggtcatgccctcgatggcggaaccgtcgaagccgagaccctcctcaaacgcggcttccagttcggccggagcaatcgccacggacttcagtgttcccaacacgtccgtgaaccacagacgaataaagcgcacgtcgcgttcttcgaccgtgcgcagcgcaaactcctgctgtctatccataatcgcttatcgttccatatccgtgttacgaggggcgttaacatctcaccggtgtgccgtgttacatgattcggcggcgaagccgcgctaaggtgtggttcatgagcgaagaccatctcaccccatccgccaatccacctgtcgatgtaaccagctggaagcaggccaccgatccgcgcgaccggtcacgtgccggcatatccactcgagccaaggcgccattggattcccatgccatttggcaggcgcaggagggccgga

SEQ ID NO: 1745 - DNA, 10349 bp, Unknown
  MAG_14  MAG No. k141_23247
gctccagacgcgcgcggcctcggcggctttgacaaacaggcggcccttccagccggcaccggccttatgcgaggcggcgttgtacaccttctcgaacacgcgtggcacgccaagcaggtaggtcggttcaaacgaacgcaggtccggcagcagggacttggtatccggcagataaccgaccacgccgtcatcggaggcgatggaggcgtactggataaatcgtgcgaagcagtgggccagcggcaggaagagcagcaggcgcggatggtcgtcgagaaccacttcatgaagcgcctgcgaagcggtgatggtgatggacacgaagttcttgtgggtcagttcggcacccttcgggttgccggtggagcccgaggtgtagacgatggtggccagatcgtcggcgcgcacggtggccacgcgctcgttcagttcctcgtccgaaacagccacgcccagaccttcgagcgcgcccagtgcgttgccctcgagcatgagaatctgcttcaaggcagggcagtggtccttgaccgagtcgagccggtcgaagcgctcgcgattgtcggcaaaggccagcttgaccaccgaatcgttcatgatgcgctgggcctgcggggcggagtcggtgtcatagatcggcacgcttaccgcgcccaccgcggccagtgcgaaatcgagaatgccccattctagacgggtggaggaaaagatggtcaccgcgtcgcccttggcgatgccgagcgcgatcaggcccttggcggccgagaccacgcgctcgtggaattcgccggtggtgacgttctgccagcggccggggccgattttcttggcggcgattaccgtgtccgcgccggtgcgggcaaggcgatcggtaagtagggagtagatggtctggttgtcgcggatttcgatggattcgccaggcgtggtgtagtggtcaagcataagcgggccgtgtccttacgtgcgttgcgtgatggctgttgacaaaatcgagccattctgacaagttaggttacgctggcgtaaggttgcgcgcgttgtgggcaatggagaagttgtctgtctggttttgtggattgtatacaacgccgtgtctaaccggtttgctctacggttatgacaccgtgtccatttcgggagccatcgacttcctgcaggacaagtacgcgctgagcccggccctgcagggtctggtcatcagctccatcatgatcggcggcgtgatcggcgccggcttctccggcttcctgtccgataagtacggccgccgccgaagcactggtcgccgcgcaaaaagcagcactaggccgcgtttgctgcgtctattggcgaattgatcatatgggtcgtctgcgtgcagacgacccttttgcgttccgtcggcttctgacaccgtagaaacgtgctttctcggcttcgaggggctgattttgccttatctggaagtctacttccacttcgaggggctgatgcccaagtagacacggccctaaaacggcggaatgacgttgacgtgtagccgtttatacttccgattacatggatgaggagcccctcgaagcggagatagacttccggcaaatgcgaaatcagccccttgaaacggaagtaggcctccggcaaacgcaaaaattagcctcctcgaaacggataaatgcacgtattgggtgtagtggatgcttcagcccctgatatcgaagcatattttttctggttggcgcgtctagcatgcgcactccgcaatcgataattctgtggcctctctcactttaaaagtctggcgtgtgcgagggcgttcgcttaaggtgaatgggattgcgcggaatgtggagcgcagggtcatgaccatgcgcgtgctgcagatccagctgcgctcgctgaccgccatggatatcgtggcctacggcggtgctgcggccggcatcggtgtggcgttatggcaatacgcgcatattggcgatgcttttgccaatggtgcgtccggctggtcgccaatcgcactggcctcacatctgcctggtgtgcttgcctacgcggcatacggcctgcactatctcatctcgttcggggtgggctacccgctgtctcttaccggtctgctgttcattgtgctgctgtccgccgaattctttattcccatgcgtcagcttggctcgttcttccacgtggcgatgaacggcatgacctccaccaagcgcatcttcgctctgctggacaccccggagcccgagcatggcacggcgaccctgccggccaacgattccgattccgctgacgacggtctgacggtccgcttcgaccacgtcggctattcctatgatgatgccgggcacggcgactccaagtccgcatccgcaaagaccgataagcaaggtgaaaccagccccaattccgccgtcgctcctgcgctcaccaacatcaccttcgccgcacggcccggtcagttcaccgccattgttggcatctccggttccggcaagtccacggccgcctcgctgctcgccggtacactggccggttaccgaggttcgctcacgctgaacggcgtcgaggtatccgatttgtcaggcgaaacactggccggagccgtcactgtgattggtgccagcagccatctgtttgcgggcgcattgcgcgagaatcttctgatggccttgcccgatgacgagattcctgattcgccggattccgtggactcccgtctgtggtccgcgctcgagcaggcgcgcattgccgacttcgtgcacgcacagccgaacggactgggcatgccgattgagtccgatgccgccaacctgtccggcggccaacgccagcgcatcgccatcgcccgcgcgctcctgcatgattcgccggtatttgtgttcgatgaggcgaccagcagcgttgacatggaatccgaagagctgatcctggatacaattcgcgaattggcgcaatcccgcggcaagacggttattatgatcacccatcgcatggccaacgccgaacacgctgatcaagtggtggtgctcgaacacggcaagtcggttgagaggggcacccataccgagctgatgacggcggacggcgtctacgccaagctgtttaccacgcaggcagatattgagaacttcggagaaggccatgctcggcgtgtgctgcaggttggttcccgcaagcaggagctgtccgacgacagtcggactgagggtggcgcagcgcgcgtaagcgcagaggcgggtatgacggttgaccgcctgcagtcagctttgccgacggcttccgttggcgggagtgagcaggcctcggctgagactccggctggtgttgcaaatagcgattcgtcttccaaaatgagcacattccaagtgatcaggcgactgcttaaggaagcccgacctctggcaggactgatggcagcggcctccaccgccggcaccatcggccatctttcggccactttcctgcccgtgttcggcattatcgcggcatttgcacttaccggtaatccggtgtggggcatgggtgttgcgcccgccgtcatcatgatgattatctgtgctcttctgcgtggcatcacccgatacattgaacaatatctgaaccacaatgtggcattccatctgctcgcactcttccgttccaaggcgttcgccgcgttgcgcagactggcgccggccaagctcgcgggcaaaggtaagggcaaccttatcgccatgctgaccaccgatgtggaactgcttgagatcttctttgcccacaccatcagtccggtggccatcgcggtaacctccaccatcatctacacgattgtggccgccaccctaagcccatggatggcgctggcgttgattgccgcccacctggttatcggcatccttgtgccgcgattctttgccaccggcgtacgtaaccttggccctgccatccgtggcgctgccggagaactcgacgatgtgatactcgatgacatgcgcggcctggacgaaatcatccgatttggccgcggcgaggaacgtgcgcaggccatcgaggaccgtacccatgcgttgtggaaggatcacgccaaactcagcaaggtcaacggccgtttcaccggaatcagcggactcttggtggctgtgctcacagcggcttcggtcgccgtggctattgcctgtgccggcgcgaacccgcagagcattccggctctgattgccgccttcgtgctgttcgccagctcgttcgaaccgactttggcgctcgccgccttgcccgctaacctgactcagaccttcgcgtccgctagccgactgttcggactgatggacgaggtgcccgctgtgaccgagaacggcactgttgtgccgcaggagtatatggacatgcgtcttgatgacgtcacctttgcatatgcgggggagcatgaagtcctgtccgacttctcgcttgacgtgccgcagcatggcgtgctgggtatccaggggccgtccggccgaggcaagtccaccatgctcaagctgctgctgcgctactgggatccgcagcgcggtcaggtgacgttgtccggcacgccgttgcccgaggtcgatgtgcatgctcgccgacgtattcaggccatgatgagccaggaaacccacctgtttgatggctctatccgagacaatctgctgattgctttgcctgagtccgaggttgaagctgcaaatgttgcaggcaatggggaagtgggtgccaggaccgttgattcccgacagcagcagttggcggcgcaatcggcagagggcgatgccgttcaggtggcagcagctgacggtctcgatgctcgtttgcgtcaggctctcgccaaggcctccgtgcttgatctcattgattccctgcccgatggccttgatactcaggtaggcgagttgggcgaccgtctatccgaaggtgaacgccagcgtatcggtttggctcgtgtgttcctgcgcaatgctgatctggtgcttttcgacgagccgaccagccgtttggatgctttgaacgaggctattattctacgttccattcacgctatggccgtgggtgagcagcatgcagacaaggagcgcggcgcggctgtggtgctggtctcccaccgcgaatccgccatgcgcattgctgatgcggtactcaatctgtaactgcctgtaactacgcgggaatcgcatcgcattgcgttacgttaccgcgttgcattgcggttcctcgcgggtggcggcgatgccatctccggtcgtcattgcgttgctgcgtttgtgttgcgatatgtgatgcggcaacgcagcaatgcggcaatgcaatgtgatgtggcaacgtggcaacgtagcgatgcaataacgcggtaacatggcaacatggcaatgcagtaacgcaacgcagcattcacgccttgatcaaagcgccgatgacgctgtcgaacgcagtgagactgaggggagccaaagcccaaaaccggcaagcacagcaccggccatgagccgatacaataaaggatttgattaatatgactactcatagagcatttaggtggccgtccctgctgacggaatccggccgcggcatcgcgttcggcggcgactacaacccggaccagtggcccgaggagacgctggacgaggatatccgtctcatgggtgaggccggcgtgaacgtcgtatcgctggcaattttcagctgggacaagatcgagccggtcgagggcgcgttcacgttcgagtggctcgaccatgtgatcgacaggctcggcagagccggcatcgccgtggacttggcctccgccacagccgccgcgccgctgtggctgtacgaatcccatccagaggtgctgccggtagaccggtatggtcataccgtcaacgcgggctcacgccagtcgtggcagcccacaagcccggtgttcaaggaatacgcgctgcgcctgtgccgcaaacttgccgaacactacaaggacaacccgtatgtgaccgcctggcacatgggcaacgaatacggctggaacaaccgctacgactactccgacaacgccttggccgcgttccgcacgtggtgcgaggccaagtacggtaccatcgacgcgttgaacgaggcgtggggcacggccttctggtcgcagcacgtgaacagtttcgacgaggtgctgctgccacgtcacatgggcggcgacgccatggtcaacccgtcgcagcagttggattacgagcggttcggcaacgacatgctgctcgacttctacaaagccgaacgcgacgccatcgagcagatctgccccgacaagccgttcaccacgaacttcatggtctccaccgaccagtgcgtcatgaactacgccaaatgggcggatgaggtggacttcgtgtccaacgatcactacttccatgagggcgaatcccacctggacgaactcgcctgctcggacgcgctcatggactccctcgcgctgggcaagccgtggtacgtgatggagcactccacctcagccgtgcagtggaagccgctgaacacacgcaaacgggccggcgaactcatgcgcgactccctggcccacgtggccatgggcgccgacgccatctgctttttccaatggcggcaatccaagtcgggcgccgaggcgttccactccgccatgctgccccacgcgggcgccgattccaaggtcttccgcggcgtatgcgagctcggtaaggcgctgaagaccctctccgacgccgggctgcagggcactgagctcgagcgtgccggcacggcgatcctgttcagcgcggaatccgattgggccacacgctccgaaaccctgcccagcatgaaactcaaccactggcacgacgtgcgcgactggtaccgcggcttcctggatgccgggctgcgcgcggacgtggtgccgctcgcctacgactggaccggctacaaaaccatcgtgctgcccaccgtgctcagcctgtccgacgaagacgttctccgtatcgccgacttcgcgaaggccggcggaaccgtcatcgtcggctatgccgccggcctgatcgacgagcacttccacatcggcctcggcggctaccccggcgccggcaacgggctcctacgcgacatgctcggcatccgctccgaagaattcaacatcctcggtgaagaagccgaaggcgagcccagcgaaatcagcctgtccaatggtctgacgacccgcctgtggcagaacgacgtgacttccgtagccgcggacaccacagtgcttgcctcttacgcaggtgagtccgccgccgactgggagctggagcgcacccccgccatcaccagccgcccctatggcaacggtaccgccatctacgtgggctgcgacctcaaccgtcacgacattgcccagttgctcaaagcacttggctcccgatggcaggagttgtcggcgcagccgactgagagtggtcaaactccaacctatcccaccacagatccccgcatcctgcacaccatccgccgatccgcagacggctccacccgcttcgatttctacctcaaccgctcaaaccagcccgtcgccatcaacggtgtggaaggtgatcccatcatcgcccaccgttgcgagactgacgccgttggatatacgctgaaccgcaacgccattcttatcgctaaaacgtcctgctaaaccgcgctagaatggcaatgttgtccggatagaggagtgcggcatgagcgacgagaaaacagccaagcgtcgagtgacgctacgcgatgtcgctcaggccgccggtgtatcgctcaaaactgcgtcgaacgtgatcaatggctccgggcgtatgacagatgagacccgtgccaaggtcgagtcggtcattaaggacctcgactaccgagtcaacgtggccgcccgcaacctcaaccgcgatcacaccggcttcatcaccctcgccgtgccttcgctgattccgccatatctggccgagctcgccaaccgcaccatcgaggccgcccgtcagcgcgactattccgtatacgtcaccacgtatgcggaaggctccgcgaaaggcgcgcgcgatctgctgaagaagttcaactccacggtgtccgatggcatgatcctttccatgagcgaggtggaaaacatttcgcccgatgatctgaaggttgattttccgctggtcatcgttggcgcgcgtaccacgtggggcattgtggatcacgtgaccccagacgatgtatccgcagccgccatggccgcaggctacctgtatgaccgcggttccaccagacttgcagtgatcggtgcccgtgacgtttacgacgaagatgcattgctgaatgccgtagaaggcaacgcgcagctgcgtctgcgcggcatcatcgaagagacccgtaggcgtgggctctccttggatccgcagctgattggcaacaccgatcaggattggaccatcggagccggtgcccgtgtgacccagcggctcattgattccggcgtgccattcgacggtgtgattgccttgaacgatcagttggccatcggcgcattgaccgctctgcgcaccgctggttatgaggtgcccgtgcaggtgcaggtcatcggcttcgataacaacgaggaagccccctacctgcagattccgctgaccaccatggattcccgccttgactggacggctcccacggcagtgaatcgcatcctcggacgcatcgacggcagcatcaccaagtccgaactgctcaccaccgaatcccaggtcatcgcccgcgcctccacacgctgaacgacattgctgtaatgctggtgttgctgtacgaagtcgttgttatatagatgtcccatggggcggtgatttcctcatggggcggtgaatccctcatggggcggtagctgaaaatggctctattctgcggaaggtaaaattttaccgaccgccccatgggcaagttaccgccccatgggattttcgccgccccatggatgtacgggtaaaggcggccgaattgcctcgtgccgcccccgtggatatgcaagttaaagagcatcggcagcatgactgaatgcacatagagcgtcccccgcatggttgtgccacgttccatggcggggtcgccgtggtgactgtcgccagtacacgccatgccacgcgagcacgttgttgccggtgttccatggcggaaacgtcgtgggcatacaccttggatgatggcgacgacgattccaacacagtgcccagtaaagtaaccgccgataacctcaagaaatacgacatcagcccgcaaggccaggccgatgagattcgcgcggtcgccgaggccgtgaacaatatcggcgacaatgatggcgatggcgaaaacgacggcctgggtgtgttctactgggagcccgcatgggtgcccgtgggcaccggcggcaaggataacgccgaactggtggatacgtggaacaagtacggtggcggctgggccactgaagcggccggcgaatacgatcccaatgacgccggcctgtactggggcggctcaggtgtcgataaccaagctttgttcgatttcgatggcaaggcgctcgcctctctgccgacgttcaagtacattcacaccggtgccgtcaccgatcatgtgttcaccaagatagatccagtggagattaccgcgactgactcggattccatcgacgcgatcaaagcgcaattgccgagtgaggtggccgcacactatcaggatggggtggacgagaccgaaaccgtgacctggcaatccgctgcgcttgactggattcgtggcgcaggcacatacaccatcaccggcaccaccaacgctggccacgacgtgaccgtcaccgtcaccgccactcccgccaaggattacgtaacggacggcagcttcgagaacgctgagaacgataagaactggaccattgccggcaccggtgcgtccatcaccgaagacagtggcaacgccgccgacggcaagcgcgcgctgaagttttgggcatccgatgcctacagtttctccgccacgcagaccatcaccggactcgagcctggcgaatacgtgctgaccgccatgagccaaggcgcggcagcggacaacgccgctattaccgatggtgtggccctctccgccacaacgggtggcaagaccacgtccgatgcgctggaactcaacggttgggttaagttcgataccgccaccgtgcctgtcaccgtgggtgctgatggcacagcgaccatcaccatcacgggcaacctgcctgccgacgcatggggcaatgtggacaaggtctcactcgtcaaaaagaccgaaactccggtgaagccatccacggagaacctggacaaggccgtggccgaagccgggaaaatcaatcgcgatgagtacaccaacgagtcgctcgccaaactcgatca

SEQ ID NO: 1746 - DNA, 3003 bp, Unknown
  MAG_14  MAG No. k141_23270
cgcacgacgtggcgggagatgcctcgcggcaggttggccagcaggtcctcaggccaggtggccaagggcttgtgccagggcagcgtgaacatctttgggttcgagctggcggcggtgattttcagtgcttgcggttccgctgaatcggcgtgttcgtcttcggctttgacagacgtggccttcagcgcacgcggatccatctggggcaattcgttcaactccatgtgttcgattttacgtgtcgttcgcgatgtgtgctccttggccacgacttcggcgcgttatgtttacgggaaaacaccgtttggtctctccctcagaccgtctagaaggcaaaaagaaaagccccgcagctatgcagggcttttccaacgaggccataagagaggaagagaataacctcgtttaatggttgacgaagcgattagacctcgccaagtatctattagttcagacgcagctcagtcgacggagcgaacaggtgcatcttggccgggtcgatcttgatcttgacggtcgcgccgaccttcggcagcgcacgcggattcacacgaatcgtggtgagcttgttctggtcggacatcatggtggatgcctcagcagcggagccatcggtgatgatgttgccgtagatgtagccatcggagcccagatcctcgacgttcacaaccttcagggagaaggcgttcgggtcgtcagccggggccaggccagcgtcctcaggacggaagccgaccacgatctggccgttgtcttcggcggtgagcttgttgacggcctcagccggcaggtccacggtgtcctcaccgatcttcgccttgccgttgaccaccgggtgggtgttcaggttcatcgacggggagccgatgaagccggcgacgaagacgttggccgggcgatcgtacagctcggtcggggcgccgacctgctgcaggataccgagcttgatgacggcgatgcgatcgcccatcgtcagggcctcggtctgatcgtgggtcacgtacagggtggtgacacccagctggcgctgcagggcagcgatctgggtacgggtctggacacggagcttggcgtcgaggttggacagcggctcatccatgaggaagaccttcggctcacggacgattgcacgacccatggccacacgctgacgctgaccaccggacagagccttcggcttgcggtcgaggtcctcggtcaggtcgaggatctcagcggccttctcgacgcgcttgcggatctcttccttcggagtgccggcgatcttcagggcgaagcccatgttgtcggcaacggtcatgtgcgggtacagggcgtagttctggaacaccattgcgatgtcgcggtccttcggctgcatcgtggtgacatccttgccaccaatgaggatgcggcccttgttgacctcctccaggccggcgagcatacgaagggtcgtagacttaccacagccagaagggccaacgaggacgaggaactcgccatccttgatatcaagattcagatcatccacggagggcttatcgttgcccgggtagatacgagtgacgtggtcgaaaacgacttctgccataattactaatcctttcagaggcaggtacgtgcctcacgatccgttgtaaagggatttgttctttactgcgcttccgccctcgccaccgacgtacaactttgctttcggaaactgcaagcttcagcgtttacttttttccggttcagtgaaggttctcttcgttgagccgagaactactatacacggaccgtggaccaaggcaagtggcgtgtctgaaaatgtagttaactttatgggcgtttctgggggtgttgtgtggttcggcccatgacacgcctgtttctcgaacgtgcgaaccggcacgcccggcgtagagcaggcctgctcttcccgaactgacggattccatcagtcgccgactaatgcaacacagactcgaaggtgacgccgttgcgggcggctttgcgctcggccttgcgctcctcggcgttttcgatgcgctggatgcgcagctggcgccagtcctcgcgcatgtcgcggaaacggtcggccagcgttacgtcatcgttctcggcatcgtcatcagtaccgctgccatcggccttaccgaacgtgccatcggccaccttggtgatgcccagcttgagcagtccgagcaactcacgcaacgtttccggtactggctcatcgccctcatcggcggacttggtcaggccctcgatgcggcgacgaagcgcgtcggcgtcctcgggatcgatcttgagcccggcgatcagcgactggcgcatggtctcgtaatcgaggttggcaaagaaattcagctgttgcagcgtcatgaagcccttgagctcggggaatcggtggacgatgtattcctcgcggtcgtcggcggcgcgggtccagtcgcgggtgagctgcggatcccagttggcggtaatcgatccctcgcgcatgcggtagtggtacagcgccttgggcagacggaccacgcgcgtggcctcgccgatcacgttgcagatacgggagagatcctcgattttgcgccccaccgggaaggagaatccggtgccctgataggtggaggcgggtgccaggaaggcccagaaatagccgtcaatctcagccttgacttgctttttgatggcctcgaccggggtcaggatctgcacctcggtgaagtcgttgtggcgatagttggacagcagcggcttgttgttctcggagatggtgtcgaactggaacatcacgaggtcggcgtcatactcgcgcatggcgttcaggcagtcctccaccaacgtgggggccacggtgtcgtcggaatcggcgaagtatatgtacgcaccggtggccccggcgatgccggtgttgcgggcgtcggacaggccgccgttgggcttgtgaatcacgcgtatgcgcgggtcgcgggcggcccaggcgtcgcacatggccgggcaattgtcgggcgagccgtcgtcgaccagcagaatctc

SEQ ID NO: 1747 - DNA, 16219 bp, Unknown
  MAG_14  MAG No. k141_23554
cggcatgcatgcgtaccatggggaatatgaagaaaagcattacggcagacagcgattttgcggcgtgggcggcagcccgatcccagaaaacgaatcgatcactggcaggagcccgcctcgcgattccggagccgcagaagcgtgccgaaatcaagtctcaggcccagcaatggggcatgaccgtcgaagatgccacgatgaccgacgggcacagcgaggaattcctctgtgacggcacacaaagcattgattccattgccgacatgcgcacggcaagtgggctggaggcaatggagtacgcggaacagcacatgccggtattacgcgacaccatggatgacctcaccacccgcgtcgatttctcaggcattcgtattgccgtctgcctgatactggagccaaaaaccgcgattctgctgcgcaagcttaaggccaccggcgcaatcgtcggcgtatattgcggcccggattccacggatccccgagtggcggaacagctgcgccgggaaggaatcacggtcgaatccagccgagcctggaccgcggaacaggcgcacgaggcagccctgcgcctgctggacaagatacagccgaacatcatcatcgacgatggtgccagcttcgcccgcctcgcctcgctcgaacgccccgagctcacggcgaatctcattggagtggccgaggaaacgaccagtggcgtacgcgcgttccagcagatgcaggaagcgggagcgctcacctacccggtcgtagccgttaacgacagtgtgctgaaaaccggattcgacaacgcccacggcactggggagacatgcgtgaccaccatgcagcgcattctcggcgagcatgcattcgacggcaagaacgtcaccgtcatcggctacggcccggtcggccaaggcttcgcacggcgtattcgcgcgcttggagccgaagtcaccatctgcgatatcgatccagtggcttcactcaaagcggtgttcgacggcttcgccgcacaagacattgacgaggcactcccttgcgcggatatggtggtgtccgccactggcgtgagacatacagtcacacttgagcacatgcgcgcaatgcacgagggcgcggcgctcgcagtgatcggcggcatcgccaacgaaatcgccttggacgaggtaagcgacttcaccccacaggtcaacagggacaccgcgcaactcattgttcccgacggaccaacgctcacgctaatcgccgacggcgatggcgtgaactacacggtgggaggcggcaatccaatcgagatcatggatctgagcttcgccgtacaggccagcgccgtcgcatatcttctggaacatcgaggcacactggatcacacgcttatcagacttgacgcagcgaccgaccagcgcatcgccgccagcgcgctcaaggcgcgcggataccgagccagccatgccgtggaggacaacggctacgattggcgactgaccagattcgcggaaaacgaccgagagaacgccgaccgatagccataggcacggcaccgaacacaacgcagcgaggagaatatgaccgacaacacctggccgaccgtcgataccgagcttatcgatgaggtgacactgtattccgccaaactcatcatccccgtgacgggccccgtcatcatcgatggcgcagttgccatacatggcgaccgcgtggttcatgtaggtaaacgccgctgggtgctggaggcgctgaagcaggaaatgacgtctcacggcaccatccgtgaacggcattgggatggggtgctcacccccggattggtcaacgcgcacactcatctgcagtacagcggcatggtgcaggtcgggcaaggcacctacgatcggttccgcgcctgggaactggcattcaacgaggtgtacgccgaggcgcagaagacccagccatggaagcagtgggccgaggacggtgctcgccagatggtcgaatcgggaacgacggccgccgcagacatcgtcaccgatttggacgccgccggcgcgctggcttcgcagggcatgcacggcatcgcttattgggaggtaatgggctggcacaacgacgaatggatggaaaagggccgcaccgagctcatccggcagttgcgccggatgaacgaggagcagctgccgaacctcggcatcagcccgcatgctccgtatacgctggagtccgaaccgttcgttgatcttccagacattgctcgtcagctgaacatgcgactgcatatccatctggcggagaccccgctcgaggccggcacttatccgccggtgctcaccacttattcggcgtccgactggcgtgaccacgattgggaaagctaccggcagctcaaggacgtgggcaaaggtgcctccgccatccagttcgtcgatcagcttggctcgcttggcccggatgtgcacattgcacacggcgtgtgggccaatggcgaggatcggcgtattctacgtcagcgcggcgtgggcgtggccttgtgcccccgatcgaatcgcattaccaacaccggcaaagatgcaccggtgcgcgaatacctcgaggaaggcaatctggtaagcgtgggcaccgattcgctctccagcacgccgaccctcgatctgcttgatgacgtgtcgatgctttacgacctggcccgcgaacaaggctatgccagcgacgatctgacacatcgcctgattcgtatgatgacgctgggcggtgccgcctccatgggcatgcacgtgggccgcaaccgcattggacagatcaacgcgggcgcattggctgatttcgcgttcttcgacatccccgtcgacacatcatctccggccggcatcgaagaaacgctggaaacactggtgaagcacggcgcaggcacgaaccgagccacggtgatatccgggcgcgaagcctacaacaacgcctggtgacaccgctgacccgacctgatatcaagaagccaaaaaccagcaaacccgccaagaacaggagatctcattatgagcgtcgctttgcgagacatgagtccatacgcccggtccatagtggaacgccttggactggaagcccaccccgaaggcggctggtacacgcgtgactggcaatccccgcacacggatgaggcctcaagccgaccgctatcgtcactgatttacttcctgctgcccgagggagatgccagcgcctggcataaggtcgatgcggatgaggtctggctgtggcatggcccggcatcggtcaagctggaactcggcggcagcggcgagactccggaatccgacgaatccaagcgaaccgtaatcaccctgggttccggcatcaccaccgatcaggccgacgtaaccgtatcgggacatgcggtcgtaccggctggcgtctggcagcgcacagtgcctggccagggcgatgcgctggtctcctgtgtggtcagtccgggattcgtattcgacggcttcacactcgaacagtgaacgccatttcgctctgcgccaatatgagatatccgttcgcttacgcgccagattgcgcggctctagccggccataagcaatggagataaccagcatccgagaatatcgctgttttgtagtaacccaatagccatacaattggcgcgcatgcatcaagcacgactttgaaccgtgtgcatgacgaacacttgaggagaggaagcccatgttcaataagcaacacatcgtccgtaccattgcggccaccgccagcatcctggctctgtcgttcaccgcagcctgcggttccggccagtccaccgcatccaattccgccgattcgaacgacatcacccagcagacgtacaagccgggcaagctgaccatcgccaccggacagccggcctacgagccgtgggttatgaacgacaagccggaaagcggtgagggctacgaggcggccgtcgcctacgcagtggccgacaagctcggtttcaagaagagcgacgtggtgtggacccgcaccgcattcgacaccgccatcgctcccggcgccaaggactgggatctcaacatccagcagttcggcatcaccgacgagcgcaagaaggccgttgacttctcgtccagctactacaacgacagccagtccgtcgtggtcaagaaagacagcaagttcgccaacgccaccaaggtatccgatctgaagaatgcgaccgtgggcgtcatggtcggcacccttgcctacgactacgccaaggcgaacatcaaggacgacatccagacgttcaatgatgatgccgcactggctcaggcacttgacgccggtcaaatcgacgcactggtcaccagcaccgtggaatgcgtgtacatggtgcagtccgagcaggtcaaggacgccaaggtgctcggccgtctgcctgactccgaagacaagagcggcatgggcatcgtgctgccgaaggattccaagctgactgcagccgtgaccaaggcagtggatgacctgaacgccgacggcaccatcaagaagcttcaggacaagtggctggccgagtacaccaccgacctgaccgaactgaagaagtaagtggagtaggctcacatcataaggtcacaacaccttggccgggcgctgcggaaattttcctgtgacacccggccattccggcattcaggaagcgagcgacattcatcacatgaccgcagcaccaaccgaaaccaggcagcacaatgcccctgacggacacgaggtaagtcaggtcgagctcaaacgacgccaatatcgtgttcatcagcaaattcaatcgacgattaccagtctgatcagcaccattgtgttcgttgtggtcatcgtcatcggcctgaagctctcccccggctggccacgagtcaaggagaccttcttctccggcgaatacttcgtcaaatcgtttccccatgtgcttgacggcctatggctcaacatccgcgttctgctcgtcgcagtggtcggcgtggcgattctaagcacgctgatcgcattggtgcgcaccagccgctcccctattctgttcccgctgcgtatcctggcattgatctacacgactgtgatgcgcggcgtgcctattatcgtcgtgctgtatctaatcggtttcggcattcccggcctaggcttgttcggccgtatcgatccctcggtactcggcaccattgcagtggtaatgggatacagcgcctacgtctccgaggtgctgcgtgccggttttaacgacgtacatccttctcagcgagcctcggcccgctcgttgggcctgacctccggccagacgacccgactgatcgtcattcctcaggcattgcgcaaagtcgcgcccgcactgatgaatgacttcatctccatgcaaaaggacgtcggcctgatttccgtgctgggtgcggtggatgccgtgcgcgccgcacagatcgacgtggccagcacctacaacttcacgccgtatgtggtcgccagcctgctgttcatcctgatgagcgtgccgttcatcctgctgaacgactggtacacggaacgtctgcgtaaacgcgaactcagcggaggaacggtatgagcgaaataaccaatatcaacaccgaggcgagtgactcccccgtgagcaacaagacggtgctgcgtcttgatgacgtgcgcaaatcctttggaaacacgcaggtgctgcgtggcatttcctttgacattcaccaacatgaggtggtggctttgctggggccttccggttcgggcaaatccacattgatgaaatgcgtcaacctgcttgagcaggtcgatgacggccagatttggctgggcaataccgatatcaccgacccgcgtgccgaccaggacaagattcgcgcacgtatcggcgtggtgttccagcagttcaacctcttcccccacatgtcggtgctcaagaacgtgacccttgccgcaatcaaggttcaccactggagcaaggatcgcgccgaaacccgcgctatggaactgcttgaacgcatcggcatgcgcgataaagccagcgcctaccctgatcagctctctggcggccagcagcagcgcgtggcgattgcgcgcgcactgatgaccgacccggaactgctgctgcttgacgagatcacatctgctcttgatccgatgctggtcggcgaagtgctcaacatggttgccgagttaaaggcccaaggcaccacaatcctcatggccacgcacgaaatgagcttcgcccacgaagcggccgaccgcatcgtactgctccgtcacggcgtcatcgccgagaacggcacacccgccgaggtgatggacgagtcgcaggatcccgagaccatcgagttcttcagccatttcaggcactgagacgaagccgaaaaacaaacaccggattcatacgacgaaaggccaaaatcctaagccactattcatactcaactgatctggtgcttaaaccgcgtccgcgaaccccaacaagttccaccaccccacaacacgcgatgtagccgccgattggtagggttggcagatagttaatcccctgtttgaaaaaggagctttggcttgtcggctgaactcgaagacattcatgaggaatgtggcatcttcggcgtatggggccaccccgacgcctcacgactcacctattttggcctgcacgcgctgcagcatcgcggtcaggaaggtgccggcatcgtctccaacgataacggtcatctcatcggtcatcgcggactcggcctgctcacccaggtgttcggcgatgagcgcgaaatcgaacgactgaagggcaattgcgccatcggccacgtgcgttacgcaacggccggctcgggcaccacggacaacatccagccgttcatcttccgcttccatgacggcgacgtggctctgtgccataacggcaacctgacgaactgcccgtcactgcgccgcaagcttgaagacgaaggcgccatcttccattcgaactccgacaccgaagtgctgatgcacttgattcgccgttcgatgcagcgcacctttatggacaagctcaaggaagcgctcaacacggtgcatggcggtttcgcctacctgctgatgaccgaagacgccatgatcggcgcactcgacccgaacggcttccgcccgctctccctcggcaagatgaagaacggcgcctacgtgctcgcctccgaaacctgcgcactggatgtcgtcggcgccgagctggtgcgcaacattcgcccgggcgaaatcgtggtggtcaacgatcacggctacaagatcgtgcagtacaccaacaacacgcagctggccatctgctcgatggaatacatctacttcgcacgcccggattccgatatctatggcgtcaacgtgcactccgcccgcaagcgcatgggcgcacgtctcgccgccgaatccccggtggaggccgatatggttatcggcgtgccgaactcctcattgtccgccgcatccggctatgcggaagcagcaggcctgcccaacgaaatgggcctaatcaaaaaccagtatgtggcccgcaccttcattcagcccacgcaggaactgcgcgagcagggtgtgcgtatgaagctctctgctgtgcgcagcgtggttaaaggcaagcgcgttatcgttatcgatgattccatcgtgcgcggcaccacgtccaagcgcatcgtgcagctgctcaaggaagccggcgccgctgaagtgcatatgcgcatcagctccccgccgctgaagtacccttgcttctatggcattgatatctccaccaccaaggaactcatcgcagccaagatgagcgtggaggaaatccgcgaatacatcggcgcggattccttggcctacctttcgctcgacggtctggtcgaatccatcggactgaacgccgacgccccatacggtggcctgtgcgtcgcctacttcaacggcgactaccccactgcgctcgacgactacgaggccgacttcctgaagtccctcacgcccgaggaccgtgtgcgtctgcctgaattcgcgctgtacaagagcaagtacatcggcaacgagtacaacaccgtgcagccggacgtgcagtaggttcggccggtccttcgactacacctcagtcattggtctttacgactacccctcagtcagcttcgctgacagctcccctgacaaggggagcttagtacaaacgaaaatccgctttttgcaggtggctccccggcaagggagcttgaaaatagaacagaaaggccccaccaaatgccaaaagcatatgagaacgccggcgtgagcgtcgaagccgggtacgaagtcgtcaagcgcatcaagtcgcacgtggcccgcacgaaccgtcccggcgtggtcggcggcatcggtggcttcggcggcctgttcgacctagcctccctgggctacaaggagccggtcctcatctccggcaccgacggcgtaggcaccaagctcatggtcgccaagctggccaacaagcacgacaccatcggcatcgactgcgtggccatgtgcgtcaacgacatcgccgcccagggtgccgagccgctgttcttccttgactacatcgcttgcggcaagaacgacccggccctgcttgagcaggtcgtggccggtgtggccgacggctgcgtgcaggccggttccgcactggtcggcggtgagaccgctgaaatgccgggcatgtacgacgaggacgagtacgatctggccggtttctcggtcggcgttgccgaaaagtccgccattgtggacggttccaccatcactgagggcgacgtgcttatcggtctgccttccaccggcgtgcactccaacggcttctccctggtgcgcaaggccctgttcgagcaggctggctataccgtggacactgagctcgccgagctgggcggcgcaaagctcggcgacgtgctgctcacccccaccaagatctacgtcaaggccctctccccgctgttcaaggcgggcgtggtcaagggcgtggcccacatcactggcggcggcttcatcgagaacatcccgcgcatgatcccggacggcctggccgccgagatcgagctcggtacctggccggtgctcccgattttcgacgtgctggagaaggctggcaacatcgatcacaaggagatgtacaacatcttcaacatgggtatcggcatggtgctggccatcgaccccgcccgcaaggacgaggcgctgaagctgctcgccgacaacaacgaacccgcctacgtgctcggccagatcaccaccgacaccaccgacacgcaaatcgtactgaagtagctccagataccggctcccctcaaagaggggagccaaagactttaggaaggaaaaacatgggtcagaaagtattggtcatcggctccggtgcgcgtgagcataccattgcctacacgctgctcaaggcaccgagcattgacgaagtcaccgtggctcccggcaacccgggcatgctcaaggacggcatccacaccacgcagctgagccagtcgaaccacgccgcacttatcgaattcgtgaagaacaatggctatgactgggtgttcgtgggcccggaagtcccgctgatcgaaggcatcgtggacgatttcgccgccaccggcatcaaggcgttcggcccgtccaaggccgccgcccagatcgagggttccaaggacttcgccaagcagctcatggaccgtcacaacattccgaccgccaaatataagacgttcggagacttggacatggctcaggcttacgtacacgagcatggcgcgccgatcgtcatcaaggccgatggtctggccgccggcaagggcgtgaccgtggccatggacgagcacaccgcccagcgtgcgcttgaagacatcttcatcgatcatcgcttcggctccgccggtgccaaggtcgttatcgaggacttccttgacggccaggaattctccctgatgagcttcgtcaacggcactgatttctggccgatgccgatctcccaggatcacaagcgcgcccacgatggcgacgaaggcccgaacaccggtggcatgggtgcctacagcccggtgccgcagattccgcagtccgtggtcgacgaggccatcgagaaaatcgtgcgccccaccgtcgaaggcatggccgaggaaggcacgccgttcaccggcatcctgtacgccggcctgatcgccaccgccgacggaccgaaggtcatcgaattcaacgctcgtttcggcgacccggaaaccgaagtcgtgctcccgaagctcacctccgacctcggtgccggcatctccgccattctcgacggcgaaacccccgaattcatctgggatgagtccaacgccaccctcggcgtggtcatcgcctccaacggctacccggagaacgtcatcaagggtgcccgtgtgcccgagatcgaggtcgacgaggattcgcatgtctactatgccggcgtcgcctccgacgacaagggtggtctgattgccaactccggccgtgtcctgctcgtcgaaacctccgccccggacatcaagtccgctcaggacaaggtctacgcgatcatcgacaagctcgagctgcgcggactgttctaccgccacgacatcggcttcaaagccctgaagtaacagaagcggcgcatctgccgcatatttttgtcccggtggccatgtcaatcgattgacgtggctaccgggacagatttttctgtcccggtagccgatttcagctctttttcgcaaaccaggacagttgaacacctcgaatataggaatatttggaattcccttccatgcaaaaccgcactattccgccattttcgtaatacgcggacgatactttcggcgtcagttttgtcccggtaagcagaaaatgactcgaaatcaaataccaggacagaaaaatctggcccggtacacgaatcaatcgattgacgtggctgccgggacagcgaacgccactatgacaacgccatcacccaatatcagcgagcgatatcacgctagctgaatttggcgatgatgttgaacagtttggccttggcttcattgaagggcgggtacacgaggcgcagagtgtcggggaactgcggcttggtaaccacggttttgacgtggctgaaggtgaggaagcctgctttaccgtggtaggcgtcgatgccggacgcgcccacgccaccgaacggcagtcggctggacagcaggtgacccaacggcaacgaatatcccaaagctccggagctggtctgacgttcgaaagtcagccgaacctcgtgatcgcgcgagaacacatatgcagccaacggccgggaccgcttgttgatgaatcggattgcggactcggcatcctcaaccaccaggatcggcagaatcgggccgaagatctcctccttcattaccggcgcatccggtgacgtgccgtatagcacggtaggcgcgatatatcgggcggcgcgatcgaccttgcctccgcaaacgattcgcccggccggatcgaatacgccgggcaccttgtgaatctcgctcggctcaacagcggccgaggcagtcgcatcactatcagcggctgccgtattcgaaccggccgccggcttcgccgcattgttcgcgctaccggtgccaccaccggctgtctcccccgcgcttccgcgtccggcagccacgacattgaagcgccgcccgaccatatccatggccgcgcctaccgccgatgccacctgtaccagcggcgagctcggctcctcagacggcacggtgccgaccggcaatagcttgcacagtcgttcaaaatgacgatcgttgataatacgaccaaaatcaggcgaggccttcggatcttcgccatagaattcggtgatggctacggcgatgcgctcggccagagcctcggccacatccggcgtggcgagcacatagtcgggtgccacgcaggtctgtccggcattggtgaacttgccccatgcgatacgtcgtgcggccacattgatatccaccgtacggtccacgaagcacggtgatttgccgccgagttccaacgtgaccggtgtcaggtgctcggccgccgcacgcatgacgattttgccgacgtgcccgccgccggtgtagaagatatggttgaacggacatttcagcagttcgccggtttccttgggcccgcctccgaccacgcacacggactcggggtcaagatattgcggcacgagttcggcgatgaggcgcgaggtgttgggcgaaagctcggagggcttcaggcagatggcgttgcctgcggcgagcgcgtcggccattggctccagagccaacagcaccgggtaattccatggcgagatgatgagtaccacgcccttgggctcggcgatcgtccagccggcggcgggttgcagcatccaatgcatcgccttgggatggcgcgcggcccacagtccgagccggttgcggacgaactgcgcctcgccggccaccagattcagctccatcagtatggtttccgccgcgggtttgcccaaatcggccatggccgcagccacgaaagcatcacgattgtccgctaccagacggcatagcgcatccaattgcgcccgtcgccaagccaatggccgcgtacacccggattcgtaggcgtgacgcaactgagcgaaatccgcattgaccatggcacatccttcccgcaggatgcccgggtcggttttccgggcatcgactgtacctatcgtaccgtcatgacgatggcatgagggcgtttgtgctgcaggcaataccagacgtttcggctggtattcgccaaatagcttgggctcggccgaagtaggtggtgcaggtattgtcggcgagttcatcgacggtgatgggattggcgctggccacgccgagcagttcggcattggcaggcaggtcgtgttgtgcggccacagagtccacttgtacctccacatccacagcttcggcagaaggtccgacggcgatatgcccgcctgcatcaaccacaatgcggcggtcatcggtgacatgcacgatggcgtcgcggccctcatagcccgcccatgaccagctggccacgccgtcatgtcctcgttcgatgaatcgcgaggtgcggcccgcgagggtcgcgcgactcgtgaatcatcgcatcgtgcgggagcgtgactggctgccgcgctgccgtatcgcggtccttgccaattgaacggaaccgccagccatgattcacatcgatgcgcttcatggctttattgtaaggcgggagtgattggtctgtgggatctctccctcagtctcacttcgttcgacagctccctcatcagagggagctcacagcactatggcaacggtacagcaattttggacgggcttcgcccgcgttttgctggctcgcctgtcggctcgcacgttgcctacagaccgaaaatcctccggattttccgtcgcggcacagccgctcccctcacctacggatagcccactgagctatccgctttacggttcggccgggctgtctgctttacggcaacgtcataaaatctgtgtctttgaggtagtttttgccggcggtgatgtcgtattggatgagcttgtagtcggcaagcaactgcttggtttccttgtcgaagtcatcggtggacatcgggttgccgttttggtcgagatagatgttctggccttcgggaatacgatcccagccttggaccttgttgaccacaggcggttccatagcggcaatcttggaatgcatttcggtcaggaacgccagatacgggctgaccttggcgttcatgtgatcggcggcctgtgccacgaagaagttcggcgaagagtaggctgcatcgcttgccttattgccttgggagctggaagccttattcgaccagatgaagtaatcggtcaggtgcagggccaaggagttgttgccatcctcgctggcggacgagtagatgcccggcaagtgatcgccgtagaacactacggtgacgggcttatccagcgcatccagttcgttcaggaactcctgagtggcctgatcggtaatctccacacccttttgataggtctcaatcgactgctgttcatcatcacccagcggcgtacccgtggtggattcagcggtgtagtcgttgttctcataccactcgtggtagggcatgtggttctgcatggtgatgatctgaatgaacttgttcgtcttgccggacctgatgccttccagcgcagaatcataggaagacttatcagagacgtacggcgactcgtcaatcttgtcctgatacttgatcacgtccggaccggtcagcgtgtagaagtgcgagaacccgaacttcttgtagttcgtagcgcgcgagtacatgctggactcgtacggatggtagccgagcgagttggcgggcgcaccccacatctggttgatggtgggggtccaatgctggctcgggaccagctgctggtacgggctggacagggaggaatcgaaattggccatgctcagaccggaaagtcccatgtattcgaggttggccgtaccgccgccgtagccggaggagagcatcaggccggaggtggtgcccgccttgatcttgcggatgttgggcatcgaatccttattggtcttcagtcccggcacgcggctcgggtcggagaaggattcggacagcacgtacaccactgtcgaatcagtgaggttgttggtgcgggaggcgttgattgtctccgcttccttctggtagcgagcggcgaccttcttcatggtctcctcggagtagttgctcggcttgtccatgatcttcgggttgagctgacgggtaaaggccacgagcggaccgttgcgctgcgcgtcatacacggaatcccacatggatggcgtgtcccccaaggcgcgggagaacttgttggccagcgaatcggtggtgctcacatgaatgcagtacaacgcgaacaccagaatcggcagcagcagcagaatcagacgggaggtgaggttcaggctcaggttgtccgtacggatcatgcgacctttgcgcccgtcgaagtggcgcagcaccagaatcagggcgagcagcgcggcgaacgcgccaagtgccacgaggatggtcacgtgcgcgccggccggaatgaaggtgagcatattgccggtgttcgagccaaggaagccgaggtcggcgggcagaatggcctcgtaacggatctcgaccttgaaatgttcgatggcggccacgatgattccgaccgcaagaatcacgatgcttgccgtccagaatctgttgaacagcatcagcaacatgaggtacagcaacgcgacaagtatcacgttgagtacgaatacgaaattgccgtcggtccacatcttgctcacgaagccgaatccgacggtcggactggacagttgcacacgggtggagctggacgaaacgcccacttcgagcgccgtcacaacaataatgtcgaagataacgaagagcacgccgtacgcccagccggggaagggcttgtgggggtgctggggcgtgacttcattggcttcggcttttttgacccaaagcttgaaatggggtttcactgtggtgatactactagtgttctcgctcattcgcctgtttccgtatgggacttttcaagggcatattgttgccgctgaaccttggaaaatccatagttccactatttttcttaccgtttcctaactattcaccctaacgcaaagggtgcctcgggacatccccgaagcaccctgatatataaggagccttccctgatagcgaagcgttctgttctcccctaggcaacgcctcgctatctgacttgattattccccttattgctgttgcggattgccggctaccgccgcattacttcacggcggcggcgaactggtcgaccagtgcgctcatccagtcgagcaggttggtgtactgcttcggcatctgctcggtgagctccacgatcggcacgttgacgtccttggcggcaccggtgatctggtcggtggtggagttggcttcctggctgttgaagacgagcatcttgatggagccgcccttcagggtgtcctggaagtccttgatgtcggccggggtcggctcgctctcgttggcggaagcctgggcgtagcccttcggggtggcgtcggtcatcttgaggtcgtcggccaagtgccaggccacggattcggtggcggcgtacggcaggttctcggtcttggcggaagtctccttgatcttggactcaagctggtcttccttggcgtgccaatccttgttgagcttggcgtagtcgtccttgtggctcgggtcggccttctgataggc

SEQ ID NO: 1748 - DNA, 8135 bp, Unknown
  MAG_14  MAG No. k141_23793
ccgccgcttcctgctgaccagggccgagacgacaacgctgaacgagcgcctgcacacgctgcagtccaagaagggctattccatccccaagggcatggatccgaaccgcccgcagaagatctcccgccgcgcaatgcgtggccgctgatagactgccgcatattccgtaacgaatccccgctgactttcctgggttggcggggattctcttatattcgtccctataagcatcatctccatctgtcaatacccactgtccacgttgcggacgtccgtattcattcacccgattggtcacgtttcctttccgtaatgacgtttccttggaataccgcgctttgccggctgctgtccatagtcacgaaacattctcgtaacccaagtttcgagccggcgaaacgcgcgattttacgatggataccgttatattccacatgaaaggagcggtcccgtgaccgaactcaagtccaaggaagacgtcgaggcccttatcaacaaggaaggcatcgagtatgtctccgtccgtttcaccgatcttatcggcgttcagcagcacttcaccgtgccggctagcgaattcctgaaggacgctttcaccgacggcatgccgttcgatggttcctccgttcagggcttccaggccatcaacgagtccgacatgaagctggtcccggacgttgagacctctttcgttgacccgttccgcaagcacaagacccttgacgtggccttctccatcgtcgacccgctgaccgacgagccgtactcccgcgacccgcgtcaggtcgccggcaaggccgaggcctacctgaagtccaccggcatcgccgacaccgcatccttcgctcctgaggccgagttcttcatcttcgacaaggtgcgtttcgagaactccatgcagcgctccttctacgaggtcgactccatcgaagctccgtggaactccggcattgactccgaagaggacggcaccccgaacatcggcttcaagaaccgcatcaagaagggctacttcccggttccgccgattgaccacacccaggatctgcgcgacgatatggtcgccaacctgcagaaggtcggtctgatcctcgagcgttcccaccacgaggtcgccggcgctggccagcaggagatcaactaccgcttcaacaccctgcagcacgcaggcgatgacctgatgaagtacaagtacgtcgtccacgagaccgccgctctggccggcaaggctgcgaccttcatgccgaagccgatcgccgacgacaacggcactggtatgcactgccaccagtccctgtggaaggacggcaagccgctgttctacgacgagaagggctacgctggtctgtccgatctggctcgctggtacatcggcggtctgatcaagcactcctcctccgtgctggccttcaccaacccgtccctgaactcctaccaccgtctggtcccgggcttcgaggctccggtcaacctggtgtactccgctcgtaaccgttctgccgccatccgtattccgctggccggcacctccccggctgccaagcgcatcgagttccgcgctccggatccgtcctgcaacccgttcctggccttctccgcccagctgatggctggcctggacggcatcctgaaccacatcgagcctccggagccggtcgacaaggacctctacgagctgccgccggaagagcacgctggcatcaagcaggtgccaagctccctggccgaggctatggacgccctggaagaggaccacgacttcctcaccgccggcgacgtgttcaccgacgacctgatcgagacctggattggcctcaagcgcgacgagatcgaccaggctcgcctggccccgaccccgctcgagtacgagctctacttccacatctgagtttgagagcttagcaacgttgggatttcgccattgctcttctcttgtgggagtctaatgggagtcattcagcgtaactagaaagaacctcgtgaaattcgtttcacgaggttcttttttgtatgttgcgttgtatgttatgcgatgtgtgttgctcctggaatattccaagggcgggccgctacttagtctcccaacgctccttgagtacataggcggcggctttgggctgacggtcgcgagtgaagacgcccttcttgttgccgtcgacgcgcatgatgccttcaccggtttggaagtcgcagaggttccatacctgctcgcccaccactgcctcgaacatgtcgaacacttcgtgctgcatggtgaggtactcacactggtattcctcactccactgcacgcttggcagcttgtgcgcaccggcatcggtgtccgcaccgtattcggtgaacaggaatggcttgttgggttcggtgttcatccattggttcatctcgttgatgaaggccttcttggctccgatgagctgatacccatcttgcacatatcagccgtaataccggttcaggcagatgacatccgcgaactgatggcacttgtctttgcctccggcggccatcagcagattggtgtaggtcagcgggcgatgctgcggatcgagcgtgcgcgcgtaatcgaatatctccttgaaatacggcacggccgcctcggatgccgagtcgttggcggcgtcgatgaaattccaagcgccggaggcccccggcattcttttcgtcgaaggggacaattcagaacacaactgccgacacaatcgtcagggaggccagcgagaacagcgtgcttacgagcacgaagccgaccgcatactcgggcatgttgttcttgcgcccggtgaacatggcaatggtggtcatggtcggcagtccggcgatgaccgtgatcatcagcaccatgtcatgggtgatcggcagttgcggcaatgcgccggtcagcgcggtcagtagcgcgtagaaggcgagcgggaatgcgatcatcttggcgactaggccagcatagagttcgtagcgtttgaggacgccccaccacttggtcagcgcgaacaggccgcccaagtagattagcgacatcggcgtggccatattgccgatggtgtgcagcggcttcaggatgatgtccggcaccttgacgccgagcagaatcagaatcagggcgagcatcacgccgacgaaggcgggattgatgaatcgtttaagcaggccgaggacgctggtgcctggcgagggacggacgacggccggagaaccaccgtttgcggcattgctcgccgaaccagcattgcccaccgaaccggcgccgttcaccgaaccgttcacgaccgcacctcgcgcgccaatcgcgttgccgccagtcgtttcgtcgaccggctcgcacagccatacgccgtacgtccagagcagcgtctggtcgatgatcgacatcagcgccacgtaaatcgcgccgttctgcggccaaagtgccataatcaacggaatgccgatgaatccggcgttgccgaaaataagcgacgcctgaaatacatggctacgcgaacctttgagccgcaacagttcggcgaccagccagaacaccaggatgagcagcgcgtacatcacggcggtcagcagcatcacgccccagttagaggcaagctgcgcgcggtccgcaccatcgacggcgttcgaaaacacaagcacggggatgagcacgttgagcagcaacgagcacatgccgtccaacgccgtctgaccgtagaatcgaagcctcacacatccatacccgaccatcagcatgatcagaaatccgactaactggccaatcatgacgccgaactgccccatgcacactcctctcgctcgcgttcccgtgcttttctgtcactggttcatataggcagccatctggacaggctcggcggcacacgcatcagtatgttcgataccaccacatgccaatccacttctcgttcaaccgttccccgtgctaatgcgccgcctgccaccccgtgttgccggtgctgcgcgagcaccgctacgtgtattgcattccggtggccctcgggcgcaacgtgtgggtcggcgcgaacgtgtcgattctgccgggagtgaccatcggcgacaattgcgtgattggcgccggttcggtcgtgacacattccatccccgccaactccgtcacctacggcgcgccctgcgaggtcgtgcgtgaaatcggcgacaaggaccgcgagtatttctacaaaaatcgcaagctcgacgtgtgggagtgagctttcgcgctactgctctttgagcttaaaacgctcactgaattggcggtcgcgccagtagtagacgtcgtcgcgttcgttgatttcgcgaattaccttgcacgggctgccataggcgaccgtgttggcggggatgtccttggtgaccagcgagttggcgccaatgaccgcgttgtccccgatggtgaccccgggcagcacggtgacattcgcgccgatccagacgttctcgccgatgtggactggcaacgaatactgggcaccctgatagcgcaggtccggacgcacgggatggccggtggctacaagcgtgacgttggggccgatcatggtgtgggatccgatgaagatctcaccatcgtccaccagcgtcaggttgaagttggcgtaacagcgctcgccccaataagtattgcagccccagttcgcatacaccgggcattcgaggtacagaccctcccccgccgcgccgaagaacgcctgcatgagttcggtacggcgcttcgggttggtcagcggcgtggcgttgagttcgagctggagatcacgctgggcggcctgcagatcaaaaaagccgtccacatcatccggcaggtagacctcgccagagaacataagcgccattttctcgcgcgtcgcatcatcgataatcggcttggcgatcggcttgtcttcggtcatcattggctcctgttcggcgttttggcgattgtgtcggtcgaactattctgtcacagactcgttttagacacccagcatcgagcgcagccagtcaaggattcagatgtgcgattggcaccgtgcgggcctcacacttttcttattgagaacgattcgccgtgcagtcaagccctccatccacccaaaaaggactcgcttttggccgcgtcgtcgcggtaggccttgccgaactcgtcaatgagcccatggaattcctgcaaatccttgacactgaggctcgcatccagcaccacgggcgaataggccctgtggaatgccggatagccggccggcacgtcgaatccaaggaaggcgaatagtcggcgagcataagtatcggccacgaatgtgcggcgcgagaacacgtacagcatcagatcgtcggccgtctcgccgccaataccaaataatccaagcaactcggcccgtaattcggcatcggaaatagccgcggcaccctcgggcgcggccccgcaacgctccacataccaccaactcagcgactgtacggtcttggatttgttgacataaaagcctgacggtcgaatcagttcctgcaaacgctccggctccatggccaccagcttatggggttcgagcacaccctccgcgttcaacgccgcaagcgaacgattcacattgccccacgccgtattctgcgtcagcaccgcgcccaccataatctcgaacgtggtctccgccggccaccatccggtcgggccgagtgcgtcagccatggtgcggtacagcaattcgatgcgctccggcacaggccacttgtgtgcctggttggctttcatacgtttcatattctgcattcaggctccgtattagccatccgccattcatttattaggtcgattatgcgttcattaggtcacttgtgatgaacactgccttcaagaatggcttcattccaatgctcattatctcatgctaagcagggcaccgacctaatgaacgcataatcgacctaatgaacgcaacggtaaggaaaaactacagagattcagcgagatatgctcggtccacctggtctggaagtcgaaaatcttgatgacatctaccgcaattcgtgcaggattcgccgcatgaacgggatggtgaccacgaatgtcagcacgtcggacaccgattgggccatttccacgccgagcacgccgaacatcatcggcagaatcagtacgatcggtgccaaaaacagaccttgtcggcacagggccaggaaggaggcgatgccggtgcggcccatggtctgggtcatcatattgcccatcatgttgaagccgttgagaatcaccgtgcagcattggatgtgcagcgcggccacacccaccgccaccacggccgggtcggagcggaagatctcgaccagttgcggtgcgaacacccacagcaacaccgccaacaccacgagcacgcaggtggcgagccgcacgcagaaccagtacccttctttgacgcgcgcgaacaggccggcaccgtagttgtagccgcacaccggttggaaaccttggccgaggccgacgatcaccgagttggcgcccagcataatgcgcatcacaatggccatgccggcgatggccgcatcgccgaacggattggcggcgatgttcacgcaggtcacggaaatcgaaccggcgccttggcggatcagcgagggcaggccaccgccggccacttcgcgcatgagcagcacatccggcctgcaattgcgcagggacagtttcatcacgccgaatttgcggctcattgtggtcagaatcgtgaagctcaccgtctggcagatggcggtggccaggccggcaccaaaaattccgaggtgcagcacgaagataaacaacggcgcgagcaggaaattcagcaatgcgcccgaaaccagcccgatcatgccgaacgccgattgcccttggtatcgcagcagtccgttgagcgcgaacgacccgcatacacagggtgcggcgaccaacaacggcgtcaggtattgcacggcgtatggggcgatcgtcgaggtcgatcccagcatgacgaccagcggccgcagggtcagcaatccgattgtggcaatcaccaaaccagagagcaccgcacccgcgaagcccacggccagtagtcgggaggcgcgctcattgttctgtttgccgagttcgcggctcatcgagttgcccgcgccgttgccaaagaagaagccgagcgcctgcatcacggtcatgatggagaacgcgatgccgatggcaccggactgcgcggtgccgagctgaccaataaagaacgtgtccgtgagattgtaggcggtggtcaccaagttggagatgacggccggcaagcacagtttgagaatcagcggcttgaccggctgcccggtcatctgccgatatttcgcgtccgcgctcgcgcgtctaatgccatgaatctgcaccatggacggctatcctactcgcgcagggtcctatgcaaaggcgcgtgaccgccatacaagtcagcgcagataccgcccggtgatgctgttcggattggccgcgatttgttccggcgttccggtggcgacgatgcgtccgccgctttcgccaccgcccggacccatgtcgatgatccagtccgcattggcgatcacgtcaaggtcatgttcgatgaccacgactgttgcgccgctcgccacgagccggtcgaacacgcccagcagcacgcgcacgtcgaacgggtgcagaccgatggtcggctcatcgaacacgaataccgcgtccgattgggccttgcccatttcgctggcgagtttcagccgctgggcttcgccgcccgaaagcgccggtgtcggctcgccaagcgtcaagtagccgaggcccaaatcacgcaaggtggtcaggcgcgcgtggaccttcttgaggtcgccggtcacggccagcgcctggtccacgctcatcgccatcagctgcggcagactcaacgaaaggtgcgattctcccttaaccgcacgccgaatcgcgtcggcttcggacgcatagcgggagcctccacaatccgggcattcgatggtcacgtccggcaggaactgcacatcgagcgagattgaaccggtgccgtcgcatgtggggcaacgcagtctgccagtgttgtacgagaaatcgccagccttccagccgcccgctttggcgtcgtccgcgcgggcgaaggcgcggcgcaattcgtcgtgaatatcggcataggtggccacggtggagc

SEQ ID NO: 1749 - DNA, 7288 bp, Unknown
  MAG_14  MAG No. k141_24681
atcatggacctcgactgggccgccgtcggcatcaacccgcaccgcaccgatgagaccttccgcactctgcgcgagcaccctaggccaaccgcggcgcaacaactcgcggccctgcaggtctgggtgcagctcggcctcgcgcatccggttgaatatgccacggcctatgccggggtgactcgcggatggtgggacccgcgcgtcaatttcgcgtaccccactgattccgactacctgttcacgcctagctatctcaggcaatgggcgtctttcctgactgaaggtgcttggaagcatacttccgacggcgatgccgataccgtggcggccgaacgacttgccgccatcgaacatgaccttgcgccgctgaggggtacctccgacaagccgcaatggcagaaaaacatattgcgggcgattcatcggtgggtgcgttcggatggtcatgtcggtgttcgcaaaggcaatccgctgacttcgatggccctgtacgtcacgtggattccgctggctgctggtcttgcgctggcggtgcggcctgcgcgacgacgctacggccccgcactggccgcttacggcttgctggcattcacggtgctgtcgctgtatgcctcacccgtggcactattttggtatccgattccggtattcctcacgttgccgctttttgtggtgttgccgttcacattccgggaaagccatcctctctgagcatagttatctcagatagtgaaataattgcggggttgaaaagcactaaaacgccttctattacctcgcacccgtcaaaaaatcaagactgttgttcaagaatttttttctatagagttcatagttgtttttggaccattcgagtacttgaagtgagaggaattcagcatggttcgtcgcgcctgcgcgcagtccgctgaaatgaacacgatgcgggaacgtgatacgcgcgttgccgtttctcgcgtgcgcgcgaagtcgggcagcgcctgtcgtctgcagtcggccacggtctcggctcgtgcatttgcggtcatcgtttttctgtttgcgatgatcgccgcgaccttcctcccctccgccatcattccgcagtccgcgttcgccgtgacgccggcaaccactgccactgctgccaccgtcaagagcgacgacaccaccagcgtcgattacgcgacctgggccgacgttgccaaggccgtcgaagcgcagttgcaggaaggccttaaggaatacaaggacggcaacccaatgggtgccaagtccgatttcggggctgcatacaccaccgtctacgtgacgtccaacttcaacaaagtggtgagcgacaccatcggcgcagacaagcagaccgcgcagcagcaggccttccaggacctgcaaagccaggtgttcacgtcagaccaggccgatcagcttacccagaaggtcaacgacctgaccgccgacctcgacgccacggcccagcagctcgacgccaacaccagcctcgccaacccgaagcagtactccgaagacctccagaagcagatcgccaaggagcgcaaggagctcgacgccaagaagaagcgcaccgaggaaacggccaagacttggaaggaagtcgcggatgcgatgcttccgatcctggacaacgcctacaaggcctatgagggtggcgacgccgccaagggcgccacgctcgtgaacgacgcctactaccagcactacgagaagctcggcttcgagaagaccgtgctgagcgccatcagcggcaaccgcgtctcccaggtggaataccagttcaagctgtgccgctcctcgatgaacaccggcaagcctgcttccgaagtcaagaagtacatcgacgacctgaagaacatgctggccaccgatgccgccaagctcgacggcggcgtggccgatgaggagggtggcttcctcaagttcatcaccagctcggtcggccaggcgttcctgattctgatccgcgagggtctcgaggccctgctcgtggtcgccgctgtggtggcctacctcgtcaagtccggcaacaagcgcttcaccaagtggatctacgtgggcgtgctcgccggtctggccggcgcaggcatcgtggcggtcatcttcatgctcgcgttcggcggctccggcccgctgcaggagatcatggaaggcgtgtgcgcgctcgtcgccatgtgcatgctgctgtggaccagcaactggatgctcaacaagtcctcggtggaagcgtggaaccgctacatcagggaaaagaccgaagccgcggtggcctctgtctcctcgcaggtcgaatccggcgagaaggtggcttcccgcacggtgatttcgctcgccatgctgagcttcctcgccgtgttccgtgagggcgccgaaaccgtgatcttctaccagtccatctacacgatgagccaggatacgcatggcatggtggtcggcgcactcgccgccgccgtggtgctcgtgatcatcttcctggtgattcgcttcacctccgtaaagattccgattggcccgttcttcctggtcacctcgatcctcatgtccgtgctggtggttgtcttcgccggcggcggcgtgcacgcgctcatcgagggcgacctgctgcccgccaactacctgccgggcgttcccaccaacgactggctcggattctacccgtacgccgaatgcatcatcgcccaggtactggcagccatcgccgtcatcgcgctgtttgtggttggctttgccaaacagcgtaaggccaaggcccggcttgcggccggtgcgagcaagtcggacgcgaaggctgacgaggagagcgcgcaggcgtagcacaacgcccggtgcgaccatctcgcgcaacacaacttgcgacatggcaatggaagcgattccagcccacgccgccacaactaaaaacagataagtcgtgaataatccattcaccacaacagaaggaataagagaaatgatgaagaacaagaagcttgccgctctgctcggcgtgctgctcgccggctccatggctgtttcgatggctgcttgcggttccaccaacaacgcttccgataccaagtcctcgaccagctcctccgacaccgccaagaaagacgactccaagaaggccgacgccccgactgagacctccggcttcgaagaggtcccggtcggtccctccggcaccgccaaggagcaagacaaggccgctggcccgctgaccgtgggtgccgtctacttccagcccatcgacatgtaccctgcttccatgggtctgaaggctgctgacgcttccttccacctggaagccgacatccacgcctcccaggaaggcaccgactacggctacggcaagggcgacttcgtccctgacctgactgtgaactacaccatcatcgacaagtccaccggcaaggaagtcgagggcggccaggccacctccggtaccttcatgcagatgaacgcctccgacggcccgcactacggcgccaacgtcaagctcgacaaggccggcacctaccaactcaagctctccatcgagtcccctgagaagaacggctggatgctccacgttgacccggagaccggtgtcaagaaccacaagttctggaccgagcccatcgaggtcaccttcgacaactgggactacaccccgcgtcagtggtgattgactaagcagacagccccctcgtcagagggggctttacgccgctttagggagataattcttaggacggtctaaaaactcccctcagtccgctttgcggacagctcccctcagggaggggagcctaagatgaacagagaaaggacgcgaatgcttgaacaattcgtggcagtgatgccgggcaccttggcccccgcattgctggtgatgagcctgagcgtgatgctcacggtcggcgaggggcgagataagccgataagctcgcattggcgtctcatcggcctgaccgtcggcctgatcgccgctatcacattcgccggcctgcgcgcctcggccgtgatcaaccagcgcacgttcgtcaactatccggtgctgtggtgcgcgatcattgccgacatcctcaccatcgtcgtggtggtgttcgcacgccgcatcaccaccaattggcagcagcacaaggtgttcatgcacattgcgaacgccgtggccgccatcgacatcgcgctcaccctgttctacgcgctgccggacgtgatcctgcagctgaccatctgggtggagcccggcgacccgatcttcacgtccgacatgctgctgcgcgcgctcggcttcgcgctgggcctggccatgtcgatcatcgtggccgtgatcttccgcacgatgcgttcgaccgcggtgcgtgcctcgttcaccgccgccgttctcgcggtgctggtgattctgttcgtccggcacctgaccggtgtcatgcagatcctgcaggcacgcggtttcccgataggccacacgggattcgtggccctcgcctggtcgatcaaccacaacgactggatgatcatggcccaggcgttcgtgttcctgattccggccgtcgcctccgtggtggccggcttccgtataccgctgaccggcgcgaacgaagccatcggccgcaagcacaaggcgttccgccgccgcgccgtggcctccgccgtctggagcctcgtggccatgatcggcgtcacgctgaccctcaccgtcggcgtcgccgcgacccatcagaccatcactctttcgccgccggaagcctactcgctcaaggacggcgtggccaccattcccttcagccaggtcgaggacggccacctgcaccgcttcgaatacaaggccaaggacggcaccgtcatgcgcttcatcatcatccgaaagaacggtggcgcgtacggcatcggcctggacgcctgcgagaactgcggcgacgccggctactacgagaaggacggcaagatcatctgcaagaagtgcgaggtggccatcaacctggcgaccatcggcttcaagggtggctgcaacccgataccattcccgtacaagaccggccacggcaagatcaccattcagactacggatctggacgcgctgagcgcccacttccagtgagtcaggcaggagacaagaatcatgttctttctgcgtatgattactcgctcgttcacccgacagctgcgccggcgcctgcttatcgcgctgaccgtatgcctgtcggcgaccgtgtccgtatcgatgctgggcgtcgtgttcgacgtgggcgacaagctcaacgccgagctgtccacctacggttcgaacatcaccgtgcagcccaaggcggacgcggtcgtttccgacctgtacaacaccgagtcgggcggcgcggcgtccaccagcgacccgaccgcctttctgaaggagtcggacgcggccaagatcaagacgatcttctggtcgttcaacatcaccaacttcgcgccgcagctcaacatccacgccacggtgaacggtgccaacgtgccggtcgtcggcacgtggttcaacaaggacctcaagatctccaccggcgagaccaccgtcgtgggcgtggaaggcatgcgctcgtggtggcagctggacggcaagtggcccaaggacgattccgatcagggcgtgatcggcaagacgctggcctccgaactcggtgtgaccaccggcgacaccatcaccctcaacaagaccaccgcctcgggcaagaagaacgagcagaaaatcaagctcaccggcgtctacgattccggcgacgaggacaacggctcgctctacatcgcctcctccacggcccaggtgctcgccgacctgcccgattcggtcgacaagatcgaggtcaaggccctgaccacgccggagaacgacctggcccgtaaggccgccgcgaacccggccgcgctgagccaggaggaatgggagacctggtactgcaccgcctacccgagctcgatcgcctaccagatcgaagaggtgattccgggcgcggtggccaagcaggtgcgtcaggtcgccgcgttgcagggcaatgtgctgcagaagacgcaggccgtgatgattctgatgaccgtgctgagcctgatcgccgcagccgtggccgtggccaacctgatggtcgcctcgatcggcgaacggtctggcgagctggcgctgctcaaggcgctcggtgccaccgatgccgcggtatcccgcctgatgctggccgaaacggcggcaatctcgctgctgggcgcgattgtgggcgcgttgcttggttccggcgtggcccagctgataggccgggtggtattcggttccggcatcacgatgcggccgatggtgttcgtgctggtgttcgtgctgctggctgtcaccgtgctgctggcgtccgcctcctcgattcgttcgattctgaatctcaagcccgcggaggtgctccatggccgctgagtttatctacgtaggtgtggaaggaggaaaccgatgaccaacaccggtatgttcttcagaatgctgttcagcgccgtgttccgccggcgttcgcgcgcggtgatggccgtggtggcgtcgctggtcggcgcggccacactgttctgcctggcgatgatctgcctcgccgtgccgcagcagatgaacgaggagatgcgtgcgtacggcgcgaacctgattgtcacacccactgaatcgaccaatgccgacggcaaggccggcatcgacaaggcgatggtgcagcacaccactgaaatggtcaaggccaagggttctgcgaaatacgccacctaccgatacgagaacgtgcgcgtcaacgcctcgccgtacgtgatggccggcgtgaatgcggcgcaggtcaagaacctcaaccatcactgggtggtcgacggctcgtggccgaccgacggcaaggtgctggtcggacgtgacatcgccgacgccatcggtctgagaatcggctccgccatcaccatcggctaccgtgcatccgataacgccagcaccaacggcacttcgtcgaactcctcgatcgaccagcaaaccaaagacggccgcgtttccagcgacatcatggacacctccggcaccgaattccgcgtggccggcatcgtggacaccggcggcagcgaagactcgatcatctacgccaccaacgccgacgtcaacaagctcaccggcatcacgcgcggcgtggacgtcatcgagtattcggccggctccagcgacctcgcgggcctggtgtccagcatcaacgacatgacctccatgcacgtcaaggcgcagcaggtcaccaagatcaccgcctccgacacccgcatcatccccatgctgcagacgctgttctggatcgtctcgttggtg

SEQ ID NO: 1750 - DNA, 2702 bp, Unknown
  MAG_14  MAG No. k141_24748
cctcatgggcgcaacaccttctccagttagaacctgaacacttccaaccatagagcgggtgttgcgcttctatctagaacccgggttcggcccggggcattcaccgacgaactgctagaattagccgacgaacaggggcgttgcacttctaaatagacagcgtggcgtgcatgttgctcgcttaggtatgataacgttgtcttttgagcgggattgttatccactgttgatgagcgaggttgccatggcaaaagcgagcattcaagcggtagcgaaagaggctggcgtatccgtgtcaacggtgtcacgaaccttcgccaagccgaatcttgtgctgccgaagacacgtgaccgagtcctcgccgccgcacgcaaactcgacttccaggtctcccggtcggcggccgcgttgaaatccggacaatcgttccgcatcgcactcctgcatgccgataccattgccgtctggttcaatgccaatgtcttccgcgggctcaattccgtattcggcccggccggatacgacatctccgtatacggcctgtcgaacgcgcgggaacggcatgatttcttcactgaactgccggttcgtcgcaatgtggacgcggtcatcgtctgctcgttcgacatcgacccggatgaggtcagtcgtctgaaagacgtgaacgtgccgctcatcggcatcaacaccccgtccaccatcggacttgacggcgcggtgtgcattgacgacaagctgggcatgcatacggctttcgaacacctgatttcgctcggccatcgcaacatcgcctacgtgtacggcgcgccggatgacaccagtcaactgcgcttcagtgcggaaaaccgactgcaaggccttatcgatgccgctgcggcccatcctgacgtcacgcttgagcagattcgctgctccggccatgaggatacgaccggcgcggcgctcgcccagctgaccaccatgtcgcccacgcccaccgcagtctgcttccagaccgacgaaatggcgattccggtgctgtaccggttgccgcaatatgggctgcgcgtgccgcgtgacctgtcagtaattggcttcgacgatatccccttcagcgccaaaatgggcctgaccacattgcggcaacgcccgaatgacctaggcgccattgccgcgcgcaaagcgcttgccgcgatggaaggacccctgtccgaaccgcgatttgaaaccgtggccccgcagctgatgctgcgcgacaccacggccatcgccgcatgaatgcccccgatgcgtgtcgccgtcggtaacagtatatccgcatgaaaaggaccatgacggagcgtatcgcgatgtctgaggcccgcacggcggcgatggttcatggatacactaacaacaacgtggaaaataacacgagcaaaggagcacaccaatgtccacctttccacagctggccacccatccgggcatgaacccggccgcggtcatccaaggcgaccgttggcgcatcggcatcatcaccgaatcgctcgtccgcctcgaatggcaggacaacggcaagttcgaagaccacgccacccaaatgatcgtcaatcgcgattggttgtcggatgacgcgaacggtgcggatggcgcgaaccgtgcggacggcacttcaaacccgccgaagttcacgaagaccgagcgcgacgggctgctcatcatcgatacgccggcgctgcgcctcacctacgacatgcagccgttcagtaaggaaggtctgagcatcgtcgtcaaaggcgtggcgaattcccagatgaatacgtggcactacggcgaagcccaggacggcaacctgcgcggcaccgcgcgtacgctggacgcggtcgacggtgagatcgaactggggctcggcgtgatctcccgcgacggctgggccgtgctcgacgattccgcatcaaacgtgatcgtcgaaggcgccgaagccgccaccgtcaagggcgaggccaacccattcggcatgtgggtcattccgcgcgagcaccccggcaaggatctgtatgtcttcggatacggccatcggtacatcgaagccgtgcaggacttctacaagctcaccggcccgacgccgctactgccgcgcttcgcgctcggcaactggtggagccgctaccaccagtacacggaagccgagtatctggagcttgtcgatcgcttcgagcaggaaggcctgccgttcaccacggccgtcatcgacatggactggcatctggtcgacaatgtcgacccgaagtatggatccggatggaccggctacacgtggaaccgtgaattcttccccgaccccgagcgattccagcgcattctgcacgagcatggactgcgcacgacgctcaacgtccacccgcgcgacggcgttcgagcatttgaagacggctatgccaaagtcgccgaacacatgggcattgacccggcgggcggcgagccggtcgagttcgatctgaccagtccgcgattcatggaagcgtacttcgacctgcaccatgggctcgaagccctgggcaccgatttctggtggctggactggcagcagggcggcgtgacccgccagaagggtcttgacccgctgtggatgctgaaccacatgcattatctcgactccgcccgtgacgggcgctggccgctcacgttctcgcgatatgccggcccgggctcgcaccgttatccggtcgggttctccggc

SEQ ID NO: 1751 - DNA, 4208 bp, Unknown
  MAG_14  MAG No. k141_24982
gttctcgaagaagcagccggatttgaattgggagaatcctgcggtgcgtcgtgcggtgtacgacatgatgaactggtggctcgaccggggcgtggacggcttccgcatggacgtcatcaccctcatttccaagcgtatcgattcggccggccgtctgcccggcgaatacggttccgaacttgaggacctgcccgtgggggaggagggctactccaacccgaacccgttctgtgcggacggccctcgtcaggatgaattcctggccgaaatgcgtcgcgaggtgttcgccgggcgcgagggcttcctgaccgtgggcgaggcccccggcatcaccgcccagcgcaacgagcacatcaccaatcccgccaacggcgaactggacatgctcttcctgttcgaacacgtggacttcgactgcgaagacaacgtcaaatggaagccgctgccgctcgacctgccccagctcaagcgtattttcgccaagcagcagtcggccgtcaagaatgccggctgggcgagcctgttcaccggcaaccatgatcagccgcgcgtggtctcccgttggggagacgactccaccgagggcagccgcgtacgttccgccaaggcgttgggtctgatgctgcacatgcatcgcggcaccccctacgtctatcagggcgaggagctgggcatgaccgacgtccacttcacccggctggaccagtaccgcgatctggaatccctcaatgcctaccatcagcgggtcgaggaagccaaagtgcagtccgcggaatcgatgatggccggcatcgccgcccgcggccgtgacaacgcgcgtacgccaatgcagtgggatggttccgcctatgcggggttcaccgcgccggacgccgccgtggagccgtggatttcggtgaaccggaatcatacccagatcaatgcggcgggcgaattcgacgatccagactccgtgtacacgttctacaagcggctgatcgccattcgccacgagaatgcgttggtggccgccggcgactggcaactgatcgatgcggacgaccagtacgtctacgcattcactcgcacgctcggcggcgagaagctgctggtggcggtcaacctgtccggacgaacggtcgatctgccgcgcgacgccgccgaactggtgcagcacggggtgaccgaaccggatatcgtgatttccacctacgacgcctcgcacgccgtggtctccctcgccaaccgtgagcttggcccctgggagggcgcggccgtccgcgtgtgagctagcgtatgttgttccagacttttttcgtccttgtctggggaaacgtacgcttacttcagctcggtgtatgttgttccggactgttttcgttcttgtctgaggtgccgtacgtttgcttcgtctcggcgtacgttgttccagatgatggggaaattggtctggggaaacgtacgccaagaggctggtgcctgcttggtgcctgcccggtgtttgttaatgtccaacgtggaaagcccgcgcggctggcgggaagccacgccgcagggccgtcacgccccaaactgggcggccttgctgccaaatttgcggcgtacggcatccagtgcggcctcggcatcatgcaaacgtgcctgtgaggtctggccgcgggcattgtcggcctcttcgagcatgtcatccagtgaaggctgcacggccgtagccgccgcctcactgagcgaagacgtgctcataccggccaagcgaatagttttgggcaggggagtggcagactccgccgaggctggcagccccaacatgactttcagctgccgcacgcattcggggtacagcacgccggccgtatcggtcggccgctccatcgtaaaagaccgggtctgatagctcaggtcggcgaaccgcaacttcaccgtcagcgtgcgcgccaccagccccttgcgccgcagcgtgctggctacttcgtcgcaggccgaacgcagtagcccacacaccacgcgcatatcgcgtgtatcctcggccaaggtttcctcggacccaatggatttctcctcgcgcaccgtggtgattttgcgggaatccaacccgtgcgaggccgcccataatccacgtgccgcagccggggagccagtggcacgagtcaatgcagcctcatccagctgagccaattcagccaccgaatgcacgccccaagcattaagccgcttctccaaagacggcccgatgcccggaatgccacgcaatggcatcatctgcacgaactcagccgagcgggccgccggaatcagcagcatgccgtccggcttggcattggtcgaggccattttggacaccagtttgttgcaggcgatgcccaccgaacacgtcacgtggaagcgctcggccacctgagcgcgaatccacgcgccgatcgcgctcggccgcccccactccagcagtgcggcggacacatccatatagccctcgtccaccgaaacctgctcgaaccggtcggtgacggtcaaaaacacctcgtgcatgattcggtgcgacatcatgcggtaatacgccatatccaccggcagaaagacgccgttcgggcacaactgatgggcgcgcgcggccggcatcgccgaattgatgccgtatttccgggcttcatagctcgcggcggacaccaccgcgcgcggcccggtgccgatgatcaccggcttgcctttgagcccggggttgcgcgccacctccaatgaggcatagaaggcatccatgtcgatatgcagcacggtgcatccggtctcgtcgtggccccaatcgcgtttggcggcctcaagtctcggtgcggtgctcatgccaccattgtaggaatgccgaacgaggtcatgctcactatgtggcgcgcatggcgcggcgctcattgtcgtaatgccaaatatcgccggaattccaagggtttgcgcactgtgcggctgtttcgcatggtgggtgcgattccacggaatcgtccacattgcgtcactgtccgtaacgccttccaagtcgctgcgcgctgtcccgactctccgagtagcgtaaacctcgtgaagaaggcagtggtcggtatcctcaaccgtgttcccgtggtgcttatcgtgattggtgaggcactggtgatttatttggctacggccgtcgccaaacttgcgttcacccagctcgacccgctgtattcggtgtggtaccgcgtgggattcatggcggtgctgttgctgctgtggtgcaggccctggagcaaggctaagcgagcgcagctgtttcaccgcgatgcccgcggctgggggctggtcgtactgctcggctgctcgctggtgctgatgaataccctgttttatgtggccatcagcaatatggatatgggcattgccgtgtctatcgaatttttgggaccgctttcggtggcggtgattaccggcaaaagctggcgtgagcgggtcggtatcggcatcgcggcggtcggtgtggtgctgttggccggcatatcattggccaatccgtccggcaatggcacgtttttgtatggtctgattgcgattttgatcggcgggtcgatgtggggcatgtacatcatcaccggccggcgcgtggcggctggcggcaattcgctggataatctgtgcatcgccgtgaccatcggctggctggtccagtccctgttccttggcgtgccggctgtggctcatgtggttcaccccaaggccgatgccacgtgggcgcttgagcccggcggctcgctgaagctgctggctctgctgtttgtgatttccctgatggcctcgttcattccctatgtggtggagcagatcacgctgcgacgcaccacatccggcgcattttcggtaatgcaatccatcaatcccgccatggcggtggccgtgggactggcgtttggcgagattcccagcgttggtgaaatcatcggtgtggcgttggtgatttgcgcggttatcgttacgttctccggcgatgccgcgcccgcggacggtcaataatgtgtcgttcggcacgccgtatccgcaggacgtggtacagtaatttgctgttgcgcattattgcgtaacgtggagtcatgcctgagtggccgataggggcaccctgctaaggtgttagtcgtgtaaacggctcgagggttcgaatccctctgactccgccgattaaggttccgggtgaaagcttggaatcttttttgttttccggaaactcctgatga

SEQ ID NO: 1752 - DNA, 6404 bp, Unknown
  MAG_14  MAG No. k141_25161
accgatagcaggctccggcccggtttctcgctctagagactcccctcagtcgctgcgcgacagctcccctcacagaggccgagccgtaaagcggacagccctgtgggctgtccgtaggcgagggtgagccgataggcgaaccagcatgtcgcgagcgaagctcgtccttaattgcggacgagccagagcataaatcagtccgcggaggtgaagccctgcggctcgccggcctcggcgaacttggcgttgtgagccttcttggcggcggcgatcatcagcttgatacgattgagctggttcgcctcggaggcacccggatcgtaatcgatggagacgatgttggcttccggatgcaggcggcggatcttgccgaacatgccgcggccggtcacatggttgggcaggcaggcgaacggctgcgcgcagatcacgttcgggcaaccctgttcgatgagttccagaatctcggccgtcagcagccagccttcaccggcctgcacgccgatggaggtgacttcagcagccttcttgaccagttcgggcatcggctcgtcctgcttgaacttgccgttcgatgtggccagcgcggccttgatcggcgcgttgtacaggtcgaggcccttgcgcatcagggcgtaaaccgtcttgttgccgcccatgccgaggttcttctcgttccagtcggtgatgtaggggcgggtggtcatgaattccatgatgccgggcaccacggcctcgcaatcctgggattcgatgacgtcgaccacgtggttgttcgcgtccggctggtacttgacaagaatctcgccgaccacgccgacacgcaccttgcgcgggatgtcgcgcagcggcaatgcatcaaaggatttcacgatctccttggccagcacgttatacggcagatagcccttcttgatgctcggcgccttggctgcggtcttggaatagccgtgatgctcgatggtctcacgcacgatggtgtcccacagctcgtacagcttgttggccgaacctttctccacctcatacgggcgtacgcggtagaggcacttcatgagcaagtcgcccagaatcagcgccttgatggcacggtgcagcaggggcagggtggccttgaagccggggttatcttcgagcccctgggtagaaatggcgatgaccggaatctgcggatagccggcatcgaccaaagccttgcggatcaggccgaagtagttggtcgcacggcacatgccgccggtctgggtgatggcgagcgctacatggtcgggatcgtatttgccttccagaatcgcgtcgatgagctggccgacgaccatgatggccgggtagcaggcgtcgttgttcacgtatttgaggccggtttccacatcgccacggctcgcgtgcttcaggatgtcgaacttgtacccaccggaacgaatcaccgcttcgaccaaggacatgtggatcgggctcatctgagggccaacaatcgtatagttcttcttcatgtccttgacgaacttttcgcgatgcgcgtatcgggacatggtggcgttgttgtggccggacttcttggcgttcttggcgttcgccacgccggtggtgccgtccgaagtgccgttcttgctggcgactgcggcctgcaggtcgcgttcggcggcacgcttggaggcggcgcgcatggccttggtgagcttcgggttggcggccatggtgctgtcaagcagaatctggcggccgggggttggcgcggtggagccggtcttgcggaatccggcggacttggggccttgcacggccttggccgcggcggcttcgcgggccttgttggcttcgcgttcctcgacggcggccttgagcgagcgcagtcgaatcttggcggcacccaggttggagacctcgtcaatcttcagcagcgtgtacacgtccgccttgtctgccaggatttcggccacctgatcggtggtgatggcgtcaaggccacagccgaaggaattgagctgcacgagttcgaggcccgggtaggaggccacgaagtgtgcggccgcgtacagacgggagtggtaggcccactggttggtgacgcgcaacggcatcttggtgactgtgcggtctcccacgtggcggaatccggcggcgttcttggagcgcgggtcggcttcgccttccgagaggaattcggtgaggttgagcttctcccccggctgcagttcgcagatggaatcctcggagagcaccaccatgccgagcgagcagatggtttcggggatgccgtggttgatttcggggtcgatgtggtaggggcggccggcgagcacgatgccgcggcagttgtgctccttcatgtaggctagcgcggccaggccttcctgctgcacgtcatgcttgaagaccttgtcttcggcataggcggccttgaccgcggtttcggcctcttcgcgggtcacgttggcccacgcaaactcttcgacgatgcggccaaccatgagctcatggttggcgaggttgaagtacgggtgcatgtagcgcacgccgtcctcacgcagctcaggaacgttggcgccgacgacgagcggatagttggccacaaccgggcagttgtaatgattgtccgtgttgggcacgaggttctcctcgtagctcacgcacgggtagaagatggtcttgatgcccttgttgatcagccacttgatatggccatgcaccagcttggccggatagcagatgttttcggaggcgatggattcgatgccggtctcgaacagctcgtgggagctgcggccggagatcatcaccttgaagcccagcgtggtgagcagcgtgaaccagaacgggtagttctcgtacatattgagggcgcgcggaatgccgatctcgccacgagtggccttcttgtcggtcaaacggcggtaggcgaagcaacgcttgtacttgtagtcgtacaggttcggacggtcggaacgcttcttcttggcgtcaccaccgcgttcgcaacggttaccggtcacgaagcgcgaaccatcagagaacgtggtgatggtgagcttgcagtggttctggcacagcttgcacacgtcacgctcggtggtcatgctcatattgtcgagtgcgtcgccggtcaggatggagctggcggtgtgggtcacaccgtccacgacaacgacatggacttcgggcttggccggctcggtcttcttgaaggctgcggccttgggctcggacttgggtgcgggctcggccttggactgttcctcggacccatcggccttaaccaccacgtccaagtggtcggcctcatcctgatagtgcatgcgggcggtcagggcggcgccgaacgcgcccatgaggccggcgatgttcgggcgggtgacctgacgttcggtgagcagctcgaaggcgcgcagcacggcgtcgttgaggaacgtaccgccctggaccaccacagtgtcgccgagttcgccggaatcacgcaacttgatgaccttgtacagggcgttgcgcaccacggagtagcataggccggcagcgatgtcctcgatggaggcgccttccttctgcgcctgcttgaccgaggagttcatgaacacggtgcagcgcgaaccgaggtccaccggatgggtggaagccagagccttttgggtgaattcctgaatcgtcaggcccatggacatggcgaaggtctgcaggaacgagccgcagccggacgagcaggcttcgttgacggcgatcgagtcgatgacgccgtcagtgatggccagatatttcatatcctggccgccgatgtcgatgacggcggtgacgccggggctgaccatttcagcaccacgatagtgggccatggtctccaccacgccctcgtccaggtgcaggccggtggtgatgaggccttcgccgtaaccggtggcgcaggagcgtgcgatccatgcgccttcgggcagctcggattggatcttcttgacgatgttgatggcggcggtcagcgggctgccttcgttgttggcgtagctggaccagacgatttcacggtcgtcattgacgagcgtggccttgatggtggtggaaccggcgtcgatgcccaggaagtgcgggccatgcgcgccttcgagggtgccgatgtggatgtgttccttgtggtggcgcttgttgaagtcctcgcggtcggcctcggtggggaacagcggcggcatggtgggcgtgttggagggcaggttcttcagctcgtccagacgcatgaggatctcatcgcaggtgtgggcctcgaaatggtggccctgatcgtcggaatccatgtcggcctgcaatgccgaaccgtaggccacatacaggtgggcgtcggtcggcacgatgaactcgtcgaccttgccttcaagggcacgctggaaggcggcgcgcagttcggacatgaagaacagcgggccaccgaggaagatgacggtaccgtggatcgggcggccagcagccaggccggcaatggtctgcgtggccactgcggtgaagatggaggcggcgagatcaggcttggccgcgccgtcgttgatcagcggctgcagatcggttttggcgaacacgccgcaacgcgaggcgatcggatacaggttctcgtagctcttggccatctcgttgaggcctgcggcgtcggtgtcaagcagcgtggacatctggtcgatgaacgcgccggtgccgcctgcgcacgaaccattcatacgctgctcgggcgtgggcttcaggtaggtgatcttggcgtcctcgccgccgagctcgatgatgacgtcggcctgcgggtattccttgtcgatcgcctcggtttcggcgatgacctcctgaatgaaaggcacatgcagattgtcagcaagcgccagaccgccggaaccggtgatagacaggcgaatcggctcatcgcctcgacctagttccacaagctctttacggatgtcgaccaacaggccggccacggtggcacgcacgttggcgtggtggcgtcggtaatcggagaagagggtgtctttcagggaatcggactgatcaagcaccacggccttgacggtggtggaaccgatgtccaatcccacacgcaggggcttcgggtgtgaagcgggctttacgctcgcgtcagtgacgatgtcaaccatgtgttcctcttaattccgacttccgggtatgtgcgccttcaggcatcatgagccgtttcgggacggctggcagatacctgcggacggcttcgcccggctacttcttctggaatattagtccgaccacctgcccaacgtgacgccgggcatggtgatttcgctcacgggaagggcgttccccaacagttccgacgatattgctgagtgcggcattccggacctgctactacgaggcctgttggccttcgccggcttcgcggtctctcaaatagatttcggggatatctcgttcttgatcgtggagcttggcccagatgaccggttcgccggcttccagagacttggacacatcgaggatgcgctggtttctggagccacggaattgcagcagcgagtccttctggtctttgaggtagcggccgtcgacgaggatgtcgataagatgcagcaattcaagcttgtctggtgtttctccgaggcgcatgagctcttcccatgtgtagccggtccacgaccagatatctttggtatggccgaattcctggcggatacgttgtgcgagcggcaccagcacgggagtgttgaggaatggctcgccgccaaggaacgtaatgccttgcacccatggcgctttcaggtcttcgatgatcttgtcttcaagtttttgcgtgtattcgtggcctgcttggaagtcccagatggaggcgttgaagcagtcgacgcagtggaaggggcacccggagacgtaaagggagttgcgcacgccttctccgtcggtgacgatgaaggttttgtagtcggcgatcatccgcttggacatgcgccggccatcccattgaccggctttcggatcgttggcaagaccgttggagggtacggaggggccacgcccggtctcgccggccgcaaagtcatggcgcttgggttcgggcttggtcgtatgcaactccggcatgattccctccttgcggaaagcattagctcccctctttgagggggagctgtcgtcgtaggcgactgaggggagcttcggaatagctcttcggactcccctcagtcagctttgctgacagctcccctcagagaggggagcctactcacgaataaccctacttggcctcttcgaaccactcgcgagtggtgccgtcgtccagcgtcacacgaccggtttcgccgctcatgtgcttgactcggtgggcgatctcctcgtgacggccgtgcaccatcgggcgctggaccgggctgccaaggtagccgcaggtgcgcttggtgacgttgcacttgtccggg

SEQ ID NO: 1753 - DNA, 8899 bp, Unknown
  MAG_14  MAG No. k141_25282
ccccaccgccgccgaagcccaagccgccgcggccctgaccccggaccagcagatcgccaaattgcccgaagccgaccatgccacggtcaaccagatggccggccagatcgacttcactcgcgacggcatcgaatccagctacggcaaggacgcccagcgcgccacctccaccttcgccgacgaaatcctctccgacacccgctccaaagacaccggcgaggcgggcgaactactgaacaccatgctggtcaccattgacgaggctgacctcggcggcttccgcaccattccgatcatcggccaggtggccgtcagcgtggataagctgcgccgccgctatcagaaagtcgacgcgcaaatcgacgaaatcatagtgcgtctcgaatccgcgcaagccaaactcgtggccgacatctccatgtacgacacgatgtacacgcagaacgcccagcaataccgcgagctgaaaatgaccgtactggccggcaagaaggcgctcgccgacttcaacgccaaccagctgccagcgctggaggccgaggccgccgccagtggcgacgccatgcaggcgcaagtgctgaaggacttcaagtccaagctcgaccgttttgccaagcgactcgacgacctcgaccgcatcagcgtggtcaccttgcagaccgcgccgcagatcaaaatcatccagaacgcggaccagaccatcgtggacaagatcgacaccaccatctccaccacgattccggtgtggaagagtcagatggtgatcgcgctgggcctgtccaaccagcgcaaggttctcgacctgcagaacaaggccgacgatgtgaccaacaagctgctggcgcgtaacgcggccgccctgcacaagggtgcagtggacgcggaaaaggccaaccagcgttccgtggtggaaatcgacacgctggagaagatcaacgccgaactcatcgccaccctgaaggagaccgtgcagatccagaaggaaggcaaggccaaccgcgaggccgcccaggtcaagatgcgccaaatcgagtccgacctcaaaaacgccttgctcgaaaacgcccagcagatgtgagccgttcgcgcgccagcatgctcccgttggcagaggtatatgagtacgcctactggtgtgcgtatatatgctcccgctggcgggagctggcagccgtaagactggctgagggtggtcacggcgctcggctcggccggcttaccggcaaccattccccgctgcaatttctctgtgggcataatcccggaatgattgccgcgctcgggaattgggtgaagtgaaggttaaaggttgagagcccgggagggttccggaaccggccacgataaccgctgctagccccgcgatacgggttggcggccggcatccaagccgattctctcctaatcaaggagtaccgattatggcaatgtttccggctttgatgaatgacacgatgttctcggatctgttcgatgatccgttctttgagggttggcgcaacacggacaacacgatgagtgccgcaatgcctgccaacatgatgaccaccgatgtgcgcgagaccgacaagggttacgacgtcgacatcgatatgcctggctttaagaaggaagatatcaaccttgagctcaacaacggctatctgaccgtgtccgcctcgcgttgcagcgagcatgaggacaaggctccggccgctgagggcgaggcttccgacagcaagtgcgcttgcgcgtccgattcgggcaagtggctgcgtcgcgaacgctacatgggctcctgctcgcgtagtttctacgttggcgaggacgtgaaggagtccgacatccacgccagctaccggaacggcacgctgtgcatccaggttccgaagatgcaggcccagccgcaagtcgagtccaagcaccaaatcgcgattgagggctgacgatacttgattcgtcccgaagtcccgcttcgagtagctttgccccctctgacgagggagctcccgcgaagcgggtgggggagagataaatcgtaaccaaaccatgcttcccacgccgcctgccctacgctttcaacgccgactaacctgacagacggcgggaaacatagccaatgcaaatgccgggtagggatttaccctacccggcattttgctgtttcaatcaccgaaccccaccctgttcgcgcgccggtcgtgtgccgttctgcagctgtacacatccgatgagtagaatgccttcgaaacgaggcaagagaggcggacatatggcgaacggcgcacagaacgcaagcggcacgccggccccggcggcaagccgttccggcggccacgtcgtatccgcgcgcgccacgaccatcggcctgatggcgatcctgctgtggagcttcatggccggcaccgtgcgcatcgtctccgaaaacttcggtgccacgcttggttcggccctgatctacacggtcggcggcatcctgctgctgatgttccggcgcccggccccgattcgcgagttccccaagaaatacttgattatcggcggcctgttgttcgtattttacgaatcgtcgatatccctctcgctgggtctggcctctaccgacgcatcctcggtggaagtgagcctggtcaactatctgtggcccacgatgatggtgctgctgtcggcgggcgtatcccatcgcaagcacgcggtcgtcaaggtgctgccgggcgcgattgtggccactgccggcgtggtgctggcggtcggcggtaattccgggctcgactggcatgcggccgtgcagcatatcgccgccaaccctttgccctatgcgctggcgttcgcgggcgcgctcgcttggtcggtgtacgcggtgttcacgccagccatgagtcatggggtggacggcacttcattgttcttcccctgcgtggccgtggcgttgtggattatccacttcgcgtccgggcaggggtggccggccgagccgccgagtctggtcgcatggctgtttgtgttgattgccgcggcggcgattggcggcggttatgcctgctggggctatggcattctgcatgggtctatggagcggctggctattgcgtcctatgccacgccggtgctgtccaccggggccggtgcggtgctgctgggtttggcgctgtcgctgccgttttggtgtggcgcgctgctggtggccgccggatcggtgctcaattacttggtcagtgcgcgcaaatagcggggtggctttgctcatggggcggtaataatcccatggggcggtaaaaccctcatggggcggtatcccaaaatggctttattctgccgtttcacaatttcttcaaaccgccccatgggccttttaccgccccatgggtaaattaccgcccgatgggcagcaacaacttactcgccgcggcgctcggacgggcggcgaatcgggtcaagcagcgtattcggatcggagatgccgaacatgctgcgcccgccggtggattcagggtgcttggcgagaacggccagcgaaatcgcccccggaatcataatgatcaccgaaagggccgccaatccccagttcacgaagaatccgagccccagtacgatggccaccacaaccaccaccgtgacgataatcgtcaacagtgctcgacgtgggttggtttccctggtccaagaggtgctggctgcgggttttgctgttgaactggccgcggcgtttgtggctgttgtgccatcagccgtgccggtcgtgggccttgccgccgcgctcgtcgcggggtcagtaggggcgtcagacacgttatcggcgacattgccggtcgctgctggacgttgttcgtttgcgtgagtcatatccaccaacatattccctgcttccggctaaagctgggacaagcctgcgcaccgctaatccagcgccgacactggccttgagctgcggacgtccaggccggatgtgaacaggagctgaacggagtctggggaaaccatgagaactcgcgacaatttttgtgaaattgggtgacgctctatgaatcgcgcgctagtattgcgtgagcttacaagacgaggagcctggagcgcggggacgaaggatgaagaactccgtttggaaaacgttcatggaattgtcgctggtccgcggaatcgtgccgtggaccgtgttcggactgaccgcgatcgcggcaatcatactgattgttgggctggcattgagcaagaagcgcggcccggcagcagacggcctggcgccggacggcgaatcgtcggcccaatcgcccgtcgacccagataaccagccggccaaccagcctacgaacgcggctgctacggcgtcatccgcagcttcgacggaagagacgtttatttcccatggcctgcgtacgccgcaacgtcgtcacttgcatccgctggccgccgcgctggccgccgccgtgctcgccggcgcgggcggactactggccacatggctgatgtccgacgtgttcatggtgttcggcgtatcgctgggctggccggtgatcctcaccgtcgcgggaggcttcgcgggcctcggcttcgtgctggccgccgccgtgacgttacggggggcccgtcgcgcgctggccgtcgtgctggtgccgctggtgctggcgtccaccgcgctcggcgtggactcgatctacggcgaataccagaccatcggcagtctcgtcggctatacgccataccccccgctcggttcggtcaccgtgcgcaaagcctcgatgagcgtcggcgagtggcgcgacaaggcgcgcaaggacgctctgccatccatgcccgactcgggcagggtgttcgtcgtcagcatcccgaacaccgaatccaagttcaaggcgcgcaaggcgatggtctacctgccgcccgccgcgctgtccgaccgcccgccggccctgccggtgatggagctgctcgccggtcagccgggcagtcccggtcgcctcatcgacgccggcaacatcgccgccacgatgaacgcttacgccgccgaacatgacgggctggcgccgatcgtgctcgcacccgaccaaaacggttcggccatgcacaacagcctgtgcgccgacaccacccgaggcaacgccgaaacctacctcaccaaggacgtggtgaactgggccagggcgacgctgccggtagccaagtcggcccgtatgtgggcgatgggcggattctcgcaaggcggcacctgcaccacgcagctggtgccgcgtcaccccgacatctacggtgcgatgctgccggtggatggtgagctcgagccgaccgacggcagcgtcgagacgatggttcggcgatatttcgccggcgaccgcaaggcctacgacgggcaggtgccggtcaacgccatcgccgccaccggcacggccggccaggcgctgttcgccggcgccggcaaaggggatcggaagtcggtcgccaacatgcgcaccatcgccgcggccgcgcgcgcggccggcatgcagaccaccgaactggtcgtgcccggcgccgaccatgactggcatgcggtgcaggcggtctggaaccccggtctcgactggttcggcgcgcgaaccgggctgggcgaaatgacgaaatcgttggaggaatacccacaagtggaggtgttgcaatgagcgaagaacaacagcatgggaacgcgcggccggcggccatgccgcagacgcggcggcccctgcgggacgcggaaccctcgcggacgaagcccgccacgacctcccgcgccaccaaaccgcatacggcaaggtccagccatgcggcggaaagctggcgtgaactggccggtgacgtgcggcagtgggcggacgaccaccggttggccgtcaccgccacggcggcgctggtggcgctgaatctggtggcgtggctggtggccgcgatggccggattcgcgtttccgctgcggctcagcaccagcatggccgcattcaacgccggcaaactcatctgctcgctgttcctggcgcgcggcgtcatccaactcatggtcgacgccgtcctgtggctcgtcatgctgtcgatagccgaaccatggctcggccgtgtgcgcaccgtcgtcaccgcgctcgcctgcgcggccggcggcgtgctggcgggcctgaccctgtgcgcggcggccggatggatgttccaggactccctgttcgtctcccgcatgcggttcgcattgagcccgctggtgttgccggtcggcgcgctcatggcggccagcgcgttctgcagccacctatggcgcaggcgcatccgactcgtcggctatgtggcgatcctggtcacgttgctctacagcggcaaccccagcggctactgcatactcgccgccgcgctgatcggccatgccgccggccgtgtgatggccggtccgcccgcgcacgtcgaagccgaatggcactggctgcgcagcacctccttcgaggcgcggcgcatattcgcggccatcgccgtggtactggccctggggccggtcatcgccatcacctcccataaccatgcgggcccgctcagcacgatcggcctgctcatgagcccggtttccgtcgacaacggcatgctggccaaatgcctggccggtgacacgcacggcggatgcttcctgcagttcgatctgttgcgggcctcgatgcccggcgcggtgctgcgctcgttgctgcccaccgccgtgaccctggtgctggcgtggggcctgtatcgcggacgtcggttcgcggccatctgcaccgtggccatcaacctgttcacggtggccatcgccgtcgcctactatctggtcgtgccgctgagcttcgcgccggacggcatggcctccctgctgcagcacggcgcgatcgtggcctgcgtggcgaacgtcctgcccccgctgctgttcgccatcgccctgctggcggcgatgaaacacttcccgatccgcatcggctggtgcaggctggtcggcggcatcggcgccatcgtgctggcctggctggcgtgcgccgccatatacctgatatacggcatcgcccaacccgccaccttctcgccacgcgctacggcctcgtcgctgctggccgagctgccgggacgcttcctgcccatcggcttcctgagccatatgaagctgtcgttcgtgccgcgcactccgatggcctcgatcgtgtaccaaggcgtcggcctggtgttctggatcgtggtgctggccgtggtgatccactggatgggcgacgtgagcgaatcgaacgagcgagcccgggcgcgcgccgaacgtctggtcgaaaccggcggcgaatcgatgagcttcatgaccacgtgggaaggcaacagctactggctgtcccccacgggcagatcggccgtggcgtatcgcgtgctcaacggcatcgcgctgacctgcaccggaccgttcggcgatccggcggaatggatggacgatctgaacggtttctcccagcactgtgcggaacgttcgctgtcgccggtgttctacggcgtgcatcgggaacagcgcgacgcgttgctggaagccggctggaactccatcgaggtcggcagcgaaatggtggtcgacccgcgcggctggaagacgaccggcaagaaatggcaggacgtgcgcaccgccatcaacaaggccaagcgcgacggcgtgaccgacgtgcagtccacattcctggaagcgtcgcttgatgtgcgcgaacagatcgaggacatctccgaggagtgggcgcagctcaaggcgctgccggaaatgaagttcacgctcggcggcgtcgaggaactgcgcgacccgcgcgtgcggctgctttacgccatcgacgcggacgggcgcgtgctgggcgtcaccagctggttgcccacctggcgcgacgggcgcatcgtcggctggacgttggatttcatgcgccatcgcaccgacagccccaacggcatcatggagttcctgatcgcgcgcatggccgagcggctgcgtgacgagggcgaagccgatcccacgcacgccgtggagttcatgagcctgtccgcggcgcccctggccggcatgaatcccgatcgggacaacgccggggaggacggggcaccggccagcgaaggcacgcaggtgctccaacacgcgctgcagatcgtggccgactggatggaacccgcctacggcttccactcgctgttcaacttcaagcgcaagttccagcccaccgaagcgccggtctacgtgtgctacccggacccggcggcgttgccgcagatcgggctcgcggtggtgcgcgcctacgtgcccagcgtgacgcccgccgaagtggccggcatgctcagcacgctgcggtcgtgaaggtgtgcacacgggtacgcaggttagccgattcgagcctgagacggggtatctgctttcagagaggtacatttggccccttgcggacaactaactgccttcaaagaggtgcctgaactctgaaatctcgagtatgagcgttgcaatgacaacgtttgtactcggggtttcccgtattcggtgcctctttgaacgaagatagcattctgcagaagcccgaatgtacctctttgaacggagaaagcctgacaaggagggcgcggcaagcgctatctccgtttcgaggggctgatttggtctctcccggaggtctactcccgtttcgaggggctgatgccgaagtattcacgctccaaaatcggcggaatggcgttggcgcggttgggattttacatgcggtcttgcggccgaccagccccttgaaacgggagtagacctccggcgggggtcaaatcagcccctcgaaagcggttttgccggtgcagaggtgtcgttgactgcatcgcgagccgcctcgacgtagtaacgtggggcgtatgagcgaacgtaacgaacacaatgacggaaatacgcaaaccgcatacttcgccggcggctgcttctgggggc

SEQ ID NO: 1754 - DNA, 2829 bp, Unknown
  MAG_14  MAG No. k141_25297
cacggcgttgcgggatgagccggaagacatccgcgctcgcgacggcggaatgctgcgcggtgcggcggcatccggagccgtgctgcgggtggcacgtccggttttcggagaaaaactgggcggagtccgcctgccgttgtccgtgacgttggcgcttgccgtggcgttggcgttcggttgaggctcttcgatgtcatttctcgtgacggacggacgggccgatggagcctgacctgactgacgtgaggcgcgggcaggggcgaaggagcgtggcacctgctcggaaggtcgggtgcgtcgatttcccgcaggaatgaagcttggcgggttgatatgcggatccgccccacctgattcctgcgtcataacccctcctgaaactgtcgattgtctgaatgacactttgacacagcatccgccgggtgttcctgcgctatggtgttcctgcgcaggaacggcacaatatcatgtgcaacggcatcagggcatcgtgtccgcgccatagcacacagttccataaaaatgatgtaatgacacgagaaagaatttgacaaaaacgaaattgcatgtgtgtaatttagtccgtatgaaaagctcaataggcaaggagaatcgcatgtggggtgtggtcgacgattcagccgaagagccatggcatgaattgtggggactattccgacctgatggcgatgtatcttggcagcacaaggcgttgtgcgcgcaaaccgatccggaggcgttcttcccggaaaagggaggctcgacccgtgatgccaagcgtgtgtgcgccaaatgcgaagtgcgtgaacaatgcctgaaatgggccatcgaccatgatgagcgattcggtatttggggcggcatgagcgagcgcgaacgccgtcgatataagcgagagcaccgggagcaggcgtagctccacacacacccccttcaagtctggtgcgtacactgggagtttatgagtccgacaggtaatagcgatattcatgaggcgttggccgacgccatgtcttctcgaccgtatacgcataggcaggatgtggataccggcattacggctgtgatcaccgttgaggaggatatgcgtttcctccggtctacattgcgttcggtattgacgcagaatgttcttccgggagtcgtcatcatcgccgacgcgaccgggcgcgccggttcgaggataaccacttcgttcgaggtcattccctcgccatcggggccggtagtggaggtgccgcagtccaagcatgtgaccattcacatcgtttcggccaagggcgcgcgttccttcggcgatgcggtcagccgggcgttggatcgggccgatttggatgacgctccccgcgcattgtggctgctccatgatgattcccgcccctcggatgcctcatgccttgaacgattgcttgaggcgtggcgcaatacgccgggtgccagcgtgctcgggtgcaaacagtgtgattgggaaggatcccacctgcatgatgtcggtatgtatgcaggccgacacgccgtgcattccctggtggtcgatggagaacccgatcaggagcagtatgacgggcgacaggatgtgttcgcggtgtcgctggcgggcgcgctggtgtccatgtcgcaattcacgcgactgcggggcatcaatgcctggctgaccacctacagcgaatcggtcgatttctgccgccgtgtctgcctgagcggcggacgcgtggtggtagtcccgcaagcggagatatcacatcgtcgcgcacggtatgagggcattcgtacgcgaggcggggagccgcttaaggaagatcacacggtcaatcatgcgatgacggtgcatcgctcccaacagcgctatctgtacactgacctggccatgtcgtcctggattatcgtctggctgtggaggctgattcgcagttttggcatggccatagccatgatgttcggcaagaagccgtatgaagcatgggtgcaattgtgcctgccatggttggctttggccgatatcgcgggaaacatgaaatcgcgcaggctggtggccagacagtcgaaggtcgccgcatcgtccctgcaggttttgttcgccgacagtcggcagatcaagcagttccatgatcgtcgggatgcattccaatcccagcagggcagagtgctgctcagtccgctggaacgtgcccatctgcggacacgcaccatatatcgctggagcgcagccgtggtgatggcgctggtgtgctttgcggccatcgtggtgatgtattggccggtgttccgttcgatattctccggtggatcgttgtattccgatgtgttgctttccaccggtgccagcttcactcaactggtgcagtccgccaccacgccatgggtgtttggcagcggcaccggcattcctgcgccgcccacgccgtggctgctggtgctgatgctggcctcgctggtcacgctcggccatgtgaccgccgctctggcgatgatactgtttgtggccgcgccgctgagcgcattgtcgttctgggcgctggcgggcgtattcacccgctcggacgtggttcgtgtgctgggaggactgttgtgggcatccaccggcattatgttcggctggtatgcgcaggccaatatgccgatgctcaccgtaatggtgttcctgccggccgcgttcgcattcgtgttccgtgccgtgggcatgtaccataccgaagacccgctcaagccgcgcacatccgttcaggccgcggccatcgccgcactgtgcttcatccctgtggtggccgccgaaccgcagctgctgttcgcgctgatcgtcgtgttcctgatgttcctgctgttcgtgcg

SEQ ID NO: 1755 - DNA, 6982 bp, Unknown
  MAG_14  MAG No. k141_25387
cttctcccagcgggaaagcgcctgttgggtgacgaacagctcgtgcgcgaactgcgactgcgtaagacctcgctcctcgcgcacgactttgataacctgaccgatcgacatgactacctcccgacatcggaaaacgattcgcgcgtctcgctgtgcgcttgctgattccagtctaagggcatgtcccgttcgccaagcgcgggtacaacaaaccgttgttcgcgctagtatcccggaggaagaaacggctcggtcgaacctatttcctctccgcacccttcaatgctcccggttcctctgactcctttgcgagcgccgcggatgggatgagcacgcttacgtatggggttgcgccagacaggacgtcgtcgtagaagcgctgtttggcgtcgatgaagtcgatggaatcctggatttccgcgagctgctcgaccagccgcgcccgcttgccggcgagcatctacttgcgttcggggatgctcggctcgtggaggagcgtaaggggcgcgagtaggggttcgcggctttgctgcggtctctccctcacccggctatactgggagctccctcgtcagagggagcttaaattcggtctggttataggcccatgggcttcttgggctttttgtcgctcatgagcatgaggaagctgcgggactgggcggtgatcatgaagcccgcctcatagctcagttccggcccattcgggttgtgcgtatccacgaccagctgccatttgcggccgtatcgctcatccggcagggtgaacataatcggctcgtaatgcgcgttgaagatcaggatgaagtcattgtcgaccatccggttgccgtaccagtctacctccggaatatccgaaccgttcagatagatcatcatggagaacgcatgcgtgttctgccagtcgtccatatccatgatcgaaccggtgtggtcgaaccattcgacctgcggaatcatgttcgaatcgtcgccgggctcacggcctgtgaagaagcgacggcggtgcaacaccggatgatccaaacgcagatgaatgagtttggaaacgaaggcgagcagttccttgcgtcccttgtcaagatgccagttggtccaggagatctcgttgtcctgacagtaggcgttgttgttgccctgctgggtgcgggccacttcgtcgccaccgcaaatcatcgggataccctggctgaacagcaacgtggcgaacatgttgcgcatctgacgctgacgcaagtcgttgacgtccggaatattggtcgggccttcaacgccgcaattccaagagcgattgttgctctcgccgtcgcgattgccctcgccattggcttcgttgtgcttttcgttgtagctgaccaggtcgttcattgtgaaaccgtcatgcgcggtgatgaagttcacggacgccaccggtcgacggccgttgacctgatacagatcggaactgcccatcaggcgcgaggcgaattcgggcagcgtggagggctgcgagcgccagaagtcgcgcacggtgtcgcggtagcggccattccattcggaccagctggacgggaagccgcccacctgatagccgccggagcccagatcccacggttcggcaatcagcttcacgcgcgagatgatcgggtcctgctccacgatgtcgaagaacgcggacagcttgtcgacctcctggaactggcgtgccagcgtggcggccagatcgaagcggaagccgtcgacgtgcatttcggtaacccagtagcgcagcgaatcggtaatcaactgcagcgcgtgcggcgagcgcataagcagcgagttgccggtaccggtggtgtcgaagtagtgctgctggtcgccttccaccagtcggtagtaggaggcgttgtcgatgcccttgaagctcagggtggggcccatatggttgccttcggcggtgtggttgtacaccacgtcgaggatgacctccatgccggcgtgatggtaggccttgaccatggacttgaattcgttgacctgctcgccgcgctctccggaggaggagtaggcgttgtgcggcgcgaagaagccgatggtgttgtagccccagtagttcgacaggcccttctcctgcaggaaggagtcgttgacgaactggtggatcggcatgagttcgatggcggtgacgccgagcttcttcaggtattcgatgacgctcggataggccaggccggcgtaggtgccgcggatgtccggcggcacgtccatgttgaggttggtcatgccgcgcacatgcgcctcgtagatcaccgaatcgtggtacgagatgtaggggtgctggtcgttgccccagtcgaaatacggattgatgacggccgacttcatggtgtgggcggccgagtcaaggtcgttcatcgccgaggtgtcgtccgggcttttgaaccagtaggagaacaggctttcgtcgccgtcgatgttgccttcgatggccttggcatacgggtcgagcagcagtttgttggggttgcatctgaggccgtgcatcgggtcatagggaccgtagacgcggtagccgtagcgttggccgggctggaggccggggatgtagttatgccatacgtatgagttctgttcggtcatttcgatgcgcgtttccgcatcgtgctcgtcgaacaggcatagctcgactttctgcgcaacctgtgagtacagcgcgaagttcacaccggcgccgtcatagctggcgcccagcggatacattgatccaggtctgatctgcatagttttcagtatcccactttcttgtgtcactgatgtgccggggagttgaacgtcaggagaacagcgacggcttgtctttgtcggagttcctggcgatgagtctgcgtaacgcctcatgctggatggcgatcatcgaattggatgaggtgatgcgcgtggcggcaaggtcgctccacggaatccacgcggattccacgtgctcgtccgcgtcgaaatggcgctgctcccgtctgaacgggcccaaatgcaacaccatgatgtgggccagttcgtcggtcatgccttcggacgagtagaaatcgcccacgaagtcaacacccatggtgtcacggtccggcaccacgccggtttcctcggccagttccctcagggccgcgtccatgatgtcctcgccctcgtccatgagaccggcgggaagcccgtaggcgaacatgtccgatccggcacggtattcgcgttcgatgaggtaacggtcggtggacatgtcgtgcacgagcatgaccacacagggggcgtgacgcagcacctggcggccgatctcgtgttccttgccctgcttgtcggtcagagcgatgcgcatgtcgtccacgtggaagatgcgcccggtataaacggtttcgctactgatcactttggcgggcacgtccatgtcgatgccgtccgaggaggcgttcagcttatggtcgagccgatgctccagttgttcctgcttgcttcccccaaacatgtcatctcctcggaaaaaacgttttcgccacgtcactatagcgccttaatcccgatgcgcggtaatggacagcgtccatggatcggtcgtgtcgtggaaccactcgacttcaggccttgctccggtcgcttgttcgatggcggctggcacgtcatcgatcgcgtagttgaaccacatggattcgatggcggcatgaggggtgttgatgaagcagggacgcacatggctctcccccgccattccatggccgagcatgatgccttgggtcctcatacgggcttcataccgggcttgttcgatggcgtcggtcaccgggtggtgacgcaaatcgctggttacgtacacgtccgcaccggtggcacgcacctcgttgaacagggagtcaccggagccaggcagaatggccacatactgaacaaaagtgtccgaatcgccgcatacctggatgccgagcgcggtggtcatgccatgatcggacacttcgtcgaatacacgctgagcgaaatccttcagggcaacaggcttcggcaaacgacccacacgccccaagccgaccggatgagaggcgttggcatcgtcaatcggcacgagtggtttctggtcgatgagtccgaagtagtcggccgccgcctgccccacgccgcgatacgcagcgtcggcattggtgtgccctacccacagcccgcagccttgctggtagagcctgcggacgatgtcgccccggaaaccgagtccgctcgtctcgtgtacggaacggaagaacaacgggtgatgggtgatgagcaggtccgcgccagtagcgatggccttgtcaatgatggcggaggtcgggtcggcggcgaacacgatgcggtgcacgtcgtggctcagatcgccgacgatgagacccggctcatcccattcctcggcgtagcgcaatgggtacagggtctcgagaacgtcgatgacttgcttgagattcggcatatgtcccattgtagtgggctattgcggcaagggactcattctgcaattgcggacaagccatgctcgtgctcttcattgctcgactatcggctcgccttcgcctacaaacaatccactggactgtttgctcaacggctcagcacccctcacccgaggggagctagaaattgtcagtgtgcggcgagctgccagtcggaaccgataccgcacgatacgtccagcggcacggcaaggtcgacggcgtgttccatggcgttgcgtaccagttcggtgacctggtcgccttctcccggcgcgatttccactaccagttcatcgtgaatctgcagaatgatacggctcttgacgtgggcctctgccaaggtctgctcggcgcgaatcatcgcgatcttcatgatgtcggcggcagatccctgaatcggtgcgttgagtgccgcacgttcggcggcctctcgcgcaacacgattggtcgaatgcagggccgggaagtagcgacgccgtccgaaaatggtttccgtataccccttctctcgggcattggccaccagcgattcaaggtaatcgtgcaccttgccgaaggtatcgaaataccggtttttcaacgcttccgcttcacgtggcgcgatcttgagctgctgggcgagaccatacgtgctcagaccataggccaatccgtagctcatggcttttacgtggctgcgctggtcgccggtgatctggtcgaccggcagcttgtagaccatcgaggccacgtatttgtggaagtcggctccggagcggaacgcttcgatcagcgcctcatcaccggacagatcggccatgatgcgcagctcgacctgtgagtaatcgcaactcatcagggcctcgtacccctcccccggcacgaacacgccgcgaatctcacgaccggcggcgttccggttgggaatattctgcaggttcgggtccacggagctcaatcgaccggtggcggcaacggtttgctcgaaagtggtgtggatgcgctcatctgatgtgttggtggcatcgatcagcgtttggacgatctgcttgagcttgttgatctctcgatggcgcagcaacgccccgaggaaaccgttggcccgctcattgtccactgatttgacatacagatcctgcaatgcggccgcattcgtggtgtatgagccggacttggtgcgtttggtgggtttcaaacccatatcttcgaacagcaccttctgcaactgcttgggactttgcaggttgatttcggtgccggcatactcccaagccatttcctgcgcctgacgagcctcggcggcaaactggtcacgcatggaaacgagtcgaacgctatcgactttggctcctgtgtgctccatgccgtgcaatacgcgggaaacaggaagttcaatcgcgcgcatcagccagcattgttcacgctcgtcgataatcggcccgagcgtgacggcgaggctgcggataatggccaaatcgcgcagacgatgttcgttcggatcttcttcgacctgatcgtcatcgaagtccaacgtgccttgcgaaggctgttcggtttcggtgaagtggatgtcgaggaagtgctcggccgcctgcttgaggctatcggcgtggaaatccggttgggccagatacccggcaagcttggtgtcgaacatcggcaggtccaggtcaagatctaccgcgcccagaagatgcagcaactctttatacccatgcacgatggtgcgggagtgctcgctttccaggaaccgcgcaagctgtgctcgcagggtatcggtgattggaaggggcactatggccgctgatgttgccgtggcaacggcaatggcttgtgccgtggcacgacccggcctttcgtcgccccatgcggccacggtccaagcgtggccgaccgcgtcgccgcagacggtatgccgctgcgatccatcgccatagtcggaaaccgtgaaatcggcgatttcaccgggaactttgacctcggcgcgatgggccttgacccattcgtcgaactgctccgaagaggtgatgctcgtgggttccggcaggttcagatcgagactgttatcctgctcgtcctgttcattattcgtagactcgccggctccgtatgtgttggaaaccttggcaccggtattgaaggttttcagtacacgactcctggtacgcggtccgaattcaagctccttgaacagggcgtcgatttgtgccacgtccacggtgccgaatgtcagatcctcaatatcgacgccaagatcgacgtctcgtaccagtgcgttgactttgcgattgagcttgacctggtcgatattggccctcagcgattcgccttttttgccgccgatttcatcggcgtgctcgcaaatgccgtcgagggaaccgaattggttgatccacttggccgcaaagccatcgcctacaccgggcacaccgggaatattgtcggcggtttcgccgcggagcgccgccagatccggatattgtgcgggagtgactttgtatttgtcgatgatggactgcggcgtcatatgcttcaggtctttgaagtga

SEQ ID NO: 1756 - DNA, 7653 bp, Unknown
  MAG_14  MAG No. k141_25391
gagctgcccgagaaaccgcgatcgtggatagcatgctcgctgttatgatggtcaatactataaggagcactatggttcgtactcgttttctgagcacatagcgcaccgaccgtgcaacgaacgtcatcaatacctcctgtgggccttgggcttttcgcccaaaatgcgaaacatgccgcgtttcgccggttagttagccgcgacaatacatgatgcacctcaagatacgggaagagatacgccttgggcgaaaaacggaacagcggcgaatgtcgtttattctggattttggtccatctcgggccgcgtcgatgcgtcggcccgagaggaatcagcgctcgcgcctcaccttcgaggcggcgaacacgaggagcggcagagcggcgaacgcatagttctcgcattggatgtacaggtatgcgaccaggacgagccagcagatgacggtcttgtgccagacgccggattcgcccggacccgcgccggcaacgccatcaccactattgcccccggcaacatcagcaacgtcggcaacgccatcaccactattgcccccggcaacatcagcaacgtcggcaacgtcggtgacacaaacaccgtgcgccagcccgtcggacgatgcgccatccgcaccgccacggcataccgtcctcccgcgcgtcatgcagaccatcgaggctccgaccagcatggccagcccgatcagcccgtattcggcgatgacgctggtatacgcgcacatcgtccacaccgtgtccgcgttcacgccggccgcgaatcccgtggccgcgccgccgttcataccaagaccgtccagcagccgtccggctttggccgcgccggcccacaccgcattgatgatgttgcccgcgccataaccggtgagcagcgtccacggatgggtgagcaatccgcatatcggatcgaggctttggtagatccgcgcgaagaacgagccgtctccctcggccccgttctccgcgatggcggagagtctggaatccgccagcacacccagcaggcccagtgcgcatgcgccgagaatctgcagcatgccccggacgcggcgtgcgccgtcatgccaatcggtgcgcgccacaagggcgatcagcaacgccacgacggaatcgatgacgattctggtgccggcttgcatgagcaccgcgccgacggcatacgtgacgatgaggtcacgcagccgtttggcgtagatgcggtcgcgcccgcgcatgagccacatgagcggaagcagtatgccgaacaggtgcatgccgatatagctgggctcggcgaacaggaactgcggacggccgccgccccacaccgagttgtcgctgatgtattgccggtacatgaggtgcgagaaatagtcggtcaacggtttggcgcgcagacggatggacagccattgcacgacgcccactccgaaggaaacccagtatgatgcgatgagaatccgcaatggcgtacgccacggaatgcgtttgatgtcgaacgcaagggcgatcgcacccaaagtggcgagcacgcccagcaatccggtgatgctcatgaacgcggcgttgaggtggatgccgaacttcagccatcccgggatggacaggattatacagaccaccggtaggaggaacattggcaggtaccggttggctgcgatgcgcagttgccgccaattgcataggcagtacacggcgaacagcgccggactgattggcgaccagaacggcgcgtacaggccaagcgtggtgccgtccaccggaagaaaagcgacggccagcaacagccaaatgacgttgcgttcctgcgatgtcagaaatcgcaggaacgaccggtattgcggtcggccatgatggttgcccgcgtcgatggtgtcgttgcgtacgcatgcctggttcatgtgattctccctccccgtcaaccttactcgttcatcacgatgcgcggacgggggcatgctttccccgctgaaagtgcaatggcccgaaccttgacaaggtcgcaccgagcccccatcattggcacattgtgcgatctcgtcgtggctggctgacgaaataatgctggccgaccggttacattggttcggtacagtggcggcattattggccactggatcaagcgatttgcggcagaacgacgaaagcgacacttgggcgaaaagaggcaggcatgaccacgaatcgaccgctcattgcggtgactccgctgatggattacgggcgcgatagtctgtggatgctgcccggatacatggaggcgataatgcgggccggcggtacgcccgtcatgttgccgctgaccgatgacgccgacattcttgcgcaatgcgccgaacggtttgacgcgtttctgtttacgggtgggccggatgtgggaccgatggttggtgcagtggcctccgccaccggccgtagcgaggtgctctctcctgagcgcgaccgaatggaatcgattctgctgccagctgtaatggcttgggacaagccgattctgggcatctgccgtggcattcagttcatcaatgcagcgctgcgcggcacgttgtggcaggatctgccaagccagcatccgagcgatatcgaacaccatatgaatccgccgtacgatgcgttcggacataacgtttccttggtgcccggcactcccctggcttcattgttctcggggcagactgagattgcggtgaatagctatcaccatcaggcggttcgtgatgtggcccccggtctcgaagtcatggccgttgcgcccgacggcgtgatcgaggccctgtaccggccggcaagccacttcctgtgggccgtgcagtggcatcccgagtttctctacaaggtagatccatgctcgcaggcgatttttgatgcgtttgtggggagttgccgataacagcaaaaggggctgctccggttttccggaacagccctttttcagcggtagcagtcagcagactgatttagtcatcggtgctggcttgccagcgctgattggcgcgtgcggagaccgccgtccgaaggcgaggggcgtacgaaggtacgtcgaacctgaggaaaggcggtatacgctccgccaatcagtgctggttgttgagacggtggtacatctcggacagctccagttccttctcgaactggcgagcggtggtgttctcgtcgatgacggcgagctcaacaccggcgatgcgggcgaagtcttcccaagcctcacgaccgacggaggtggtcatgcaggtgtggtgagaaccaccggcggtgatccagcactcaacggcggtcttcaggctcggcttcggctcccagacggcgcgggcgcacggaagctccttgagggagccctgcggctcaacgacgtcgacgacgtccatgagcaggcggaagcgttcgcgaacgtcggacatggagaccacgacggcgtccttggtgggcttgccggagaagaccaggcggaccgggtcggccttgccgccgatgcccagcgggtggatctccagcttcggcttggcgatggtgccgatggacggggaaacctcgagcatgtgggagcccatgtcgagctcgtcgccctcggtgaagttgtaggagtagtcctccatgagggaggcgccaccctcaaggccgtagcccatgacggcgccgatgcgcacgaggacggcggtcttccagtcgccttcagcggaaaagccccagccgtactcggacgggaagcgctgtgggccaacgcccggcagctgtggcagagcgccgaggtcctcgaaattgtcgacgccggcggtgcagccgttggcgcgcatcatgttgaccatcgcggcctcttccttggcggcgatgaacagggagtcgtacttggcgtccagcagagccgggtcgacgtcgtacttggccttgtagtcctcgatgatctccttgacctggtcgtccttgacggcgtcgtacgcagcgacgagctcgttgacggcccaagtgttgatggaggcgccgaacacgcgctcggcctcggtcttgtcgccctcggtgacggcgacgttacgcatgttgtcgccccagcgcatgaccttcatgttgttggaggcatcccagccggcgcaggcgcgggcccaggtgccgaccttctcgacgacctcaggatcggtgtagtggccgacgacaaccttgcgcttgatgccgaggcgggagacgatgtaaccgaactcacggtcgccgtgggcggcctggttcaggttcatgaagtccatgtcgatggtctcccacgggatttccttgtggtgctgggtggccagctgcagcagcggcttggtcagcacttcgaggcctcgaatccacatcttggccggggagaaggtgtgacaccaggtgatgacgccgatgacgttcgggttggcggaagcctcgaccatgaactccttgacaccgtcggaggacttcagggtgggcttgaggacgatcttggccggaatcttgccggtgttgttcaggtagtcgaccatttcagcggagtgaatggcgacctggcgcagggcttcctcgccgtacaggtcctgcgaaccaacgccgaaccagatttccttgccctcgaaggggttttccataaccatagggttacttcctttacttctttgtttatgggggtttgtttaagtttcattcgccgaccgaggctcccctcagagaggggagccaagacaccaccgtgctggcggagtcagcgctgatttgatgtgtgtgcccgcaaggcgcggaaggcgaaggcgtacgaaggtacgtcgagccttccgcaacgcggcggacactccatcaaatcagtgctggccgtagacgttctggtagcggtcgttgagcttatcgatgtcggcctggtcgatctcgatgatgtcaccgagctgacgggcggcccacatggtgtgagcgacttcctcggtcatggcagcggccttgacggcgccttcagcatccttgccgatggtgaaggggccatggttctgcatgaggacggccggggacttcgggtacttcttgagggtctcgacgacacccttgccgatcgcctccgagccgatcagacggaacgggccgaccggcaccgggccgccgaactcgtcgcccatcatcgtcaggccgcacgggatgttctgaccagtggcagcccaagcggtggcgtaggtggaatgggtgtgcacgacaccgtagacgtcgggcatgttgcggtagatgtaggcgtgggaagcggtgtccgaggacggggcttcggcaccgtcgaccacgttgccgtcaaggtcgcacacgaccatggaggacggggtcaggtactcgtagcgcaggccggagggcttgatgacgaacaggtcggcggtgtgcagacgctgggaaacgttgcccgcggtccacacgaccaggttccacttgatcagctgctggtgcaggttggagacgacctcacgaacctgcttgacctcggcgcgaacctcggggccgtaatcagccaaagttgccattattggttttcctttccactgtgatggatggacgttttttcaaaatctcaaggacctctctcaatagagggaggtcagaaaggcttacttatcttcgaggttgatggtttcgatggcagcgtgctcgatgggcaggcccttggtgaagcgggcgaagaagtcctcgaaaccaaccacatcggaagccaccggcttctcagtggtggactgggcgtccttgaacacgaaaccatcaaggaagtcagcgaggttgctgtgatcctcgttggtgttccacaggtagttggcgagcacggccataccccaggcaccaccttcggcggcggtggacatgaccttgatcggggtgttgaaggcagcggcgagaatcttctgagccaccttcggagtggtgaagatgccgccgtggcccacgagagagtcgacctgcacgtgctcctgcttggtcatcacgtccatgccgatcttgaccggggagaacgcggagaacagctgggcgcgcatgaagttgccgagggtcatgttggcttcggggctgcgggcgaacagcgggcggccttcaggcagaccggccaggaattcgccggaacggaacggatagttcagcaggccgccgcagttggcgtccacgtcgtcggcgatggccgcgcggaacaaggtgccgtacagcataccggcatcaaccgactggccgatggccttggcgaactggccgaacaggccgacccaagcgttgaggtcggaggtgaagttgttggcgtggctcataccggccagatcgccggccggggtggtgaccaagtcaacctcagggtggagggccttgagcttgtgctccagaaccaccatggcgaagatggaggtgccggcggagacgttaccagtgcgtacgcgcacggagttggtggctaccatgccagtaccggcgtcgccctcaggcggggcgagcacgatgccgggattcagggcaccggacggatcgagcagcttggcgccttcctcggtcagctcgccagccggagtgccggccacgagcggctcaggaagcaggttctccagcttccacggctgggctgcgacctcaggcagagcgtcgaacttctcgatgaatgcggtttcgtaagtgtgagtggtcgggtcaatcgggaacatgccggaggcatcgcccacaccgaggaccttctcaccggtgagcttccagtgcacgtaaccggcgagtgtggtgaagtaagccacctcggagacgtgctcttccttgttgagcacggcctggtacaggtgagcgatggaccaacgctcggggatgttgtactggaacagctcggagagcttcttgtgagcttcggaggtgttggtgttctgccaggtgcggaacggcaccagcagttcgccggcctcgtcgaatgcgaggtaaccgtgcatcatggcggagaagccgatgtggccgacgtgcgtgagcttctcgccataggcggtctcgacgttgttggccatggaggcgtaagcggactgcaaaccgccccagatctcctcggtggtgtagctccacagaccatcctccaagtgggaggcccagctgtagtcgccggaggcgatggtctggaagttgtcgtcgatgaggacggccttgatgcgggtggagccgaattcgatgcccagcgtggtcttgccagcgcgaatcttctcggcgatgtgggcggcctgctcggccgcgttgtcggttgctgccatatctttcctttgccttggagcgccggcgttgttatccccttccttggggaggatgttagcgctcacaatttcaaaaaaacattgtaccgataacctgcattcgacacaacttataccgtgtcacgcatcataacggtttgataacagcgccaatttaccgccgaggagccggccccaaggaccgccgagcacgcacctcggcgggaatcagccccacgccgtgctgggtggtcaggaaggtcggctcgccgccctcccccagcaagcgcagcgtctcgcgcatggcggccacgccgagcccctcgaaatcgggatgcacggtggtcagcggtgggtacatgttatccacgccagacatgtcgtcgaatccgaccacgctgatgtcttgcggaatccgaagcccatgctcatgcaacgcgcgcatgacgccgacggcc

SEQ ID NO: 1757 - DNA, 7842 bp, Unknown
  MAG_14  MAG No. k141_25439
acagccggcacggtcagcaccagcgagatacggtccgcgatgtccagatcggcagccttacgtgcgtcctgcacagaacgaatcacgtcgcgggcgtagccttcggccagcaaatcggcatccagcgcggtgtcgaggatcacgaagccaccggtcggcagagcggcggagaccgaagcggcggcctcggtggcgttctcctcctccacgcggttgatcagctcgtactcgccttcgaccagcgcaaggtcgccggacggcgtggagaccaccggcgcaccggacgcagcatcgacatgccagtcgccggacttggaggccttgatggcgaactgcacctgcttgccgaggcgcggacccgccgcacgggcattcacacgcagctcgtgcacgatcttcagaccgtgggcggcggcatcctgcagcgtcgagaactcgatgctcttgatgttgagctcggacttcagcagatcgtcgtacgccttgacggcgtccacgttctcgaccaccacggtgagcttggaaaggggctggcgcacgcggatcttggcggccttgcgcagcgacagcgtgccggaaacgacttcgcgcaccttctccatcgcgtccaccaaggccggatcgtcgaccagcacgcggccaagctcggtatcggcaccggtcttctcgtccaccacgaacggccaatcggccaggtgcacggactcgccaccggtcagaccacgccacacggactcggcttccatcggggccagcggcgcaagcacgcgcatgaacgcctcaagcacggtgtacagcgtgttgaacgcggaagcgtcctcattccagaaacggtcacgggtgttgcggatataccagttggtgagcacgtcgatgaagtcggagaccgcatcgcaggcgtcggagattgcgaactcgttcagcgacttctcggcggccagcaccagacgacgggtacgggccagcaggtagcggtccatctccggcagaccggcgatctcgtccgcgcgcagctggcgagcgtcgaagccagccccaccgttggccgcgttggcgtacagggtgaagaagtagtaggagctccacaccggcagcatgacctggcgcacggtgtcgcgaatgccttcggcggtgacgatcaggttgccgccacgcaggatcggcgaagacatgaggaaccagcgcatggcgtcggaaccgtacttgtcgaacacgccgttcacgtccgggtagttgcgcaggtgcttggacatcttctggccgtcggagccgagcacgatgccgtggcagatcacgttcttgaacgccgggcggtcgaacagggcggtcgccatcacgtgcagcaggtagaaccagccgcgggtctggccgatgtattccacgatgtagtcggccgggaagtgctgttcgaacttctccttgttctcgaacgggtagtggaactgcgcgaacgacatggaaccggactcgaaccagcagtcgagcacatcggaaatacggtgcatgtgcgacttgccggtcgggtcgtccgggttgacgcggaccaggttgtcgatccacggacggtgcatgttgatgttgccgtccttgtcgcgcggatagtcgccgaagtcggccttgagctcttcgagcgaaccgtagacgtccacacgcgggtacttcggatcgtcgctcacccacaccgggatcggggaaccccagaagcggttgcgggagatggaccagtcgcgcgcgttggcgagccacttgccgaactgaccgtccttgacattgcccgggatccagttgatctgctggttcaattccagtagacgcggcttgatcttggtcacggacacgaaccaggaggagaccggcttgtagatcagcggggtggcgcagcgccagcagtgcgggtaggagtgcacgtagctcttctcctggaagaggatcgcgcggcgctcttccggaatctcggcgagcgggccgtcaccggcgcgcaggttgcgcaggatcggcaggttggcgtcgaacacgaaatcgccctcgtagtcagggcactgcgcggtgaagcggcagccatcgtcgagcacgtcggtgctcttgatgccgtgcgcgttcagcgtattcatatcgtcctcaccgtagggagcctggtgaaccaggccggtaccttcgacggtgtcgacgtagtcggcggtgaagatcgtgtagccgttcgggccgggcacgtggccttcggattcggcctcgtcacccgcgaagtacgggaagaccgggtagtagcgtcggcctgccagctcgttgcccttgagttcgcgcacgacctcgtaattctcgccgagttccttctcgtaatgcggcagcaaatccttgccgaggtagaacttcttgccagcgaacttgccttcggtcgggcggacctcgacgtagtcgatgtcggcgccgaccacgatggcgaagttggtgggcacggtccacggggtggtggtccagaagacggcgtaggcgtcgtcctcatcgcgcatcttgacggccacggatacggtggtgtcctggcggtcctggtacacgtcggcgtccatgcgcagctcgtgcgcactcaacggcgtgcggtccttcgggcagtacggcagcacgcggtagccctggtaggccaggcccttgtcgtagagctgcttgaaggcccacatcacggattccatgtacgggatgttcagggtcttgtagccgtgctcgaagtccacccaacgggcctgacgatgcacgtagttctgccattcgttggtgtacttcagcacagaagcgcggcaggcgtcgttgaacttgtcgatgcccatcttctcgatctggtcgaccgagtcgatgccgagctccttctgcgcctcaagctcggcgggcaggccgtgggtgtcccagccgaacacgcggttgaccttgcggcccttcatggtctggtagcgcgggatcacgtccttggcgtagccggtcagcaggtggccgtagtgcggcaggccattggcgaacggcgggccatcgaagaacacgaattcgttctggctgtggtcgccggaagggttgcgttcaacggactgctggaaggtgtcgtccttgtcccagtagtcgagaacggtctcctccatgtcggggaagctggggttcggcgcgacgtgcgcggtctcgccgccctcgctcgccttgggatatacgttttcgctcaccgtaaatctcctgttagtactgtgcactggtcctacaggagcgtcattgatggcgattgccgggcgccgacgtgtgccggctggtttcacgaatgtcacgtaccgaaccgtgggccgattagtcaatcgcctcgcagccggaaccgactgtgttccgcccggaacagccatgtctgccgttcctgcctacgaggacgatgacgagcgctggtatgcgctccgcaccgcggtaccacctcgcttatcgcaccggttgcgccgctccgaactgttgcactcggagccgcgagcctgcgcgaccgcttgtgttcggctgtctcgggccgatcccgtcggttctactgggcgattgccgccgttcttccgaagactccccgctgataacggatcactgcctcacaacggtgcatatcctaacacgccacgcggtcaaatcgccgcccacggccacggcaccgtcaggagcccgatttagattgggaccggccaccacggaccgagaaaggattgtcggacaatgacgtatgatttcacgtccatcatgaacaggcatggcatggattcgatcgcggtcgacggactgggcaccgacccgggattcgcgccggacccgccacgcgagggtttcgacgtcatccccatgtgggtggcggacatgaacttcccgaccgtgcccacgatcccgcaggccatcatcgaacgggcgaagcatcccgcctacgggtacttctcccccaccgacgactattacagctccatcatcgactggcagtccacgcgcaacggggtcaccggattgacccgggaggcgatcggctacgagaacggggtcctgggcggtgtgatcagtgcgctgaccgcgttcgccgcccccggcgacggcgtgctgctgcacagcccgacctacatcgggttcacccggagcatcgaaaacaacggctaccgcatcgtccacagtccgctcacgctggacgagcgcggcgtatggcgcatggattacgaggatatggacaggaagctcaaggagcatcacatccacgtggccgtgttctgcagccctcacaatccttgcgggcgcgtgtgggaacgttgggaaatcgagaaggccatggaagtgtacaaggccaacgattgcgtggtcatttccgacgagatttggtccgatttgactctggggaaccaccagcacatccccacccaatcggtcagcgaggacgcacgcaacaggaccgtggcgttctacgcgcccagcaagaccttcaatctcgccggactggtgggaagctaccacatcatctacaatcccacactccgggaccgcatcgtggccaaaagctcgaaatgccactacaacgacatgaacgtgctttccatgcacgcgctgatcggcgcctaccggcccgaaggccatgagtggctcgacgaactgaaggcggtgctcaccggcaacgtcgattacgcctacgactacatcaccaagcatttccaaggagtgagtttggccaaaccggaaggcacctacatgctgctgctcgactgcgagcagtggtgcgaacgccacggcctgagcctgcccgagttggagaaacgcggctgggatgtgggcgtcgcatggcaggacggcagcatgttccaggccccctacagcatccgcgtcaatctcgcattgcccttgagccgcgtcaaggaggccatgcgccgccttgaccaatacgtattcaacgcgtaaacggcatgcatccgcgattgcggtgtcctggaaagacgaatgccgtcaacgaggttggtgcccgttggcggcattcgtcatacgttggccgaaccgggcgaaacccaagttgccgtgcgctatgaggtggatgccgccagcggacgtgtacatctgaccgcccgatatgccggtgccaccgatgcgccgacgctgccggcattcggattggaatggacacttcccaagcagtacgagaacctgcgcttctacggccttggccccgaggaaacctatcacgaccgtctgcacggtggcaagctcggcattttcgagcgcaccgcggccgaagacaatgcaccgtatctggtgccgcaggagaccggcaaccatgaagacttgcgttgggccgaagtgcttgacgcccaaggacacggcatgcgtatcagccaggccggcagcgaacatttcgcggcgagcctgttgccgtacagctcgctcatgctggaagaggcgacccaccagaacgagttgccgccggtccgtcacacgttcctgcgcctgttggccgcgcaaatgggcgtgggcggagacgattcatggggcgcgcccgtccatgagcagtaccagctgcccgccgatcgcgcctacacgctcgacgtgaatctggaactgttctaacagcgataaagaagctccctctgacgagggagcttctttatcgcacagagggagcttctttatcgtgctggtacgaaactgtcacgcaccactagggtggtggagatgaaggtatggtggtgcagcgtgcgccgactggagatggcctcggcaagcatcgtaatcgcagtatcggccagctcattctggtcgatatcgtaactggtcaatgtcggcgaagtgtactgggcgatggcctggttattgatactgatcacactggtatcgcgaggcaccagcactcccgcagcggtaaacgcctgcagtacgccgactgcaatcgagtccgcagccacgatgaacgcatccggcatgtcatctcgatgatcgttaaccgcttcctcccctaaagtgcgcccggtgtccacagtgaacgcgccttgcgcgtaaatcaggccttccgcatccagccccaaacgctcggtccaattgcggaatgcggttaatcggccgtcttccggatattcgtgcaaacccatcgtgaagccagtaccgccgatatagccgatgcgtcgtttgcccgaggacaccaacatatccaatgcgtccaaaatggtttggcttaaatccggttgtaccgaatcgaacaggctgggcgcaggattggtgtcgatgaatacgccatagggcaataccagatggagcttcaacagtctatccgaagagagtacggacggtccgatggagatgaagccgtcgaaatcaccggcgtcggcaatcagatcgtcgatatgggaaaacgacgtgagttccatgtgctgggctctggcattgtcgccgagcacggaccgtagttcatcgaaataggcgtccgccagttcttcctcgcgggtggcgttgtcgagtacggccacacggcgtggcaatgcgatacggcgtgatccggtagcgtagccaagctgctcgctgacctcgatgatgcgacgtcgcgtctcctctttgacagacaatgtcgggtccccattgagcagccgggataccgtggcctgcgagaagcctgatttctgtgcgatttccttcatcgtgaccatagttgagccttccacgcctcagtacgtaacaatacgcagtatttcagtaaataactttactacatagtgtaactcacgtcatgcgggtatgacgccgtatggttgcagcatcgtcgacccgcagcgctgatgagaacgtgcatgtttcaggccctccgataattatcgggcaggcgggaatccccagaccgtggagtcaatgcgctggattttcccggacttgtcaaagacaacggtgatgtccggcgcagtaaaactgccggtcgaatccccgaatcggtacggatcactccagtcgataacggcatgcatcgtcacggtccgagttttcgcgtcataggactcattcgagtactcgatactgttatgcgtggccgtagtcccgcccagaccgccgccattgccttgatgcatttgctgacaatacttcgtaaaatccgcgccgagaacattcgacactgcatagcgcctaaatgaacgtgttaggtctgcaccaattcacggccggcaatactccacacttctcagtaatcaattcgtaccaaaccgctcacgaatctgagcagcagtaccataagaggcttgcgcaccgaccccagtcgcggcgtacgcggaaacgtacgaggccaactgcgcactgtccgccaacgcatgacccgaggcaagtccggccagaaccgtgcccataaaggcatctccgcacccggtagtgtcgatggccgcaaccgcaactggcgcaatacgatagatatcatcaccatcgatgaccaccgacccatccccgccaagcgtaattaccgcctgattaaagccgaagtcatgcatctgccgcgccacatcagaccagtccagtccatcccaatcgtcatcgtcaggctcggcgatgtccagcagctgtgccatttcatgttcattgaccagcagaatgtccgaagcctcgataagttcagcgggtagttcagcaacgaatggcgaatcgttgagcaataccttgagcccggcatcatggcagaggcgagcgcatgccgtgaccgtttccatcggactctccaaacacagtcccagtacatcagcagcaaccaatgcatcagatgactgctgcacatattcgacagatacctcaccattggaaccagccgaatatacgatggtgttctcaccattcgcatcgacggtaattacc

SEQ ID NO: 1758 - DNA, 13869 bp, Unknown
  MAG_14  MAG No. k141_25910
aaggtgaccagtgactcgtttttctcggggtggtccttatcgtagtagtacgagtcgggctgtactttggttttgatgccgatgtgcacccatgaacgaccaatcaggtcacgcacggagggattgcgcgccgccttttcggcgagcgtacgcaggcgacctcgttcgttgacgtacgaacgataggccttgcacaccgccgtgtggtcggcgtggtcaaggaactggtagcgtaccacgcggcgataattcattgtgccgaggcttggctcaaaccaagtattgatatgggtgtacgggccatcgctgggatggtcgatgccgtaaccggcattccatggagtttcgcagatggcgatatacccgtgtccgtctgcgcggagctgcgcgaaccacggcatgtaaccgccagccgtttcgaagcggccgtcgaaggcgatatctttggtgctcacggcggtaggccatgtgttggggatcatcacaccttgctcatgggtgatgagtgtcgtgtcatggtcgtcggcgcaatcgaagtccatggctgcgggccacgtcacattggtgatgttcaggccttgctcattgagcggaatccattcgaagagcacatcgcctgaggcacgctccacccatacataggtttcaaaggagtatgcgctgtgcccaaagccggtgaagatgctgcgaatgccggttcccgtgccggtttcacgctgctcatgggtgatggaagtggcatccgcgaacgcgaaggtgccttgcgcgcattgcagggtcggcttgaaatcagcgcaggtattccattcggcaccgtcgcgcgtaaaagcgaactgcattgttcgttcatcgaatcgcacggtagtgccggatacggtgaattccatagttaatgtgctcctgtatgttctcgattgctcccgcttacgggagctcgctcatataacaagataggggtggtctgctgtttgagaccacccccagtcggctttgccgacagcccccgccagcggggggggctagcgctgtctgtttattacttactgcttactgcttcttggtcagtgcggtgaacactgggccgccgccgtagtcgaatgcgacgccggagactgcggaggtgctggctgcggtggcattctggttccacaacgggatagccggaaggtcctgcagcagaatctcctcaccttgctgataatacttgtcggcttcctcggtggacggggcggaaagagccttgtccatcatggcatcgaactcggggttcttgtagttgccgctgttgccgcccttgccgtcggccgaactggaatcgtacagctgtaccagatagttgtccgcggatggataatcagggccccaaccgctgcggtatgcggaggtcatcttgcctgaatccacattggacaggaattcgtcggaagtggacatcgggatgctcttggcatcgatatccagcgtgttcttgatgtagttgcagattgcctcaacccagttcttcgcagtgccatcagcattgtatgcaatgccgaactcaccgctccacggggagatggcgttggccttggcccacagttccttggccttggacgggttgtacttcagtacttcatttcccttgagttccttggagtaggcgctgattggggctgcaaggaagtcgacggcgggcgtggcggtgccgtggaagatcttctcggcgacggtcttgcggtcgatggacatggaaatggcctgacgacgcaggttgccttcctcgttctggccgaagtgttccagccattcaggaatggtgaaggtgagcgtattgccaccgggctcgttgtatgccttcagcgacttgtcggattggaaggaggtaagtgcggtgtcaggaatcgtgttcgtgaagtccaggttgccaccgcgtaggtcggcgtatgccgaatcgggcgaggtatagatcttgaagttcaggccatcgttcttggcgacacgattgcccttgtagtcagggttcttcaccatttcgatgctgtggttgtgctgccaggacacgaacttgtatgggccgttgctcactgggtgctgaccgaacttcttcgggtccttgaacgcggattcgggcaacggcatgtaggcgtggctgccggccttgaccgggaatgccgagtcgggctggctgagcttgacatcgatggtgttgtcgtcaacaacggtcaggccgctcagcgtggccttggggtccacgtccggcttttgcagatcatcatagccttcgattgtgctgaagaagctggcgctggcctgcttgttggcactgttggcggtgtaattccatgcgtttacgaaggagtgcgcggtcaccggagtgccgtcggtgaacttccatccactcttgagcttgatgacgtaatgcgtggcgttgtcgctggaggtgatgctgtctgctacctcgttgtggatgccgcccttcgcatcgtaggtcaccagacctgcgaacagctggtctacaaccttgccgccaccggcctcagtggtgttgccggggaatagtgggtgtgccggctcactgccgtacacggaaatgatattggaatctgaagcattgctggaattggaggtaccggtcgatccgcagccgctgagcagcatgacgattgccgcaccggccgcgaccagtgaagtgacatgacgtgtgttcatgaatctctcccaaatattttggcgtcatctttttggcgacgaaagacaccataggagcttcatgttaaccatgtatgcaatattctcgaaatataaacattactgaagactcaaggcagtaattaatcccagaaacgcaaaaatcccctcatgaagaagggattttcatgtttctgtttggaaagtattcagcgaggcagcatcatcggacgctggctggccttgatcggggccggcagctcgctcttttccttggagaggtactcgtccacggctgcggcgcaggagcggccttcggcgatggcccagaccacgaggctctggccacggccggcatcgccgcacacgaacacgccatcctgggaggtagcgaacttgtcattgcgagcgatgttgccacgcttgtcgagttcgacgggcagctggtcgaggatggtctcggtgtccggatgcaggaagcccacggagatgaggaccagatcggcgggcagcacgcgctcagtgccaggctggcgagtgaacggaccattttcgccgggagccacggagacgaccttcaagccggtgacatgaccacgctcatcggccacgaagccttcggcggtggtcgagttatcaatggtgaccttggccttctcctcttcggtgccctcgaagttcacggagtcggtggagtagatgtactcgccgccctcttccatggaggaggtcttctggtaggtgcgggcgaaggtcggccatgggctgttgtccggacggcttgacggctctttcggcatgatctgtagcacggtgacgtccttcgcaccctgacggatcgaggtgccgaggcagtcggaaccggtgtcgccaccgccgatgacgatgacgtgcttgtccttggcggtgatgtcgtgcaccggcttgacgccgaagatacggcgcgtggcgtcgggcaggaagtcgagggcgaagtggatgccgtcgagctcgcggcccggaatcttcatatcgcgcggcacgcgggagccgatggccactacgacggcgtcgtaacggtcacgcaggtcatcccacgtgatgtccttgccgatttccacgttggtgcggaagcgggtgccttcggcctccatctgcttgacacggcggtcaagcagacccttctcaagcttgaagttcgggatgccgtaacgcatcagaccaccgatggcgtcgtccttctcgtagacgacgacggtgtggccggcgcgggtgagctgctgtgcggcggcgaggccggcagggccggagccgacgacggcgaccgtctggtcggtcagacgctgcggcggcagcggcttgacgtagtccaaatcccatgcctggtcgatgatggtctgctcgtcaagcttgatcatggtcggcggctggtggatgccgagcacgcaggcctgctcgcacagggccgggcagatgcggccggtgacttcggggaagttgttggtcatggacagacggttgtaggcgtcttcccacttgccctgacggaccaagtcgttccactcgggaatcaggttacccagcgggcatccggtcatgcagaacggggtgccacaatccatgcagcgggccgcctgcgtttgggtccacggttgcaggccggtttcggcgtgaacgtcgaaccagtccttgatacgctcctcaacggggcgttcagccaactctcggcgggtacggaccttcaggaatcctctcgggtcgcccatgtcagcgcgctccttccataacctgctcgtacaccttttcccaggcgccgggcgcattgaaatctacattgttggccttggcttcttccatggccttcgtcatggccacgaactgcttcggcaccacgtgagtgaaccgcttgacggtttcgttccagtcctccagcagggccgcggcgaactgggaaccggtctcttcggcatgctgcttgaccagtgcgtacaccagcttggaggtttcggcatcaagcgacttgaagagcagtgcaccggacttgatggcacccgggttgaccttcttcatatcgaggtcaagcacataagtgttaccaccggagaagcctgcaccgaaattgcgtccggtggggccgagcaccacaacagtgccaccggtcatgtactcgcagccgtggtcgcccacgccttcgaccacgaacgtggcaccgccgttacgaacgccgaaacgttcgccggcgcgaccggctacgaacatctggccggaagtggcgccgaaaccggtgacattgccggcgatgacgttgctgtgcttgtcgaaggtgacggtgtcttccgggcgcacgatcatgcgaccgccggacaggcccttgccggcgtagtcgttgacttcaccgtagatgcgcatggtctcgccgcgcgggatgaacgcaccgatggactggcctccggaaccgtgcagggtcatgtcgatggtgtcgtccggcagaccttcctcgccgtaacggcgggtgatctcgtagccgaccatggtgccgaccgtacggttgacgttgcgaatcggcatttcgatgcgcacgggttccttgtgttcgagggccggctgggcaagttcgatgagcttgttgtccagtgccttctccagctcgtggttctgctcgatggtctggtgcaggatcgtgccgggtaccgggccggcctgcttgagcacgttggtcaggtcgatgccgccggacttccagcgcttgatggcctcgtcctgatccaaacactcaacgtggccgatggcctcctcaagagtcctgaagccgagctgggcgaggatctcgcgcacctcctcagcgatgaacatgaagaagttgaccacgtactcgggcttgcccttaaagcgggcgcgcagctcaggatcctgggtggcaatgccctgcgggcaggtgttcttctggcaggcgcgcatcatgacgcagccttccacgatcagggccgcagtagcgaagccgaattcctcggcaccaagcagggcggcgatgaccacgtcacgaccggtcttgagctcgccgtcgcactgtacgacgatgcgggagcgcaggccgttcaggatcagcgtctgctgggtttcggacaggccgatctcccacggggtgccggcgtgcttgatggcgttgagcggggctgcacccgtaccgccgtcatagccggagataagcaccacgtcggcatggcacttggccacaccggccgcgatggtgccgacgccgaactcggaaacgagcttgacgtggatacgtgccttcgggttggccatcttcgcatcgttgatcagctgcttcagatcctcgatggagtagatgtcgtggtgcggcggcggggagataagctccacgcccggggtggcgtgacggaccttggcgatccacggcgggaccttggcaccgggcaggtggccaccctcaccgggcttggcgccctgggcgagcttgatctgcaggtcggtggcgtgcacgaggtaatcggaggtcacgccgaagcgagcggacgcgatctgcttgatgcggctgtagcgctgcgggtcgttgatacgatcgtcggattcgccgccctcaccggagttggagcgtgcgccaatcgaattcatggcgatggcaagcgtctcgtgcgcttcctgtgagatggaaccgtagctcatggcaccggtggagaagcgcttgacgatctcggaggccggctcgacttcggagatgtcgattggcttgcggttgttgttgaacttcatcaggccacgcagggtcatgagtcggttcgacgtgtcgttgatgtggtgcgaatacttcttgaacatctggtagtcgccacggtgggtcgactgctggagcaggaagatggcctcgggatcgttgaggtggtcctcgccggtacgacgccacttgtagtcgccgcccgtgcgcaggttgcggtgcggggatgcgctccactggttcgggtaggccacgcggtgacggatggccacttcttcggcgatctcgtcaaggcccacgccacccacacgggaggtggtgccggtgaagtattcgtcgatgacttcctggctcaggcccacagcctcgaacagctgtgcgccacggtagctcatgatggtggagacgcccatcttggacatgatcttgagcacaccggtggaaagcgccttggtgaggttcttcacggcggtgtccgcgtcgaccttgaggtagccgttacgggccaaatcctcaacggattcgaaggccaggtacgggttcacgcaggcggcaccataagcgatcagcagtgcgacgtggtgaatctcgcgcacgtcgccggcctcgacggccatggagatctgcgtacgggtgtggcggcgcagcaggtggtgctgcacggcggaggtcagcagcagggacgggatcgggccccacgtgtggttggattcacggtcggagagcacgatgaagttcttgccgtcggcgatggcctcgtcgatttcggcaaagatctcgtcaagtcgctcttcgagggccttgccgccgccggcgacctggtagaggcccttgaccacgtacgggcgatagtagccgccgaggatgcgggccttgtcaaggcgcttgagctgggccatctcatcagagttgaccacgggcagcgggatgaggatcttcttggcgtgcagctcggaatcggccagtaggttaggctcggggccgatggcggattcgagcgaggtgacgatctcctcacgctcccagtccagcggcgggttggtgacctgcgcgaacttctgggtgaagtagtcgaacagcatgcggctgcggctggagagtgcgggcataggcgcatcgttacccatggatcccagcggttccttaccggtgttggccatcggagtgagcaacagcttcagatcctcttcggtgtagccgaaggcacgctgacggcgctggacggactgtccggagtgactcacgtgctcgcggcggggcagatcgctcatctcgaccgagttgccttccacccacttgcggtacgggtgctgggaggcgagggtcttcttgatctcttcatcggggatgatgcggccttcggcggtgtcgaccaggaacatcttgccgggctcaagacggcccttggacacgatgtgctcctgcgcgatctccggcagaacgccggcctcggaggccagcacgatgtagccgtcgtcggtgagctgccagcggccggggcggaagccgttgcggtcgagcagggcgccgacctgggtgccgtcggtgaagacgatgtcggccgggccatcccacggctcgataagcgtgttgttgtactcgtagaaggcgcgcacgtccggatcgagatccgggttcttctcccaagccggcggcagcatcatgcagatggcgtgcggcagggaacggccggcgaggtgcagtagttcgaggcactcgtcgaaggtgccagaatcggagtagcccggagtggtgatgggcagcagcggctcgaactcgccgagcagttcgctgctcagacgaccttcacgggcggagagccagttgcggttgccctgaatggtgttgatctcgccattgtgggccagcagacggaacggctgggccagcggccagctcgggaaggtgttggtggagaagcgggagtggacgatggcgatggtggccttcatgcgctcgtcgttcagatcctcgaagaagtgggtgagctgcatggtggtgagcatgcccttgtacgtgatggtacgggcggacagggaagcgaagtagacgcctacctcatgctcgacgcgcttgcggatgcggaaggtcttgcgatccaagtccacgccggccagagcaccgtccggagaggcgaccacgagagtcttgaatcccggcatggcggcaagggcctgcaggccgaggccgtccgggttggtgggcaccacgcgccatgcgagaacttcaaggccctcctcgcgcacgatcttggcaatggcctgttcctgctgaccggaggtttcgatgtcgcggtcgaggaaggcgatgcctgcggcgtagtggccggcttcgggcagttcggcgggcacggtggcacgcatgaactcatccggcatgctcatcagaatgccggcgccgtcacctgtgttctcctcggcacccacggcaccgcggtggtcgagattgaccagtacctcaatggcgtcagtgacgattttgcgttcaggacgcttgttcaaagtggtgaccatacccacaccacaggcgtcatgctcgttggcgggatcatacataccgtccggagcgtggaccgtgagatcgagcggggctttgaatgtcaccggaatcacctcaattgcttgtgggcacgtaagggaatcgtgcctcttcgttcattgctgttgacacagtaccgttgcgtcatgtcatttacgtttcgcgtgtccatataccgagtcgccataaaagtcaatagtgattctcaagcaattgtttttatggccagttatgggggtatttcgaactttttcgcccgaaatgtctatttggccacacgaaaatacgatacggaaacgtccgtatcgtgaaatgctgcgttgggtgatgttacggattggcggctgtggaccaccctcagtcatgcttcgcatgacagctcccgccagcgggagcgataaatgcgaactgccagtcaacggtaaggttgactggcagttcgcatttatacaaggcgcaatagtctataagcgtttgttgccccgtctggagggtttctcgccttttgatgctggtgccggactggccggtgaccggagcgatgccggcgtgggcggccaggtgggccgcgcttttgaagttggcgatgtcgccgccgatgccgagcaggatgctgcttgcggtcctgacgcctgtcccgggcgattgtggcatcctgtgcatgtctgacaccatagcgatcggcgcgctccgcgaactcaccgaacatggcatccgcgtgcccgacgacgtacggctcatgggattcgacggcatccccttctccgactgcgccaacccacccattagcactgtggcgatagacgtccccgcaatggctcgtacggttatcgatcgcatggtgacgctgatcgagtcgaacctacggcatgaacggcccgatgacatcacccatgaccatatccagttccaggtgatgccacgcacgtcgactctggccgcctgataccggccggcacccttatgagtgccggccttcatccctgaaaatatgggtctatgccacgtacagcgcggcgggatacgtgagatatgaaatttcatcgagctgatcgaccgtcacatatccggctggcgcgttgagcacgtccggaatgcggttgacgattgtggcgcacgtatgttcgacggtcgccggcttgaccacgtggaactccacgtccggttcaccctcgatcttccaatcgcacatatcgccatcatccggcccgtacaccttgccgatacaggcagtttccaacgtgatgccctgattcgtttcggtggttaccacggcggacatgccgatgcatttgccgaccgaaatcgtctcgtccatcgtctcggaatacacgtcgacatcgctgaaatacggcacactggcctgggtctgcgatgcgatggtaagcccaagcttctgggccagcgcttcattggaattccatacatacgagggcaccacggtttcgggatgcgcaagctcggcctcgaactcctcggcggtcagaccgcagccgtgcgctttggccaaagccaggccgtaatcctcgacgttgtagctcaccgcaccggtgatcttcttgatgctgtggcatccggcggcgacggtggagaccatgttcacccagtagatgtcctgcatgccggagccgaccatggtggcaccggcttccttggcgatgatgtcgagacggttcgtggtggccggatcggtggtccacgggtagatgcattcctcgcaggtggtgatcacgctgatgccgcgggccaagcactgctcgcacatggtggcgatttcgttctcgaagctgaatagcgtgactaccgcgatatccgcgtcgcactcgttgagtacagcctcggcatcggcgcgaatcggcacattgatggggccgatgcctgcaaacacaccggcatccatgcccacgacttccggattcacgtcgatggcaccgacgatttgaatgcctttctcgtgcatatagcgaatcgtgtacttcgccattttgccgcagccgtattgaatggctttgattggttgcataccgcatactcctttgcaacagtgcatattggccattggagaagtctcaccgtcgagaccaagccaatagccttaactctaccgacatcaggctgggcattcactgatatcggcggcactggagcgtcgggaagagtcggcgtagcggtaccgctaccgagcagaaggactgggccagtacaggtcctcccgccgaatcacggcatctcggcatccgtcagttcctgttccgccgtatgggagaggccgatgactatcgtaaaaaacacggcatatcagcaacttataactacccttcctgtatccttaatgtacaagccccgtgttgaccgccgtttttcatgtcaccggggcattgcaatacgaggtaagggggcctcgtgattcatgcgttacaatcatccgttattaccaatccgcagtggattgaggagtggctttccgccccgcgattccgtacataccttgacgcttgccaccaagatgcgcttacagccttactttatacgagtggaatgttgaccttggtcaaatcctcgtgaaggatgtcgcctttttcgagatcgctctccgaaatgcttatgataggaacctcgctaaccattggcagaagggtcagcattggctgtttgaccaacaatcaccggtgaatcggcccattccacgccgaacgagctccggcaaacctttcgacgcgaatgctctcagcggccgcgccaacgcctgtcgaacgattcctagccaaaactccatgcccagccattgcgcggtagcatggtgccactcgacttaccatctacttccggttacgcagggcgtggagcatggcgacgaacacgataacgataacgatgaccacagccatgatcgcgtagtcaatctatgcgccggtcacggtggcggcggcatagccggcggaacccaccttgcccgagccggactggaacacggagatcacggtagcccaccacagtggtgccggccgcacccgtgaactgctgcagcgtggagaacatcgcgttgccgccaggaagatgctgcgctggcggaagcgacggcgcagccatgcgctgagcggcacagtaatcgacacgaccagcagatagccggtggcgagccattggatggtggcctcgctgatgtggagcacgcccatcagctgcgggaacagcacattcatcacggtttcggtcaggatgccgaagaatgcgagtgagccgacggccacgatcgcgcagatgagtttgccggggatgcgttcgtcgcgggccgattgcatcgcggcgtctgccgctgagatagtgcccgaggtctggggctgagtcttcagagttaccgattgttcaaaagtcacactgtaacaataacactacggaaagcgattaccataaagcgtgctcacagtcgcccatcatgcggacttttcgaaaactgttgataaatagccattttccacaaggaatccttgcataacactatgatttagaacatctattagtatgacgtaaatcacattacgaactatttaaagtaagcgcttacagttcggcatgggagactcctcgtcacgatatgaatgcgctacagtcactatcgattgatacgcacgccccatcgactacgcgatttcgccgtcgccgtacgcgcgttcggaggcacgcagacacggcttgccttgcaccacttcgacctgcgagggcggcgcgtcatcgccggcacgcttggcctgaatctgttcgaacagcatccggaaggaccgctcccccatgtccaggaagttctgggtgtaactggtcagcgccggattccacatggcaccgaagttgcggtcgtcaaagcctacgacgctcacgtcagcaggcacgcggcgaccaacctcccttagacctcggatcacagcgatggcggtctcgtcgttgccggcgaaaatcgcagtcacatcaccacgacggcccaaggtgcgcccagccttgaccgactcctccaaatcatcgtcgggcacgatgattgggtcaggtaccgtgacgccgcgctccttgagcgcgtcacgccacccattggtgcgggtgttatcggtcggtccttccgggcgccccacatggaacacggtgcgatggccgagatccagcagatgcatggtcatccaacggccaccatccctttcggcgttgatgatctggtattcgccgtcgccgaagctgccacccaccacgaccatcggcatatctttgggaatgtattccagtgcggcgatgccggcccggtcgtactcgtagacgatcacgcccgccggcctgatcgacaaacccatgcgcacacgagccttgacggagtccatgtcggactcatccaaagaaacgatattgagcaggaaccgacgtttacgggcggcggcctcgaccccatggttcgtttcggacgtggagaaggcggaaggattggccgcgaacaccaccacggagtccatctcccggttcgacagggcgcgcgccacaatgctcggctcatagcccagctccttgatggccttggcgatgcgttcacgcttgtcttcggtgacattgacggtgccgttgagataccgggagacggtcggtgccgagactccggccagtctggccacgtccttgatcaccggtcgggtgcggcccgcacttctcgccatccttgtctcccctgttgttgtcagttgttgttgttgcgtacgtcaaggagaaccggcatcaccatggcagtcatccagtcacacccatatccgttcagccgcgctccgacttcggttccccgtttttcgccgcgattcattgtagttcatgacggggaacctatatccaaatcaataacttcgcgaaaaccgtacgctgagttgcggtgagtgtacggtttccgcgaaatcatccctaatttcgtgaagaacgtacactga

SEQ ID NO: 1759 - DNA, 6462 bp, Unknown
  MAG_14  MAG No. k141_25915
acccggtgtggcagaaagtgctgaattccgcggatatcaatcctgctgaagccgcgtggatcaacgagcagatgaaactggcggaggcgcaaggcaagcagctgtacgacgagacccccaccgacgaagtctacgacgaaaggcacgagagatagcgatgccggtgggttcccgacgaggggaacccaccggcatcgtcggcgtcatcgacgaatcacatcagcgacttgtagatggcgaggatgtcctcttcggttgcctgacgcgggttgccgggggtgcacacgtcgttgaaggcgtcgtgggccagcggttccagatcagcctcggtggcgccgacctcgctgatcgtggtcgggttcttcagatccacggtcagcttgtggacggcctgcacggcctcttcgcgcaccttctccaggtcgccggtgtaggcgtcctcgacgccgaacgcgtcggcgatgtcgcggtacttctcgcccgtgtagtccgtgttgtattccatgaccggggccagcagaatgccgttggccacaccgtgggccacgcccagacggccgcccagcgggtgagccatgccgtgcaccaggccgaggcccacgttggagtaggccataccggtgctggaggaggcgtacgccatctgctcgccagccggaatgtcgccgtcggcggacttggctaggttcttggcaatcatgcgaatagtctgcatggacaggcagtcggacaggctccaggcacccggggtaatgtaaccctcgatggcgtgggtcagggcgtcaagtccggtggcaaccttcaggccgcgcggcatggagtcggtcagatccgggtccacgaaggcgacgatcgggatatcgtgcgggtcgacagccccgaacttacgcttgttggcggtatcggtgaccacgtagttgatggtcgtctcggaagcggtaccggcggtggtcggcacgccgaagatcgggacggacgggttcttggtatccgcgacgccttccagggacagcacgtcggcgaactccgggttggcggtgatgatgccgatgcccttgcaggtgtcttgcggggagccgccgcccaggccaatcaggaagtccgcaccggactcggcgaacttggcgacgccgtccttaatgcactctaccggcgggttcggcttgacgttggagaacacctcgtacggcaggccggcctcatccagaaccttggtgaccttctcggcggtgccggtctccagcagtaccggatcagtgacgataaatgccttggtgaagccgtgctgcttggcgacggccgggatttccttgatcgcgccacgtccgaagtatgcagtctggttgaaaatcatgcggtacaccataggggactctccttttgagctcgtgtcttaactggtggtccactctgtctttgagtggtccaacggttccccagtctactccgcggatgagcattcacctgaaaacacgctgaaagaacaacactgaaaataatggcaagaaatggcggaattccgcacttgtcgaattattgtccattgaccaaaccagttcaatcgcccgagatctcaacgataagaccattttccggagtcgcttggtgctctccgagaaactcgtctctcatccgcttacttcgcgcgtacacaatcaatatgcgagatgcctaattccattcgtgtttcatcagccgaacgcgaactggttcaccagatggtgtattcaacggtttcagtctcctgaagaggactaagatacctcgacaattggggtgatcatcataagagaatgaggcagataatggcaaatggcaaggctatgacggtcggcgagatggcgtccctgtttctcaaccccaccactcccgttcgtatcgacgctttcgacggctcgcatttcggcccggcagacgcggatttgaaggtcaaaatcgccacgccgaactgcatgtaccagctgctcgcgcacccgaatgaaatcggcatcgtgcgcgcatacattctgggcgatttcgacgtggacgacattgactacgccgacccgtatccggcgatgcgcaagctggtgtcgctggccaaatacgttcgcccgctcgctcccgcatccattgcccgcgtatccgccggcattctgagtcacggcttcaagaagccgccggtgcccgccaccgagggcccgagcaagttcgcccgcatcaagcgtggcctgatgccgcacaccgaaaaggccgattcggaaaccgtcagcttccactacgacatgtccaacgagttctacgccgacttcctcggcccctccatgacgtacacctgcgcggtattcgacaacgagcacatgagtcttgaagacgcacaggccaacaaactgcgcctgattctcgacaaactggacttgcaacccggccagcgcttactggacatcggctgtggctggggttcgatggtcatcaccgccgcccgtcgcggcatcaaggcgctcggcgtcaccctctccaaggaacaggccgcgtacgccaacgaatggatcgcccgtgaggggctgcaggatctggccgaagtgcgcgtacaggactaccgcgaggtgcccgagcatgacttcgacggtatctgctcgatcggcatgatggagcacgtaggcgtcaagaactaccagagctacttcgaagagatgttccgtctcctgaagccgatgggccgactgctgaaccaccagatcaccatcagccatgacaagcctcacggcaagcccggcaccgacgaattcctcgaccgttacatcttcccggacggcgacctcggcgcgcccggcttcatcgaatcgtgcatccatgacgccggcttcaacgtggtgcatcaggagaacctgcgccagcactatgcgctcaccctgcatcactggaaccagaacctctccgagcattgggacgacgcggtcaagcaggtcggctttgaacgcgccaaggtatggggtatgtacatggccgcctgcgctctgaacttcgagctcgacggcatccagattcaccagttcctggctgtcaagccggatcgcgtgggccacccggacggcaagtggtaccctctgcgccaatggtggcaggcctgactccgtttctgtgggacggcacgcggtttttaccattgttcatctgccgtcccacagaagtgtgggatagcagatacatcaatcgtttgacgtatctgctatcccgcatgacataagccgagaaccgcagaatagagccgttctttgccctcagctctgagggcgttcttcgaacgctgtgggacggcacgtcgaaaatcggcaaaatcacgtgccgtcccacacgattcccttcgcacgcgcatttcgcaggtgctttttctgcaatactgactctatgagcgccacagccccagaaacggctggggcggacgatcgcaccgaccatgacacgcgcggataagacccacgtttctttatttaaccctaacccgatgttcgcattggtgctgttggcgtgcgtagttgcggcgaggaagacagttgttggcgaacgcgagcctttgcattgaccggccagcccgccggagtaggtacgtgacggatatgcaaaagccccgcacaaggcggggcttcattgtggtggctccgaacggcgtcgatccgttgacctagcgattttcagtcgctcgctctaccaactgagctacagagccatgaacagtcaaaaacccggataatccgggtttcataaccattccagcgaccccggccggacttgaaccggtgacctccgccgtgacagggcggcgctctaaccaactgagctacggggccattgttctcacttgcgtgaggcaacagatgtatatattactgaaattcgccggtcgtgcaaatttcggcgtgttccgcgtaatttcaaggtttttgctatcaccagcacacggacacgtctgccataaacatccacaaacgacgaagggcgcgaccggaaccccggtcacgcccttatgaacagaagcacttcacggcatccaccgcaaagcaatcgtcaatctcagtcagcctgcttccaggtgtcgacgtcgatatggtgttcggggttggcctgccaggcatcccacgcggacttgacgatgtcttccacgtcgtacttggcgtgccagcccatctcctcgttgatgcgcttcggggagccgatcaggtgcggcgggtcgccggcgcggcgggccatgacagcctcggtgaacggcagaccggtgaccttcttgacttcgtcgacgatctggcgcacggaggtgccttcaccggtgccgacgttgaaggcgtcgtacttgcgctcgtcacggtcgaggtacttgagggcggcgatgtgggcgtcggccaagtcggagacgtggatgtagtcgcgcacgcaggtgccgtccggggtcgggtagtcgtcgccgaagatggcgggggccttgccctgcttgaggcggttgaacagcatcgggatgaggttcagaatagccggatcttcgagttcgaccgggccgcagccggccacgttgaagtagcgcagcgcgcagaagcggatgccgaacggctgctcgcaggcgcgagccatccactcgccgaacagcttggtctggccgtaggggttgatcggcagcatcgggacgacgtcctcgggcaccacatcgaccggcggcacaccgtaggtggcggcggaggaggagaagacgagcttcttggcgttcttggactgggtcatgccggtgagcacgttgagcatgccgttgatgttctgctggtagtaccacagcggcttctccacggattcgccgacctgcttgcgagcggcgaagtggatcacggagtcgacgccttcggcatcgaggatttcggccagacgctcgccggcacccggggcggcgatatccatgccgtacagacgggagccttcgatgcgggtgggcttgccgtagctcagatcgtcgacgacgacgaccttttcgccggcctgatgaagtgcgtgaacgacatgcgcgccgatgtagccgcagcctccggtgacgagaactgtcatagttgacctttccttatgcgggttgcaagtgtcggccgtgtggagttcagcggctgttcacttttggtccgctttgttaccttttgaaacaatttgagtatatcacacgaacataatcgcacaaaacggtggtgtcgtccggcaatatctgcattcattaggtcgatctggcgttcattaggtaggtcggcccggagccggcccgcacgaacaccgggtaaatggcttgatatggtggttggtatcgcacaccacccacctaatgaacgccaaatcgacctaacgaatgaacagcggtgcggcgcacaaggaaaatccgaggaatatatgaccgatcccgaatccacagcaatcgattccgtcaccgcgatggccgcggaccacaccgaggcaccggcgcaccccctgcacaaggtgctttccttcgtgcgccgctccggacgtttggacgatcgcctgcagcgcgcctgggacaactatgccgacacatatctgttggacattgcggccggcaacctgctggacgtgcgcgaaggcgtcacgctcgaccgcgcgttcgtggagtcctcatggggcaacgacaatccgctcattgtggaaatcggcaccgggcagggagaaaacgtggcggccgcagccgcggcccatccggagacgaacttcctagccttggaggtctatgaccccggtgtggcccacacgctgctgctcgccggcaagcaggggctgaccaacattcgtgtggcccaggtcaatgcgcccgagctgttcaaggtcaccgcgcccggcaccgtgtccgaggtatggaccttcttccccgatccatggcccaagaagaagcaccacaagcgccgcatcgtgcaggaggccatggccggcgacattcatcgcgcgctggtcacaaacggcgtctggcgcatcgccaccgacatcgaggactacgccctgcacgtgcacgaggtgatggacggcctcgatggctggaagaacctgggcagcataaccgtcagcctcccgctggagcacgtgggcaagggcaatgccgacatggccgccgacatgccgcacgccgacttcaccgaatccgagcggttcgagggccgcgtgctcaccaacttcgaaaagaagggcctggccgccggccgcgcgatccacgacttcacctatcaggccgtcgccctgaactgattgcgacacgccgaaatgccgtcgatttgcataaccgaacaacctcccgtaaagtaactcgagttgttcgcccccatcgtctaacggttaggacaccagactttcaatctgacaacgagagttcgactctctctgggggtacccaccggctccggtttccacgaggtatcgtggcccggagccttttgtttccaacggtttcaggccgtc

SEQ ID NO: 1760 - DNA, 4581 bp, Unknown
  MAG_14  MAG No. k141_26089
agtatggcgagaccatcaatctcggacggcaaacccagcatcacgaatcctatcttgcatctcattggcaatagcaatacagcgcgcccgcgaaataccagctttcacaccgacaccagtcaaatccgcaacagtgatgttcttcccctttccgttcaccgaagtagtgtgctcgccgttgattccaggggtttccgttaaatcatatccaggcgacaatctccacgcttggcgagaacgatcatagagataagagaaattcttcgcatgatcgtcgcggtttccgatgaacacgttaaagcatatgagacggtacaaccgctcgcactcctctgcgctgttgcacacacgcatagtcagccgcatcaatagtccgtaatccaaattgggaatacgatgcgacgtttccagcaatccgccggcggaaatcatatgcaccttatgttcggtgccatcgtcatcccgcgtacggtcaaaccgccggacaccaaaatatccagaacattgcgctgatgcgaacagacgagtttccggcatatcaatgccgcactcgcgcgcaagtacagaaatttgatactcctgttctccgatattcgccgagtctacggatgaggggaatttgataatccattcttctccatcaacctcagtcagaattttcggccgcgcgccaccggacgagccaccaagggcaaaaagctgatccaaatcctcagaaaaatcagtttccagaagattcgcgcactctctcgctatatcgtccaagtcagtagctgcaacaccattttcaatgtccgccgctggttcatattccaaggctcccataccgcttgatcccacaatggacagcctcgtcaaggttccgatagagtaagggtctattcctctctgacgcagaagacgatccgtgagcaaacgcccccacccgtccggcatactgtcatcgaacgccccaaacaaaccatgcaatggatctcttttggcgacaaagaccccctcacgcaatggcagactcagcggacttatgctgaatccactggacaaccacgagctttcgtacgagaacgccactgtttttgccggcgacagtgtcagcgagccaacaatttcaccatccaaaaacacccgtacccgatcaaccgataaatccaacggcactgtctcgctcatcgcgcttccctctcccgcgcagcaatgacatcatcgatagttgcatagtacggctgtgaaaacagtgtctcaaaatcctgctcgcaactcagcgcaaacgcgatattgatgagcgccgtcaatgagatttcgtgctgctgctcgaaccgtctgattgagccaagactcacaccggattttctagccagagccgtttgcgacaacttatgctctttgcgtctggcaaccatgcgttcggcaatagcggccgaaacatccccaggcataggctcatccaacaaagaaaacatactaatatattagcaatttatgcctaaaaagccaataattactcatatattagcagttactgattgcggcaaattggtcacgggactacaaccggcgtgtcgcggtagccaccaacttgcgttcaagtggggttgaactgttttaatcgaattgttagcgttcacggccggccatgaagagacggcggtgacgattaatcatcaaggagtacacatgaagtatcgcagcgtcggcaagtcgggactgaagatcagcgaggtcgcgctggacagctgggtcacggatctcaagggcacagcggccgagaacgtgaccaaggagaccgtgaagctcgcctacgattccggcgtcaacttcttcgactgcgcggacgcttactcgggcggcgccgccgaacgattcctcggcgaagtgctcaagcagtacccgcgtaaggaactcgtcatctccagcaaggtctacttccccaccggcgaatgcgtgaacgaccgcggcctgtcccgcaagcacattttcgaaagcatcgaccagacgctgaagaacatgcagaccgattatctggacatgtacttttgccaccgttttgacgagaccaccgaccttaccgagaccttgcgcgcgatgagcgacctggtcgcccagggcaaggtgctgtattacggcgtttccgaagagtggggttcggcccgcctcgaggaagcccagcgcattatcgaccgctacaacctgtacccaatcaccgtggttcagccgcagtacaacctgcaggatcgctatatcgagcatgagatcatgggcacctgccgcaagctcggcattggtatcaccacgttctccccactcgcgcagggtctgctgaccggcaagtatcgcaagggccagccgctgccggccggttctcacgtcacgtgggctgacggatctgcggcttcctccaacgggagcgattgttaagcgccgaaatcggtatcgccttgggcctcggcctgggcgatggcggtttcggcgttttttgctgtttgctcaatgacctggttgtatccggtcaaggccgcgaacggcatgaactgggcggcccgctggcgacgagacatatgcggatgcttgcgtgattggtggtgtggcaggttgatgatgtcgtcgtatgcatgggtttcttgcagggtcatgcgcgatggcctccgatctgacggttgcgagcctgaccggtggcaccgtcttccatatccatggctttgatgacggcgttgcggccgaatttacgtttcacatccagcagcgcacgctggatatcatgctctcgagccaacgtctgtgcggcggcatcgtccccacaagccggcatacgcccgcttccgtcgccaccggattccgtgctatcacagtcatatcgcatatcgccatcatcaccgaacaaatcaagctgctcatagcgtttgcccgccgccagttctttgggcgtggccacatcatcggcaacaactgtgagtcgacgcaccagcaaccgcgcatccacaatacgctcgtacagcatggtcatcgcctcgcgaatacgtgcggcagacgacgtaaaatcgcccaatccaatcgaccccacggccgacttaggcacccgacgaccgaaacggtcaacggtcaccggcccttgataggtctttgccgcgcgttcggcggcacgcctcatcgcccggtctgcgcatgaatcaagcttcgaagcatcgagactgccaatgtcatagccgaccgccagtgtcagccgattcgtcatcacccccttatcgaccagatcgagggcgagcgcatcggccatctccttggcgatcagccgagccgtatgccagtcggcgggcccggtgagcacctgcccgctgctgatgctgtgcgcacctggctcataggatcggatatccgcgatttcgcacggctcccagccccacgcatggtcgatgagcagttcggcattgacaccgaacatgcgatacagcaggtcttcgttgtagtaatccgaagcacgacccaccgagcatcgggcgatatcgcccatggtcatcagaccggcgtgctcaagtttcctggcatagccgcgcccaacccgccaaaaatcggtgagcggacgatggctccagagcagccgacgatatgacatttcattcagttcggccacgcgcacgccgtccttgtcggcgggcatgtgcttggcgacgatatccatggcgactttggccagatacatgttggagccgatgccggcagtggcggtgatgccggtttcatcgagaatttcgcgcacgatggttcgcgccatggcatgcggccccatacccagcgagcgcagatatggcgtgacgtcgatgaacacctcgtcaatcgagtagacatggatgtgctcgggtgcggcgtatttgaggtagatgccatatacctgcccgctgacctccaaatagtgcgccatgcgcggcttggcgatgaccatcgaggctttgagtctcggcgagcgttccaggtcgcgcgcatcgcaggactccccgattaatcggccgccgggagcatggaccgcgcgctcgatgttgactccattcaggcgctgttttacctcgaatagccgcgcacgaccgggaatgccatagttcttcagcgagggtgagaccgccaaacatattgtcttatcggtgcgggtttcatcggccaccaccagatgcgtggtcaacgggtcgagtccgcgcgccgcgcactccaccgaggcatagaaggacttgagatcaatggcaatataggtatgctcgcgttgcgtcgataccgttccgctgcccatcgccatcacctccttaccaccgccggcccgaccagcatatcaatacggtcgaacatttgttcgatacaacatgcctgttcgaagctgccgaaatcgacgcacgcaacgcgcccaagcatgctcttcacccacaccacacgcgcagcggcagagcagcggcagagcagcggcatgcatgcgtaccatggggaatatgaagaaaagcattacggcagacagcgattttgcggcgtgggcggcagcccgatcccagaaaacgaatcgatcactggcaggagcccgcctcgcgattccggagccgcagaagc

SEQ ID NO: 1761 - DNA, 6780 bp, Unknown
  MAG_14  MAG No. k141_26139
cccgctgctgcccgagatttccgaggcgatcaacgccaacgacctgaccgtcaccgccgtgctttccggcaaccgcaacttcgaaggccgcatcagcccggacgtcaagatgaactatctggcctccccgccgttggtcatcgcctacgcgctcgccggcacgatggacttcgacttcgagacccagccgctcggcgccgacgcggacggcaacgacgtgtacttgaaggacagctggcccaccaatgccgaggtcgccgccgtggtcgacggcagcgtgagccgcgagatgttcctcaaggactacgcctccgtgttcgacggcgaccaccgctggaagggcctcgacgtgccggaaggcgagctgttcgcgtggaacgacaagtccacctatgtgcgcaagcagaccttcttcgacggcatgaaggccacgccggacccggtcgccgatatccacggcgcccgtgtgctggccctcctgggcgactcggtcaccaccgaccacatctccccggcaggcgcgttcaaggcctccagcccggccggcaagtacctgaccgagcgcggcgtggagccgaagaacttcaactcttacggttctcgccgaggcaaccacgagatcatggtgcgcggcacgttcggcaacatccgtctgcgcaaccagctgctcgcctccgtgggcgaggaggtgacgcctggcggcttcacctacgacttcctcgccaagaagccgaccacgatcttcgaagcctcccgcgactacatcgacaacaaggtgccgctcgtggtgctcgccggcaaggaatacggcaccggctcctcgcgcgactgggccgccaagggcacggtgatgctcggcgtcaaggccgtgatcaccgaaagcttcgagcgcatccaccgctccaacctgatcggcatgggcgtgctgccgctgcagttcccggcaggcgaatcctatgagtccctgggcctcaacggcaccgagacctacgatatcgccggcgtcgagaagctcaacgagggcgtgacccccaagacggtccacgtcaccgccacccacgaggacggctccaagaccgagttcgacgcggtggtccgcatcgacacgcccggtgaggccgactactaccgtaacggcggcatcctccagtacgtgctgcgcaacctcatgaagtaaccaccttcttggctcccctctcttgaggagagctgtcagcgaagctgactgaggggagcaaggccggtatccgccaacggataccggccttttccatgcatgccaaaatgctatactgtatagcatcttcgaaatggaggttgccatgaccatggtccaaatgaacgttcgcattgatgcgaaactgaagaacgaggtcgaagaagtcctcaagggcaaaggcgtatcggtgagtgacgtaatccggtcgctgtggttgtacatcgccgaccgcaaggaagtgccggcattggaaacgaccgccgaagagcaagcccgcgaggaggaaaagcagcgcaagctgaaactgattcgagaaggtgccggatacgtacacaaggaactggtcaaggccggactgatcgaagaagacaccgacctcatggaaggccttacctacaagcagttccgcgacaaaatgtacgacgagcaacttgatgcgtattacaacatgaagagggccgattgatgaccgacgtttccatgcagcgtattttgctcgataccaacgtactgttggactatttgctccatcgcgatgatcacgccaagatggcggaagcggttatggaacttggcgcgaagaacaacgttacgttgttgtgcgcgtcattgtcgctgaaggatatcgcatacctatcatcatcggcgattcgtagggaattcaaaccgaatgaatcggaagtggagaatttcactcgcggctttctgtcgtcacgggtgccatggcgttgtatcgagcaggtgaaggagatgtgtgacatcgtcgctgtcgatgagtcgacatgtgatagggctttttccctgcaaaaacggcatcgggattttgaagatgatctgatcatcgttgccgcgcaacaatccggtgccaactgtgtggtcacatcggatgccgaattaatcagtcattttcccgaatattgcaaaacaccggctgaaatcgtggcggcactggaataaatgagcgtgtggctcccctcatggaggggagccaccaatgatgtgccggctactgtagcctacttcgcctgtagacggaactgcttccagatgtcgctgagcttctgaccgttgcgtgtgcgcttccacacgtccagaccgccgccgcgacgtcctccggcggcggcacgggccgcggcggtcggagtcggatattcggagccgtcatccagacggagacgaccgttttcggtgaccgtggcgaaccagcgctcacccttgcgcggccgctcccacaccagacgctcgcccggcaccagcagaccagcgtcaatcacctgccggatcgtgatgcgccgcgaactatgagacggccgtggagaggtcttcgacaactcatcgacattctgcttggtcagatcacgggcgtccttgtcataccggatgccccagtattccacgatgagtcggaccgactcttcctgccgcgcctccagcagggcaggtgtgcagtcagcgaaatccttcaactgattggtcagcgggaaacggcgcgaatccgcgcgcaacagcatgcggtcgcgacgtgccggatattcactcaacctgtccaactgatcctcagggccctgcaccagcgccatattgccgagtcggtacatccagaaatcatgctgatcctgcggccagtccgcaaacgatttcgaccgttcgatatccaacggcataatcggcagcgcactgaaccggcgtggtcgatccaactgcatgccggccttctgctcgttggcgcgaatcagcagcagacggaccaaatcgccgtcaccctgcatctcgccatgcaaacggaccaatgcgccttcacggtcgccgtccgagacatgcaacccgttcacgcgctggaccaaatagcccttgtcaagatcacggatggcggcgttcgcataaccgcgccgctccaacgctccagtgcgattcagcgtgcggatgccggtcacctgttccaatgcggtcagaatttccagcagccgacgctcgtcatgggcgcccaacgattccaacgtggccgtggttctggcgatacgcgaggcacgaaccacgaacggcgacaaatcggcgtcgcccagcccgcgatacgaattgaccaacgcccacatggccacgggcttccactcgtggctgcggtaatcgtccaatccctcaagccggctacgcacctcggcgggcagtacggtatcgctggggcgcgcgatgatccgccacgccatcgcgtagggtgccagcacctggttgatgaacgtgggcactgtgcctttgtcgatgtacggttgcagcacgtcggccaggaaatcctcgatgagcttgtcggtggctggcttgtgcgtgagcacgagatgcagataggcgaagaattcctcacagtcatgcggatcgtcgccaagcgggtcaatgatgtcatcccagcgggcggcgtacacgtcaagttcggcggtcgacaggctggccgtggcgcgcgccttgaacacgtcggacggggtgagcggcaggccgcgcatgttcatcacgtcgaagatgcgatgcgcgccgtcgagatcgtcggtggtcacgatgacgagcgtcacctcgttgaccagatactgcgcgaattgctggcgttcggatgccgaccaattggagatctcgtcgtacgtcttgcggatgttggcgacgatgttgcgttgcgcagcggtcgccagatcgtcgtcgttcatgtcgaacacggattcgaggttgtcctcctgcacgtgttcgcggaagaacgccgcgtcgcgctcgcgcaacgtgaggcgaggctcggtgacgatgccgcgcagcttgtcgccgggctccaccagcagcgcgtcgagttggcgcatgaggtccgggtctcgctccagatcgcgcagcacggcgatgatgatcgacagggataccagccgctgctgcccatcgatcacgtcataacggttgtcgccctcgcgcaccagaatcagcgagccgaggaagtacggggtgccgggtgacttgcaggcgtcgtccaagtcgcttaccagttgcaggatgttctcggccttccatatgtaggcccgctggaatgaggggattgtgaaccggaaatccggggtgaacactttcccgagtggtagttccttcgcgctgattgccatgtcaatcccttcgtcgccggcctttggacggtatgccgacgtgccgactgtgctcaagcctaccagtgttcgcccggcggcgggcgcatcacgccggctcgggcaccgacccctcgtacaagtagaacgaagatgggttttctcccggcccggatgcgggcagtgactgctcgcacacctgcgtcaggccgcgatgtacatagaatccgacatcgcacgtggtatccgtgaataggaagtattgacgtatgccggctgcgtggaatgcgctcatcatcgtctcgaacatgcgccggcccagaccgtgaccgcgcgccgccggatcaagtacgaacagcaccacttcagccgaatactcatggccaatgttcgccgcctgcttacgcagttgcctatcgacatgaagagtcccgagaatctcgctcgcagctgccatgccgtcgtgggcaaacgccagttgcaatagcttgcgcaacgaatgacgccggtgcatgttcagcgggctgcgatggtcgagctcgtcgatacgccccacaatcaatgcgacgggtttatcttccagctccgcgacaaaggccgtggtcacacgtgccagacagttctcccaatcggcctcggctgccagcaagccggtccgctcatcatattcggcgtaccaagtgcggcgcaccaggtcgatcagcgccggataatcgtctttacgtaacgttcgaataatcgcttcactcatgttctccattatgactgatatggctcgataacccgacgtgttacagtcgcgccggcaaatcggcccgctccaccagcctcgccatctgtacgcggcccatattgagcttgtccgccgcggaggagagatgcgccttggccgtacgctccgagataaacatacgggaggcgatttcggcgttgggctatgtgctgcaagacgattcgccgattacggtgtatgtcacttcgttcctatcaacggatcaagacaccaaggtgacgcatgccttcacgttgcagtgaatcgcgcggcggtccaagctgcggtcgaatgccaatcgaatctcaagtgcatgccacgcgcatggtggaaacgcccgttacgctttgcgatgagcagaacgagccgatcgatcctattcatggaatgttcagctttgttcctctaagattggtactggaacaaacgctaaaggagcgattatgacattcggtcagcagccccagaacaacgggcaatacaacccgcaatacaacacgcctgattacaacgccgcccaacagtctggatatggccagcaatacgcacagtccggttacggccagaactactatgcccagccgcagggcgcccccacctaccagtacgcgccgcaggatgcggccggtgccggcgcgggtgccgccaccatcaacacgacgatgacctacaactacgaggaggcccgccgcgtctccgtagccaaggtgtacggcgagatgaccattggcatcctcgtcaccgccgtggtcgccgtgctcggccagatcaccggagcctactacagcttcctcatggccaccggcatggtgggcctcatcggcctgtgcgtggtgcagattgccctggccgtggtgctcggcatgcgcgtcaccaagatgaagtcggccactgcgcgcgtcatgttctatgtgtacgccgcattgatgggcttcaccttgagctcgatcttcatggtctacgacctcggctcgatcggcgtggcactcggtgtcaccgcagcgttcttcttcgcgctgaccatgttcggcatgactaccaagttcgacatgctcaaggccggcccgatcctgatgatcggcctgatcgtgctcatcatctcgcagatcgtgctcgccttcgtgcaggtcgacggcatgaccaagatcgtctgcgccatcggcctgatcctgttcgccggcatggccatctacgacgcgcagtccacgcgcgcgctgctgaccgaatacgaggcccagggcccggaaatggtcaagaagatctccatcctgtgtgccctgaacctgtacctcgacttcgtgaacatgttcctgtacatcctgcagctgctcggcaacagggactagcctcgccagccgattggtgggcggcatgtagcctgctcgtcaaacgtcacagcccgaccacattgtggccgggctttttcatgtctgtcacattcgcacgttaggctgtctccccgtgaaaagacaagaactcgtaggcatgctgagcctgttgttgaccgcgctgatctggggttttgcgttcgtggcgcaggtccagggcatggatttgatgtcgccgatgttcttcaacgccacgcgcttcacgctgggagcactgtctttggtgccgattctgctgtggcagcgtggccgggggagcgcagataagggcgatacagccggggtcgatgtcgttgggac

SEQ ID NO: 1762 - DNA, 10339 bp, Unknown
  MAG_14  MAG No. k141_26458
ccgcagggtgccactgctgatggtgttgccgccgcatggcgtgcgggggcacaggttgccgacgtggagttctaccagttccatcccaccgccatggccgtgggcgagcacttcctcgtctccgaagccgtgcgcggcgaaggcgcggtgctgctggacgaacacggccaccggtatatgaaggacatcgatccgcgcgccgaactcgcaccgcgcgacgtcgtggcccgcgagaacttccgcgtgatgcaggcgcaaggtggcaagcccgtgatgctcgacgtctcgccgatgacccgcgagaaccccgacctagccagcttcctggcccaccgattcccgaccatcgacgcctatacgcgttcgcttggcttcgactggagcaaggagccgatcccggtggcgcccgccgcgcactactacatgggaggcattcgcaccgatctggacgcccggacctccattcccggcctgtacgcggccggcgaatgcgcccgcaccggtgtcatgggctccaaccgccttgcctccaactcgctgctcgaaggacttgtctacggacgccgcgccggtcttgccgccgtcgcggacggtgacgacgcggtctgggcacccgaaccgttcctgaactccgccaccggcgaagcattcacgcataagccaattgcattgaagaccccggtgctcacagatgatgctgcagctgcaggtgtgtgggatcgcgcccgcatccaaaacaccatgtggcatggcgtcggcgtactgcgcgacgaggccggactgaaaaccgccatcgccgaactcggccaaggcctcgccgccgcaaacgcccaggctgatataaacgccgatggcgctgcaagtagcgttgaggctttggagaaccgcaacatgctcaccgtaggctatgtggccgccaccgccgcgctcgcccgcaccgagtcgagaggcgcccacgcccgcaccgactacagcgagccagtcgacaactgggcccactccgtcgcctacatcaaggactgacccatgctcacatcacacatcatccgcaccgccgtcgaagcggcgctcgccgaagacgcgccctacggcgacatcacctgcgagaccaccatccccgcggacgaaaccggctcggcccacctcaccgcgcgcgaaaacggcgtgatgagcggcatcgacgtgttcgccgcagccttcgccgcgcagaacccggccgtcaccgtcaccgccgccatcaaggacggcgaacgattccagcgcggccaggtactcgccaccgtggaaggtccggtacgcgacctgctcaccgccgagcgcatcgccctcaacttcacccagcgcatgagcggcatcgccaccatgaccgccgctttcgtggacgcggtgaacgccatctacggcgacgactatgacggacccgtcacccggccacgccgctatgagcgcacccgcatcgtcgatacgcgcaaaaccacgcccggcctgcgcccgttcgagaaatacgccgtggtctgcggcggcggccacaaccatcgctacggactgtccgacgcggtcatgatgaaggacaaccatctggcggcgctcgccgcgcgcggcatcgacctggccggcgcgatccgccacgtgcgcgaacaggtgggccacaccacgcatatcgaagtggaagtcgaccgccttgaccagattcccgccgtgctcgccggcggagcggacaccatcatgctggacaatttctcgctcgacgacacccgtcgcggcgtggagctcatcgacggcaaggccatcgtggaagccagcggcaacatgagcctggagcgagtgccagccgtggccgccaccggcgtggacgtgatctccgtgggcgcgctcacccactcggtgcgcagcatcgaccttggattggattggaactagtcatggccgatacccccaacgcatccggtgaacccggcgaactgtacctggacgccgccgccaccgaaccagtgagcccggcagtcatcgaggccatgaccccgttcctgactgaggcctacgccaatccggccagtgtgcaccagcccggtaaaaccgcggcccgcgcgctggacgcggcccgcgcatcattcgccgcggcattgggcggccggccggatgacgtgatcttcacctcaggcggcaccgaatcggacaatctggccatcaaaggcatcgccatggcgcgcatgcgcaaactgggcttgcggccggtctacggactcgacgaaaccgatggcgaacagctggcaagcagccgcccgcgcattatcatttccgctatcgagcacccggccgtggcccaatcggcggcatggctgcacgaatggttcggtttcgaagtcgtgcgcattcccgtggatgcgcaagcacatctcgatctcgacgcacttgaacgcgagctcgacggcgaggccagcgaacgtaccacgatggtctccaccatacttgccaacaacgaggtcggcaccgtggaacccgtggaggaactggtccgcatcgcccacgcgcacggcgtgcccatccatgtggacgccgtacaggccgccggccagattccgattcgttttcgtgactgggatgtggacgccctgtccgtatccggacacaaattcggcacgcccaaaggactgggcgcactgctggtacgcggccgcacgcccatcgaaccggtgctgtccggcggcgggcaggaacgcggcctgcgctccggcacacagaacgtggccggtgccgtggcgctcgccatcggactcaatgaatcgaatgcgcgcatgcaggcgcagtaccgtgaattggtcgcgtcccgagacatgctcatcgatgcggttcgccgggtcgtgccccgcgtcgacctgaccggcgaccccgtgcgccgtctgcccggtcacgcctccttcatcttccccggcgtcaccggggaagcgctgctcgtcgacctggacgcgcgtggcatcgctgcctcatccggctcggcctgcgccatcgggcgccacgagattcctgccacgttgctggcgatgggcctcgaaccgtccatcgccaaatcggcattacgcatgaccttccgcaagccgctgacccgcgaacaagtcgaacgcatcagcttggccatcgaagagtcctacaccgacctgacccgacactaaatctgacgccacttaccagaaaggaaacgacgtgagcaccaccactccagcgcaacccgcgcagctcacccgcaacgagcgcctcgaccggctgcccttcaacaaggcgcaccgtaaactcctcgtcgcctccggcatcggctgggcattcgacgccatggacgtcggcctcgtttccttcgtggtcgccgccatcgcagccgacccgcacttcaacctcaccccgaccgaaaagtcgtgggtgctgtccatcggcttcgtcggcatggccatcggcgcggcggtgggcggcttcatcgccgaccgcgtgggccgcaaaaccgtgttcaccgccacgctgatcatcttcggcatcgccaacggcgccatggcgctgtcctggtcgctcggcatgctgctcggcgcccgactgatcatcggactgggcttgggcgcggaactaccggtcgcctccacgctggtctccgagttttcgccgaccaaacagcgcggccgcatgaccgtgctgctggaatcgttctgggccgtcggctggatcatcgccgccataatcggctacttcgtgatcccgaacaccggtgactggggctggcgctgggcgctggccatcggcgcgctgccactgctctacgcgattgtcacccgtgtgcacatcccagaatccgtgcgattcctcgaagccaagggtcgcgaagacgaagccgaaaaggccgtgcgctacttcgaggaagccgggggagtggccccggtaacctctcccaagggcaagccgctgccgaagatcaagacgcgcgagctgttcggctccaagtacctggcccgcaccatcgccatctgggccacgtggttcttcgtgaacttctcctactacggcgcgttcacatggatgccgtcgctgctcgccgaccagttcggctccctgaccaagtcattcggctacacgctcgccatctccatcgcccagctgcccggttacttcctggccgcctggctggtggaggtctggggccgccgcaagacgctgagcatcttcctggccgtctccgccgtggccgccttcgcgttctcgcaggccggatcagtggccctcgtgctcgtgttcggcatgttgctgtccgcctccaacctcggtgcgtggggcgtgttgtacgccgtgaccccggaaatctacccgacccgcctgcgtggcgcggccgccggtgccgccgccgcggtgggccgcatcgccgccatcatcgcgccgctcctcatgccgtggttcctgaccctgtccggcggcaacaaggccgtggccttcatcatcttcgccgccgccttcatcctcgcctgcatagcagccctctgcttgcccgagcgcaaaggcctcaatctcgaagactgattacacttcagccttcgctactaaagtggcccacaccaatgtgtgggccactttttgtcttatagctcccgaatgacacggcaagggttgccgtatgtcactgatcaatcgagggaacgacgggtgagattgcgcggtggttttgtgaccagccacgccaccagcagtccggttaccactacgccgaatgccagcgccgcctgcaatccccagatcggcacggtttccagccaatgaccgtccacaccgatcctgcggttccatgccacatgcagccatcccaacgccacgccggataccacgcccactggcgcgccggccagcagaatcaccgcagcctgcgtcaggccgtaacgtctgaggaatcggggtggcgcgcccacggcgaccatcgtggccatgtcgcgctgggcctgcgtgcgggccagcagcagtgaaacgagcgtggccatcagtgccagcaatgccaacaggccaatgggcaccaatgccatattgtcaccccacggcaggcgattcccgtcagtgctcgtggatgccagcggcagattttcgattgcataagctgaggccttctttacggtaacgggggagttgccaccggcgaagtctagatactcacccagatactgcaattgtttgatgccgagcgcctgtgctgttgccgggcccatcaccagcgggtacgcgccgcgcacgtagatggccttgcgcttctcgatatgtgtggcctgagattcgtttgcaattgccggattcggcgaaatggccacacgcaccatacctcccgcgtcgattgtgccggcatcgccgaccaccacaccgcccgcatcaagcacctgtgccgcctcatccgcgttcgggaagccggacaaacgcatcgcattgccatccataatgagattcacgccgcggaaactcggcagtatattcgaatacgttggctgatgggatcggtctatcggcacacaacgtatcggaacgtttggatacagggccgaagcggcatcctggcccacccatgtggacgtgtccggttgctcttggatcgttgggttatcacaagtgtgaccggccgggagcaatgcagcggcatacatgtagccgtgttcggcgttcaacttgtcggaatcgacttcggtcgtatcattgagctttgaccatcgcttgacatcctcggtgtacaccgggtaatgagcgcgtatcggcgtctctttgccaagccggtgtatcgcatccgacaccacagcacggtcgaactcattgctgacatgcacgtcggccccaatggccatccccgacggtccatacgtcatcgtcatcgtggaatttcgctggtccgccaccatggagccggtgattaccagtgtgtacgaggcgatgcacatggtaatcagcaccgcgcatgccgccggaacgaaccgtcgatgatgctcggctgcatccctgagtgccaggcgtgcgccgatgttcagttgggaacccgctttgccgcaccaccgtgcaaaagtgcgaatcgacaacgcaagccctatgacagccaacaaaatcgtggcaacaagcagagccatatgcgtttcggttccggccggaaccgcgcccggattgtgatcggccagcgtgggcaatggcaatgtcagactgagcgcggcgcatacgatggagaccaagaccagaatcggaccaaccgcaacacggagcagtctcaaaggattacggcgaagcttcgtatccacgccattcgcggattcaccgtagccgatttcctctcttgtcgggcaatccttcaacgcatcgactggatgcatacgcgccacatgccgagccggcgcaatcgtcgcggcaaatccaatgatgattgccgtgacaatacccatcggcagcgagccccacgagaatccgtgcaggatctccagcggcgtggatccacgcaatgcgcctatcgcagggccggccgccaaggtaagcgcgaatcccaatgccgagcccagcacgccaccgatggcgccgataacgagaccttgcgaggaaatgattcgactgaggtcacgtggtgcagcaccggatgcggccgcgagcccaagcacacgacgtgactgatctgccgacaccgtaaacgcgggcgtgaccagaaacagtaccagcaacatacccaccagcatggtgatgaccacagtgaccatgtggttcaacatggtagccgcatcgatctgcatcgggtagagctgcgatgcgggcggatagccgtcagtcagcacatggcgggaaatgacgatggcctgcaacaggttcatgctgcgggtgtgcgcccacgtgaccggctctggaccgaccaccaaataatggccatccacgccgacgccatcagattccaatatggctgacatccagccttccaagccccatgccgcggcttcggattcatcggtcagcccgctgactgtcccagcacgctgagtgtcggccaccgcctcgccgatgcgcccgtccaggctcatccagccatcgaacggcggagcgacgaacgtcaccgtgctaccgagagaagcgccgagattatccgccaatgtgcggctgatgacaatctgcgtattattctgcggcgccgaacccttgaccagcttcggcaacattcgttgcaatgcctcaggtgaagcctcggtcatggtcgcggtggaggccgcgttcagatcaatgtcgttcccgcttttcacgtcgatcccagccttggtctgttcgccgggttgcaacgcggtgccggtgatggcgatgagttcgggcgactgccaatacgggagcagccgatcctgttgcggcagaatcttcgcaagctcggcggccgaggccggctgctgggagggatcgtcctgccacgtgccgccgctttcgggtgactgccggaacggttggccggtgcggggcctggcggtggcggtgatgaccgcctgcgtatcagccgggattgtcgccagcgcacgcgatctggtgggcggtatggtggtggtcataccgatggaggccaccattgcggcgattggcagcattaccagcagcaaggacagtagggtgcgggccttgtgccgtagtgcgtcgcgccagccgagtcgcagcgcggcccgataccggttgcaacgtgcgccaaggcttggcctagcggcatggggaatttgggcagagcgaccgacggtggcattggcaagattattgagggctgcgcgtgccatcatgctcccctttcctcaaggttgagcaaatcatccatattgctggagccggtttcatcgatgatacggccgtccttcaaaaacaccgtgcggtcggcccaggcggcgaagcgaggctcatgagtgaccagcagtacggccgcgccgcgatctgcgcgggtgcgcaacacttcgagaatcgtcatgccggcattggaatccagagctccggtcggctcgtcggccagtagtagacggcgtgggccgaccagtgcgcgggcaatcgccacacgttgcgcctggccgccggacatgtcttcaggtcggcgatcagccatatcggctacccccacttcattgagggattgcatcgcggcctcacgtgccttgcggggattccagccatccaattccaaggggaacgacacgttctcggctgcgctcagggaaggcagcagattgaaatcctgaaacacgtagcctatcgatttgcggcggatggccgcgcgttcggccactgacagtgtggccagatcgcggccttcgaccagcacgtgcccctgcgtgggcacatcgagcccgcccgcaagattgagcaaagtggatttgccggaaccactggggcccatgatggccacgaattcacccgggcgaagcgtgagattggcgtgactgagcgcggtgacacgacgtgcatctttgccgtgaacgcgagtgacgtcgtgtaattccagcgcgcatggggaagattgcgggagagaagaaagaacgggagaagtcatgatgtgctcctatgcactattgaatggtggcggtgagtgcggctgagcttgccgtgagaggtgccgaaacggggtgctgcgccagttgtgctcgcagctgggtctcatccacggtatcgagccagcgcaattccgcttcagtgatgaaaatatggtggtcgagtactagacgtgtggcgagttcggtgggcggtgtttgccggcgcagtcgggtgatgtcgtgcagcagttgctgcaaagcgtggcgttggtgttggatgagttcggaaacatcgaggccgggtatttccacggcgacggccagcttcatcaccagttcgtcgcgtccgcgttgttccggggtaatgggggagcgccaccatcggtcaagctcttgggcgccggaattggtcaatcgccataatggtgcggccgctgcggtgccgacatcattggatccgctagtagtcggcgcggtctcttcaatcagtccgtcgcggttcaaccgctgcagcgtagtggaaacttgccccatattgagcggccaagtcagaccgatggtgcggtcgaagtccttcttaagctgataggcgctggccgggcctcgctccaacagtgctaatagcgcttctctgattgccataccgcatcccctttgcatagacggtttgccttgggcgaaggttactgagtaactatcgttggatatcaggttactcagtaactacccatgacggtgctgtactcagggatgattcaggggagattcaggggatacacttgcgcccctcagttgcccacggcgacagctcccctcagggaggggagtcgagagtgtggaatacaaaaagtctcgcaagccagatgacatgtgactaattctcagaaagccgggcccgttgtgtgtcaaggtgtgccagtaacatcgtgacggtttgtgtgtaggtacaggttgatatccaagagcaagtactcgagaacgcaagtaccgaacgattacgcaagaaaatcagtattaagagaggtttcgatggcggttcgtggagatatccgtaatgtggcgattgtggctcacgtcgatcacggcaagaccaccctggtcaatgccatgcttcagcagtcccacgtgtttagcgagcgtgaggaagtgccggatcgtgtgatggattccaacgatctggaacgcgagaagggcatcaccatcctcgccaagaacacggccgtggaatacaccggtccgctggccgccaagtacggccacccggagggcatcaccctcaacatcatcgacacccccggccacgccgacttcggcggcgaggtcgagcgcggcatctccatggtcgacggcgtcgtgctgctcgtggacgcctccgaaggcccgctgccgcagacccgcttcgtgctgcgcaaggccctcgaagccaagctgccggtcatcctgtgcgtgaacaaggtcgaccgccccgacgcccgtatcgaagaggtcgtcggcgaaacctccgacctgctgctcggcctggccgacgacgtgcagcacgagggcatcgacctgaaccttgaccagctgctggagatgccggtcatctactgcgccgccaaggccggctacgcctccgtgaaccagcccgccgacggtggcctgccggacaacgacaacctcgagccgctgttcgaggccatcatctccaccatcccggcccccgaatacaaggaaggcgccccgctgcaggctcacgtggccaacatcgactcctccgacttcctcggccgactcggtttggtccgtatctacaacggcacccttgagaagggcaagaccta

SEQ ID NO: 1763 - DNA, 4818 bp, Unknown
  MAG_14  MAG No. k141_26497
accttgcaggtgcccgccaacctggtgcgtatctcggtcggcatcgaaaacgccgatgacctcatcgccgacctcaagcaggctctcgaccgtctgtgacggagacgctgcgagccgttctcggaacgtaacttcggtgattctccgtttcaaggggttgttgcccaagtagacaaggcgtaaaaacggcggaatggcgttggcgttatgctgcggatactcgtggtatggaggatgaccagccccttgaaacggaagtagacctccggaacggtcaaaatccgcccctcgaaacggagatagacctccggggcggggcgcggatgtttttttggacggctaggcggccagcccaagatgtttgcggtgttgcgcgaggtcatccagcctagtgaatcttttcccccgaaatggaaatcaggccccaattctgatgaggtgtagagattacgcgcgaagcggtacacaataggaagcatgaatacttgtggtttggggcatgacgtggtggatgtggccgcattcgccgaacagttggcggagccggggtctcgcatgcgtgctctgttctccgtgcgtgaggtgcggcaggcatccgaccgcgcgcgccagaagaatgatggggaggccgtccatctggccgccaaatgggcgggcaaggaggcgttcctcaaagcctggtgcgattatcttggcgatgccccctatccgttcacgcttgataatttcccgtggcctgaaatcgagatcttggacgattcccgtggtgtgccgcatgtgtctctgggtaagggggcggcgtcagtcttccaaactgattacgcgaattcggctgccggcgctcgctattcctctgcttattcccctgcttccgataacgggccttatacagtgatgcaggagcggcggaatgcgcgttcggcgcagcgctcgactctcggtgcggggtcgatgccgcatatccatatttccctgagccacgatggtccgattgcctccgcggtggtgacgatttctgtggaatagcgcccgaggcccccgagtgctacatgctgtacaacgtctccatcatggttaacctgtggagcgcgctcaccggccgcgacgtgcgcctgctcaagaaccagatcgacaagctcgactcgctgcccgaaaactgctggttcgtgattctgaatgcgatgggcgccgacctccaaccatacgagtcccagctcatccatttgtgatttcgacggtttccagctcccctctttgaggggagctgtcgccgtaggcgactgaggggagtcctcggcaaagccacaatccatcaactagattggctggtcctgctgcagccacacgcgtttgccatccccgaagaaatatgtataataactcaagtcgccaaaagcgacgtttaacgcggatgtagctcaatggtagagcctcagtcttccaaactgattacgcgggttcgattcccgtcatccgctccactatttatatgttggtgtatctaattgggaataccggaagggtgagctaccccgagtagtattagtactcatggtgttgagaatcgacgaagctgaactgcgtgccaagctctttgagcacaaagagcagattggtttcgggccgattgccaatggggtcgtcatcatcatcgaaggattgttttacattcctgctgctctcacatctggactcgaccaaatgtttcaaggattgctccttgcattgagcattatcttcatattctatggagtatggagtttgattactgcttgcagaaataagtatgatgccataacactgtatgaggatatcgccaacatggatagaaccgaacgaagaagctcgatcattgcggtgaaagatgctaaccgatatcttctgtatcgtgatttaggttggggatgcgactttttccctaatcatgcaaccgcaagcagtactgatgaggatgttcgtcagctgacgacgtattttgccgatgaattcgaaattcctgctaaagactttactctgtctcacatttgtgtgaaggattctgagaagccatccacggagcatgatggagagattcgttattacgaatacacgctataccgcgctagcgtaacggtaatgcctgacgcctggcgttccactgagttccatgttggtgccaaggactgccgctggatgactcttgatgagatgcttgccgaccccggcatcaacaaaatcaatcatgatgtcgtcgcgatggtgcgggataacttgtaattgttgccacttcgggcatatgacgattgagccaaagcatgttctatgtttcgataatcatcaaaagcagagcatagtatgctctacggggatttttctataccctgaaaacaccgaaaatcaggatatagggcagtagcacgaattagccaacagcggcttgtctgcgggcaataatgacgttgctcccgcggattcggataaggagaatcgtagcgaggatcatggtgagggccatggcgagtaatcgatcgtatcggagacttgcccaacacgcacgctaagatgggcatcgcaataatcggcaatgagcaggtaatcggcgaggcggtgcatggagcaggaatccaacgagcaagaacctaacgaggcgacggaaatcgtaggcggcaaagtagagaccgtcgaggtttccaagcaccccgaggcttccatacccgagaccgatttgtctctggcggatatcgagcgccgtcgttcgcatccgttgcgttgggcgctgattattcttgccgtactgtgcgccatcatcgcgccgtactggttcggccgttcgttggcggtaaataatactgactccattgtggccgtgctcgggggagtgtctccgcaaggcatcgcgctggtcggttgggtgaccgtggtgattgcgtacgtcggattggcgatggcggtggtcgtctcgccgtcctggccgtggttgatcgtgttcgtgatcgggttggccggcgagcagttcatcgcgggactcagtatgctcaatctcaatttctggtattccacgtacgtggtctacggcaagcaggccggcctggcgaatgccgcgaatctgggcattatgggtgcggcgatcggcatcgccgtatatgccctgatgttcgtgggtctgctggtgattatccggaagacctcaccactgaacgtactgaccaaaagctgggcgagcttcattctgtacttcgtgattgaaaccatcgccctgctcgtggtgttgtttggcggattgctcaccactgtgtgagcgcgtgtgccccagtccggcccctgccgtatagttttcatttggcgtaatttcgcccgcggatagagagcgtttcgagcgaacctgcacgaaacaccgcgcaacgacacaataaggaggacgccgtggcactgacggctgacgagaagacccagattatcaacgagtacgcgacgcacgaaggtgacaccggttcccccgaggtccaggtggctctgctgtccaagcgtatcgccgacctgaccgagcacctcaaggagcacaagcacgaccaccactcccgtcgtggtatgcagctgatgatcggtgaccgtcgtcgcctgcttgactacctcaagcgcgttgacatcaaccgttaccgttccctcatcgagcgtctgggtctgcgtcgataattgaagacttccgcccgagtacctaggatggtgctcgggcgttttacatatcgccagccaacggcaacaacggcaagagggttagaggataggccagcaggtaaggccgacaagagaacccgaatgaaggggttgacacgaggaacgacggccaaggggccagtcgaaacaaggtatgtgacgtccgctgaagaggacagttgcggttcaagcgagtcgccaaaccgcagcacagtatgtaggaataattagaaaattaaagaaggaggaaccctatggagggtcccgaaatcaaggccgttgaggccgtaatcgacaatggatcgtttggcaagcgcacgctgcgcttcgagaccggccgcctcgcccagcaggccgatggcgctgtggccgcctacctcgacgacgattccatgattctgtccaccaccaccgccggttccagcccgaaggagaactacgacttcttcccgctgaccgtcgatgtcgaagagaagatgtacgctgccggcaagattccgggctcgttcttccgccgtgaaggccgcccgagctccgaggccatcctcgcctgccgcatcatcgaccgcccgctgcgcccgctgttcccgcacaccctgcgcaacgaagtgcaggtcgtcgagaccgtgctcgccgtgaaccctgatgacgcttacgatgtcatcgccctgaacgccgcctccgcctccaccatgatctccggcctgccgttcgaaggcccggtctccggtgtgcgtctggcgctgatcgacggccagtgggtcgccttcccgcgttggagtgagcgtgagcgcgccgtgttcgagatcgtggtcgctggccgcgtgatcgagaacggtgatgttgccatcgccatgatcgaggccggtgccggcaagaacgcctggcacctcatctatgacgagggtcagaccaagcccgatgaggaggtcgtggccggtggtcttgaagccgccaagccgttcatcaaggtgatctgcgaggctcaggacgagctcaagaagatcgccgccaaggagaccaaggagttccagctcttcccggagtacaccgacgaactgtacgcccgcatcgacgagatcgcccatcaggatctgaacgaggcgctctccatcgccgagaagc

SEQ ID NO: 1764 - DNA, 3730 bp, Unknown
  MAG_14  MAG No. k141_26617
cgccgtaaccggacatcagggcgttgcgcatcgggaacgactgcttggtcggctgggcgccgggccaaaactgcgaaagcaccagccctcgttcctcgatctcatgctgcaggtcacgattctcggccggatactgccggtcgatgccggtgccgatgaacgccacagtgcggcctccatcgctcaacgctgtctggtgggcgaaggtgtcgatgcccttggccaggccggcgacgacggtcagtcctcgttcgaccagcatatgagcgcaatccacggcgaagcgcgcaccctcgggagtgcaatggcgcgaaccgacgacactgacacccagatcatcggccttcagatcgccgctggcaaacaggaacggcggtacgtcgatggtggcgcgcaaccgttcgggaaacctcgtgtcgaacaccgacacgaaatcaaagccctgactacgccaatcttcaagattctgaacagattcgttccgagcgtcctctagctgcctgacctgttcagcactgagtccgacgtcatccagcaacgtgccctgcatatcgtcaccatcggcatcatcacgcaacagcggatgcgatgagggatcgatcttgtgcagaagcaagcgttccgcgctgccttcgagcacacaatcgttggcaatggaagtccaagtgtctggcctctcgcaagtcctgagcaaagcaatcagcgcggagttttcacgcatgagttcagcatgatccatgacgcacctccgttgttccaatcgtttccatctctacgacagaccataaccgtcatccagtttaggcacgacgtatgaaagctgatatgatatttatctttttcgcaccatttacggacattttgtgcgactacgttgtcggccgacagataccggacaatgttcgaaccctctgatttgtttccatcctgagcaaaagatgctggaatgtcagtgactcaatcagcagcgacgcttgaacagcgtttactagcttcgattaatcatttcataaagtgtcggggaaggtggagggagagtcggtgcttggcacatcccacgatggggctgagggagacggttgaggtgtgggctgagggatgacgggagatgctggcgccgagtgagtggtgttggttgatggctgccgctggatgggcgcggactgtgatttggatgtcccggaaggctcggctggcgcggatggcgtttcttctgcttgtttgatggcgtcggagagccgctgggtgagggcattgaggtcgcctgctgcttttcagggtagtgatgtcggtggtggtgtgcagggtgttgcgggcggcgtcgagttgggatccgagcgatacgcgcgtctcgttagcgctaacgtcggtgttggcctcggcgcgttggtagaggtcttcggcttgggtgatggcgtcggagagcttcgtctcggcatcggtgagtctacgttcctgttgcgattgttcgacggcggtggccgccttcgagagttcgtcgagggctgtcttcgtttgcttgttgcgcgcgtccgcagtgtgggcgctctcttcgagatgtaccgtggagaggtccgctgcgcagtgaggaatttcgttcgtcacgtgatgttcggccatcttgcgtagggagaccagtgcctcgggatcggtcacgtcggtgtcacccaatgccagcaatggcttggcagcgtctagggctgcgttccattgaccgtatagcttgtttgattgttggattgcttgattgcatgatgcgagtgcctgcgcatggacatgacgttgccccacgatgatggtcaccgatgccaggacaccggccaggatgatgacggcggtcagggctaggatacgtgcccacgggatgcgccgacgcaccctgatgggtggctcctcggtttcgtccgccgtcgaatcgccggtgaatacttcttctgcctccgacatgtcggagacggaagaagatgctgtgctctggtcaggggactcggattccgcgattgccaaggaatcagaggcagcggaattgcccgatttatccgattcgtccgtttcgggttccttttcctcccataggatcggctggatggcgcggagcctccgtttgcgaggtgcgcctgtcggcggttcgggtggcgctccggctgccgaggggtcgctgagcgtgagttcggcccattcagcgaaatcaggccatgcggccgggtgccgaggaacttggtcgagtaggtcccagtgctcggggtcggccatgaggtcggcgagctcgtggggatcgagccgtgggttgatgcgtggcatgctttccgctcctttctcggtgagggctgtgggtcagtggatgtaggtgatgccagggttctcggcttgctcgcgtgtcagcaggcgtgcccaggcgcggcgttggccgccgccggattcgctgatgaggatggagccgtcctcgtggatttcctcgacgatggcgacgtgcccgtattcgccgctggcgcccagcactcctcgctcgaagctcatcacgtcgcccagttggatggtgccgccggtggggtatccgtgttgctcggcgctggccgcccacatgtagccgtggcccatgtaggggtccaccggtttgccgatctgttgccgtcgggcggcggcccaccaggtgcattggcccacgctgtacgagttgatcgaggccacgggcacgccgctggcgtcgatgtcgatgctggtgccatcggcgaccaggggcgggctgaggttgccgatggtggctccggccgtggtcgagcatgagccgccggcgttgatggcgggccgcacttcgtccagatattccttggtgctgttcggaatgtcgggatatttcattaggttgccttcgcccgcgttgtgcgcgatgaccaaggcctccaggtcggatagccgggcgaattgcgcgtcgggatggctggctttgagctgtctgacgccttcgagccggttcttgagatatatgccgccgtattgggcgtggacgtttggatcggtgatgccttggggcggggtctggtccgcgccttcgggatgcacgccacgccacacgctgcggttgagctgcaacaggccccaggtgcctccgttgctgtcgtcggcatacgcctcggggtcgaacccggactcgcggcgcatgagagcggcgatgaaatcagcgcccaatccactggattgggcggcccgttcgacccagggcttggcctgttcgggcacctcgacgacgctggcctggcaggtggattgtccgcccacggccacggtcgggataagccacatcaacagactgaccatgagcatgacgatcgcgccgacgaccagcaacggcagaccggcggccgccgacaccgtggccatgaccgccgccttggccgccatcatggaacgggccatagtccgaacgacccattgcatcgctcgcatcgaggaaccggcgccggaacggactgtccgccgtgctcggccgcctctggctagaacagggcccgtgcgtttccggagtgcgttttgagttggtatggaacggcctccacgcatgttgccgcgacgcgccgcatggactttgccggaccgacggctcttgcctcgcggcgacatgactcgggaagcagtggaagcggaagaacggccgagggcctcgccatcgatcgcgtccgtatcatcgcttgaaacctgcgtttgcagacacgagaaggtctcctccgctgcc

SEQ ID NO: 1765 - DNA, 3316 bp, Unknown
  MAG_14  MAG No. k141_26881
accgctatgggcatgatgattgaggccgtgggcatcaaccaggaagcctcccgtatgaccggtatcaagccgaagaagatcctcttcctcgtctacgcgatttccggcttcctcgcggccatcgctggtctgttcgccaccgcatccgtgatgcgtgtcgacgtggttaagaccggtcaggacctcgaaatgtacgccattctggcagtcgtcatcggcggtacttcactgctgggtggtaagttctccctcgccggctctgctgtcggtgctgtaattatcgccatgatccgcaagaccatcatcaccctgggcgtcaacgccgaggcaactccggccttcttcgccgtcgttgtgattgtgatctgcgtgatgcaggctccgaagattcacaacctgagcgcgaatatgaaacgcaagcgcgcgctcaaggctcaagctaaggcggtggcagcatgacaacagctacggcaaacaaagtgaaggctcccaagaagggcttcaagctcgatcgtcagatgatcccgaccctcgcggccgtggtgatcttcatcctgatgatcatcatgggtcaggcgttgttcggcacctacattcgactgggcttcatctcctccctgttcattgaccacgcctacctgattattctggctgtggccatgaccctgccgattctgaccggtggtatcgatttgtctgtcggtgctatcgtggccatcaccgcagtcgtcggcctgaagctggcgaacgccggcgtgcccgccttcctggtcatgatcatcatgctgctcatcggcgctgtgttcggcctgctggccggcaccttgatcgaggaattcaacatgcagccgttcatcgcgaccctgtcgacgatgttcctggcccgtggtcttgcctccatcatctccaccgactcgctgaccttcccgcagggcaatgacttctcgttcatctccaacgagatcaagatcatcgacaatccgaagatctccaacgatctgtccttcaacgtcggcgtgatcatcgcactggtggttgtggtcttcggctacgtcttcctgcaccatacccgcaccggacgcaccatctacgccatcggcggctcccgttcctccgcggaacttatgggtctgccggtcaagcgcacgcagtacatcatctacttgacctctgcgactctcgccgccctggcctcgatcgtgtacaccgcaaacatcggctctgccaagaacactgtgggtattggctgggagctcgacgccgttgcctccgtggtcatcggcggtacgatcatcaccggtggcttcggctacgtgctcggctccgtgctcggctctctggtccgctccatcctcgatccgctcacctctgacttcggtgtgccggccgaatggaccaccatcgttatcggtctcatgatcctcgtcttcgttgtgcttcagcgcgcggtgatggcggtcggcggagataaaaaatagcgggcttgcccgctcggtctccgcaccgaatacgacacacaccataactgaataggcgggatcagcccggctgctgtgatggcaaggtcacagcagccggcactgcccgccaaagctttctttctccttttcttcctttcattagcgtgtggggcgtgcccccggggttctcccggggcacgccccacacgtgtttggaaagctgggactctattgatgatcggatttatgcacgcttacgtgccgcgcgaatgcggaacgcggtggccagacagcaccagccaatcaggcagataaccgtcatcgtggcaaacgtccatgtgccgccgacggcagtggcgtgagcaaactcagcggtgccttcttctcctgcgccggcctgagccacggaaagaatcgtggagaacagtgcggtaccggcagcgccgccaaactgaagacacgtgttgaaaatggcgttgccgtccggcttgaactcgggagagacctccgacaggccactggtcatcacattcgcattgccgatggaatagaacagaccgaaaatgaaatagaatccggcgagcagcacgggcgtaagctgcatcgagaacaccagcataagcactgggcccaaaatagcgatgccgatcggaatcagaatcggcttgaccgcgccgaacttatcgtagaaccagccgccaagcggggcacagacagcgccgaccagtgctccgggcagcaccagagagccggccacaaatgccgtggtgccgagcgagagctgtgccacattggtgatgacatagccgtagccgatggcgaccaatggcagcagcagatatgcgcaggcgtgtaacagtacggcgggatccttgagaatgccaaggcgcagcagcggggagaaggcacgcttggaactcatggcgaacacgatcaacaaggcgaggcccacaatcagactgacaatggcgataatgccggagcgtgtggctgacttgccggacaccgccgcactgatggccacgccaccttggttgagcgccagcaccagaccgaccaacgcgacaacaatggacccaagctgaatcgggtcaagataggcagcctcggtcggtgtcttctgctcaatgcacttcatgccgatgcatgctgcgattagcaccagcggaatggcgatgacgaaaatcgcgcgccacggcagcactgtggtcaccgcgccgccgacggtcgggccgatggccggagccacggtaatgaccagcgatcctacgcccatcaatcggccgatcttcgaacgaggagactgctccagaatgatgttgatcatcaacggcgtggccacgcctgagccaatgccctgaataatgcgggcgacaatcagcagcgggaaggcttgggcgacgatcatgatcagcgagccaacgatggccagaatcacagccgcaagaaaaatggttttcagtgcgaatcggcgcttcaaaaacgagctgatgggcatggtggcggccaccgccaacagataaatcgtggtaatccattgcacagtggccgtgtcgacatggaattcgcgcatcagtgcggggaaaagcacggtcatcacggtttcggtcagaatgccaatgaaggcaagtgagccgacagccacaatcgcgccgataagacgtgtgggaatcttctcgttatcaatatgctgctcaggcatacatgctcctaaacgttcggttgcaatgtatggaatgtaaggtttaccaaccggcgtaggtacctgtgcgtgcggataaaccggcaatcgtactgccttggctgcacgctatggaatcacaaaaccacctgtgagtgtacggttcggggcggac

SEQ ID NO: 1766 - DNA, 2835 bp, Unknown
  MAG_14  MAG No. k141_27792
acacctgttctcccttgatatttccaatccgcttgccttcacgcaggctcgctgcgcccatgagttcgacacggccgaacacgccatcgatctgctcaaggcattggctatcaacgccgaacggtaaacttgggagctatggaagaatcacgcgaagagaccccgcaggacctgcgcaatctggcgcttaaggtcgccggcctgcttgaagaggccggacagcacgccctccatgaccagctcaatccgcgcaacatcgcccagcccagcgcggacggcgacaatcatggtccccgctaccgtctggaaaccgacagcaagatcctgcgctttatgagcgcgaggctcgccgacaccgcccacttcgacggcttctggaccacccgtcccgccgaaagccgccccggacagcggtattggtatatcggcaagatcgatggcgtgatcaactacgtgcgccgcatgagcgaatggacgctgaccgcggccttgttcgaattcggtccggacaacgagcccaagcccatcatcggcgtggtgcatgcccccgccctcggcctgacctatctggccgccaggggagcgggtgccgtgcgcatccacaaaaccgcggtcggcgagaagcgcgacaaggtcgtgccgtcgatgacctcctcgctggatggttctgtgctgagctacggcatgtccttcatccccagcgaatcgcagcgtgcgctcgacgtggcctcctcgctcgccggacgcccggccgacatcaagcgcgtgggccccgtctcgctcgacctgtgcaaagtggccgacggcacctatgacgcctacttcgagccgatgctgcacgtgtgggatatcgcgggcatcgccgccggcaccgtagtggtctgggaggcacagggcacgctgagccgttgggacggcgaacgcatccactggcgtcacgataacgatgtagtggcctccaatggactcatcatccgcgaactgcagcattacctgcagcagtatccgtggctcgactccatcaaccagcgataattttttgactcctccggctcccctcgggtgaggggagccgtcggccgaaggcttactgaggggagtttgacagcccaaaaagaagacaacatgccacaacaattcgaacaacctcaagcacagcaggccgcgacccaggaagacgacgccctcgccaccacgcaggccgccgcccaaaccgagtccaccgaccaagccgacgtgttggacgacatcctcgacgacatcgaatccgccttggaaaccaacgccgaggaatacgtcaacagcttcgtgcaaaaaggcggcgagtgatgccccaactgcgtgacagcggcacccgctccctgcacgccacggaacccgtaccatccgccgagatggacgggttctgccgtattttcggcgtcgaaaccgaatacggcgtggcggtcaccggtgccgaacgccccgtggacgccggccaggtggcgatgaccatgttccagcccatcgtctcccgttcccgctccaccaacacgtatctggccaatggctcacgtctgtatctggacgtcggatcccaccccgaatacgccaccgccgaagcgcgcgacccgcgcgaggccctggcccaggacctcgccggcgaacacgtgatgcgcaacctagccctgaaggcccagcgcaagctgcgcgaatcctacggcgcacacgccacgatccatgtgttcaaaaacaacgtcgactccgccggccacgccttcggctgccacgaaaactacctggtccgccgctgcgtgccgttggagaccatcgaacaccagctgctgccgttcctcatcacccgccagctgtacaccggtgccggccgcatgaccccggacggcttccagatcacccagcgcgcggacttcctggacgaggccgtctcctcggccaccacccgctcccgcccgatggtcaacacgcgcgacgaaccgcacgccgaccccgactccttccgccggctgcatgtgatcatcggcgactcgaaccgttcgcaatggtccacatggatgaagcttgccgtcacgcaccttgtgctgtgcgcgatcgaagacgccttccgccatggcgttccgtccggattcgagcagtatgcctttgctgatccggctgccgccaatcgcacggtcagtcgattccttgatgatccgcgcgccgaactgacgctcgaatcaggcgaatccgtgtccgcactgggtctgcagcgccggtattatgcggcggtcaaggccttcatcgaaacccatggcgatgcgctggcaagttcgctgccggccaccacgatcgacacgattatgggggagtggagccgcgttctggacgcgctggagcgtggtgcatacgatgcgctcgccgaccgcgtggactgggccgccaagaagcgtctgttcgacgcgctcaaacgccgtcgcccggacgtcaccttcgcccagatggaacagcttgagctcgactaccacgacatcgccaacggtcgcctgtacggttcgctcgtagcccgcaaccagatgcgtgagctgctgacaggagacaacgtggaatacgccgtgcacaatccgccgaccgacacccgtgccgccctgcgtggccggttcgtggacgcggccctgaacgtcggagcccagttctccgccgactggacccacctgaccctgaccgcccccgaacgccgggaagccatactcctcgatcccttcgaggccgagcccaccctgggattcgagcagcttatggaagcgctgaactagtccggaataatacggttggacaacacgtcacagcaccacaacaaaa

SEQ ID NO: 1767 - DNA, 3063 bp, Unknown
  MAG_14  MAG No. k141_27803
atcgctgacccaacctccatttagttaccaatagtcattacctttagtaagggtatgcgacctctaggcaaacccaacgacccattcgctcacgttgggtttcgccattttcgggagaaaaacaacagtgcggtgattcccataacgagaatcaccgcactgtactgtttgcgattatttgcgattatttacgcgttgctatctgcgtcgcgcgcgttatctacgcaccgccatctgcgtcagcgcagagccaggttggccgcgccgatcagaccggcatcctggcccgcagtggccgcgacgatcttggcatggccgcggtaggcgctgccttccaggaaacgctggtagttgtagcgggccggctccagcaggatgtcgcccacggccaccacgccgccgccgatcacgaacaggtccgggtcaagcacggcggaaacggcggccatggtgcggcccagccattcgccgatcttgccgaacgcatacaggccaagtacgtcaccttcctgagccgcttgggacaccatcggcccctccagtttggtgatgtcgccgccgcacagttccagaagacgcttggcgtcctgaggacgacggcgcacggcggacttggcgaagttctccagcgaggttcccgaagtgtaacgttcggcgcagccgcgcaggccgcagccgcagtggtcgccgtccgggaccatcggcaggtggccgagctcggcggccatgccgaaggagccgcggtagagctggccgttgatcacgatggcaccgccgaggccggtgcccacggtcagcgcgaccatgttggagctaccctggccggcgccgtgcacgaattcgccccatccggcgcagttggcgtcgttttcgacgatgaccggcacggcatggtcgatcagcgcgccgacgtgctcggacagatcgtagttgatccatgccggaatgttggcggagaaggtgagcgtcttgcgatccgcgctcacattgccggcggcggagatgccgacggcctcgatatcggtgtgcccggcggccacagcctcgcggtacacctcggcgatgtgctggttgatggcgtcggcgtccatcggcgtggggacgcgccagcgctggatgatgctgtcattttcatcgcagacggcggcggcgatcttggttcctccgatatcaatggcgagcgtggtcatggcttactccttgaagactttcgtaacatgcgagatagcgaaaatagtagcgagccgccatgacctcccaccgcggtttttccgtggtgcgccatgcgtcgcgaacattccaccgatgcgcttcctcatgcatttcacccgttgcaaacgggcgccccttaacgccggcatcggtgcggacggcgtgtcgaatcggatgcaatcactttcaccgtccttgcggatggcatcgaagaacggcaggaaacaaaaaactcccgacatgcatcgggagtttggtggcgaccccggccggacttgaaccggtgacctccgccgtgacagggcggcgctctaaccaactgagctacggggccgtgcgtgcctcgctgaggcacaagaggatatgttacagcatcatcggattacgacacgccgtctgatacatcgttccttccaccggcgaaccgaccgcaggtgtggtggacggtatgcggaccatatcgttcgaccgcgcacgaccgcactccccataagacagtagccgtcatgcgtcaacgcacgttgtgcgacaacgcggcacgacgcacggccaccgaggccagcaaaccgatgaacagcatgatgccggcgaccagaagcgtccactggccgccttcgacgaaccctgaagtcatcgcatcggcaatcttcggcgcctcgtcgccgaattgggccgccggtccatcaccgctgcggaacacgccgatcactccacccgccgaaccactgaccgcttgggccagaccgtcgccgaccttggcgggcagcccgagggattcgagccgcgccggcaatgttccgttgacggccatggccaacgacgcgccggagatggccgaaccgacggcggtgccgagctgtcgaaccgtggactgggtggccgacccttcgccggactgcatgatcggcacttcggagagcaccacgctggtcagctgcgcggaggcgaagcccagacccagaccgtatgcggccatgggaataagctgccaccacaccgacaatcccacaggcataaggaccgcgaccagggcgacggcgatgatctcgatcacaagaccgagttgaatcacgccggccggggtgagcttggcggccatgacatgggcctgcgcacctgcgacgatggaccccaggcccatcacggccagcatcgcaccggcctgcagcgtgttgagcccgcgggcgttgatgaggtacagcggcagcatgaacaccagcgcgaattcgccggcggcgatggccgcagccgccagattaccccacgagaacgtcctgatgcgaaacagggtcatgtccagcatgaccggccgaccggctttgccccgcgcggattcgaagacgatgaagacggccatcagaagcgcgccgtcgatcaggcagatcggcaccggcgacaaccagtcacgattccagctcaacccgccgagcttcaactgcgttgaggtctgcttccaccaaccgtaggtctcgccttcgataagaccgaacaccaacagggccgaggtcagggcagacaacaccacgcccgggatatccacaccgacgcgacgggatcggacatcctgcgcggcatccgcggcaccggcgacaaccagtcacgattccagctcaacccgcccagtttcaactgcgttgaggtctgcttccaccagccgtaggtctcgccttcaataagaccgaacaccagcagggccgaggtcagggcagacagcaccacgcccggaatatccacaccgacacgatgggatcgggcatcccgtgcggcatccgcggcgccggcgaccgaggcgttcccaccggtttgcggcaccaggaagatggccgacacaaagaccgcgatgcccagcgg

SEQ ID NO: 1768 - DNA, 4056 bp, Unknown
  MAG_14  MAG No. k141_27882
aacgacaatggcctccgcccaaaacgagcggaggccatttgcatgcatgaatcaatcaacgaatcagctggcgaagaagaacacgaacagccaagcgccgatgatggcgccgacgatcggggccacgaccgggatccaggcctcgccccagcgggaggagcccttgtgcgggatcggcagaatggcgtgcagcagacgcggcatgaggtcgcgagccgggttcaggccagggccggtcgggccacccatggaggtcacgaggccccacacaatgaagccgacgacgatggaggcggcggcgtaatcctgcttgccccaagccagggacaggcagcacagggcgccgaagacgagcaccagggtgccgaacatctcgttgaggaagtagttgaccttctggttgtccgcgtcggtggtgcagaaggtgccgagaatggcgtcggcgtcctcggtctccttgtagtgcgggtagtaggtcaggtagacgatgaactggccgagcagggcgccgagcagctgggcgacgatgtacggcagcacgtcgctccacgggaacaggccgttgacggcctgggcgatggtcatggccgggttgatatgagcgccggatacgccaccgaacatgagcaccgggaacatgacgccgaagccgtagcccatggcgatgttcaaccagccggcgtggtgacccttggtgttcttgagctcgacgttggccacggagccgttgccgaagatcatcagaatggcggtgccgaagaactcggcggccagcttggtaaagagagagtattccactgcttcttcttttctcttcgccgcgcaacaggcatggctgactgttcacggcattctgtgtgattggaaatccgttcgcggagccggcgacgcgatttacgctgggcgcgaaagcaaacgtggcgattgtacactttgccccacgacgaaatgccggcaggatgcgatgtcgaatgtccagccgaatgcaatgcccagaaagccaccggaatcagccgaagcgaccttgactctcagtggttgcgaatgacgttgcgcaggggtaggacgctggtgggcgagacggacagttcgtcgattcctaggcacaggaacgtatcggtcaggctcaggtctgcgccaagctcgccgcagatgccgcaccagatgccatgacgatgggcagcctcgatagtcatctggatcatgcgcagcacagctggtgaatgcgggtcggcaaagcgttcgagactcggggtctgacggtcacaggccagcgtgtactgggtcaggtcgttggtgccgatggagaagaaatcgacttcggcggccagctcgtcggccatgatgaccgacgcaggcgtctcgatcatgacgccgatctggatactctcgttgaagtcggtgtgctcgccgcgcagctcgcttttggcttcttcaagaatccgcttggcgtcgcgcacctcctgcaccgaggtgatcatgggcagcataatggcgatattgccgtatgctgaggcgcgcaacaatgcgcgtaactggactttgaaaatctccgggcgggtcaggcagatgcggattgcccggtaaccaagcgcggggttatcctcgtggtccagattgaagtagtcgacctgtttgtccgcgccgatgtcgagtgtgcggatgatgaccggacggtcgcccatctcctgtgcgacttgtctgtatgcatcgaactgaaattcctcggtcggccagtcctcgcgttccagatacaggaactcactgcggaacaagccgatgccctcagcatcgttggccagcacggcggctacgtcagagggacggctgatgttggcgtacaggcggacccgctgaccggacttggtttcggtgggcttgcctttgagcttccgtagtaggctcaggtgttcctcagcttcggccttcctgcgctggcactcggtcagcgtggcctcgtccgggtcgacgaacaccgcaccgctggcgccgtcgattacggcaacgtgaccgtcatcagtcgggtcgaaggcgtcgccgataccggtgatggcggtcaggcccatcgtgcgcgccagaatcgcggtgtgcgagttcgctgagtccttggcggtcacgaggcccaaaaccttagcgcggtcgagctgcgcggtctcgctgggagcaagatcttgggcgaagatgatgtggctttcgccgttctgcgcaatcccgttctgcacagtaccgttctgcacagcatcgccttgtatactgccatcctgcgccgtgctatcgcgtttgccttgcagcacgttcatcacgcggcgagaaacatcctcgacatcagcggctcgagcctgcatggtcgagctatccatcgcagcgaacatggcggcgaactgttcggcgacgctcttcaccgcaaattcggcgttcaccttgtcttgcgcaatcaaaccttcgacgcatcccgcatagtccgggtcctggagcataagccgatgggcgtcgaacagctcggccttgttttcgccgaactcagcggcgacgttgtcacgcagttgcttgagctgagcgacggccatgtcacgggccgcgcggaatcgatccatctcagcctgcggatcgtcgattacgcggcgttctacagcatgatcggcggcggcgagcacgcggaccgtgccgatagcaatgccagcggatacgccgacgccctgtatcgttctcattacaggtgctccttgaggaatcgctcgaactctgcggcagcgacagcttcatcgttgccctgcacccgaaccgtaacctcgtcaccttgttgaacatcaagtcccataacaccgaagatacgcttggcatccacggatttgccgccgtaggcaacggtgatgttcgactcatattcccgcgctttggcaaccaaccggccagctgggcgggcgtgcatgccttcggggtcggatacggtgaacgcgaatatctgagacatgacgccgctccttacacgtccggccgtcacgcgcgaagacggcctttccgcaccagctacggactgatgctggaaaaaacaaaaaaccggaatctttcgattccggttgtctgtgcccccgcagggattcgaaccctggacacgctgattaagagtcagctgctctaaccaactgagctacaggggcttggttagatgttgaagtgttccttgcaacaggtgttaaatatactcagatttgaagcggatgcaactctcggcgtgtcgcgcctatttccagcgtttttaaacaccaatacaaaaatcccccatgcggcgcgaaccgcacgggggatgatgcttaagctcagactcttggtctgtgtgattccagcactaggccggaatgactcactcggccacgaccttcacgaagaaggaagcggtgatctccgggtggagggccaccttggcggggaaatcgccggtggtcttgatggtctcgacctcgatggccttcgggttcaccgcggccttgtcggacagagcgatggcgatggcctcgttggagataccaccgaacagcttgccggactcggacaccttggcggcgatctcgacggtggtgccctcgatggcggccttggcggcgacggcgtcctcgcgggtggcgacggccttggccagacgagcgcgcttcatagcggtgatctgagcctcagcacccttggtccacgcgaaagcgaggccctgcgggaacaggtagttgcgggcgtagccggccttcacgtcgacaacgtcaccggagtggcccaggttggacacggtcttggtgagaataaccttggtttcagccattgttcaaagcctccctaactcagcgacccgaagtggcgtacggcagcagggccatctcgcgggcgttcttgatcgccttggacagctcacgctgctcctgcacggtcacgccggtgatacgacgggaacggatcttgccgcgatcggaaatgaacttacgcagcagcgcaacgtccttgtaatcgatctcggtgaccttggcggccttcagcgggttcggcttcttcttgaacggcttgaccggcggt

SEQ ID NO: 1769 - DNA, 4070 bp, Unknown
  MAG_14  MAG No. k141_28494
attcgtgataacgaataggcaaggtccgacggaaaactcccgtcggaccttgcctattcccgtctcatgccgtttctatccgctccaccaacaggatgtagccgtagacgaatcagacacaggaaagtctggtactgtccctgatcacgagcttgggagtcaggatgcggcggttgccactgaccgtctcaccgttgatgaccttgatcagcagtttggcgaccttcattccatacacgctcgggtctcggtgtaccgacgtgagcgatggatagatcgatacgcacaagaaactgtcctcgaagctaacgatagccggaagattatgcggatatcgcggtgcgtccggattcctggacggcgtattgagcaaccactcggtaatggcatgcagactggctgcggccaatgtctcattctcgtagatgaaagcggtgggcggattgcttccacacaacattgcaagcgtcattgccgaggcgatgtctacgctgaagttggtgtattcgacacggatcgactcaagatcgcggcgctttgcgaattcacggaacattcgttcgcgatcacgcgaatagtcaagggtgcggtcccccgataggtatgcgatacgccggtgtccgcatgataccaaatgtcggagaatcgtttccatggcgcctgaatcgtcaatcgacagcgagggcacgatgttctcaggatccggacctcccgcaagcacagccggcacaccgagccgagcaagcagcgcggggcgcgggtcgtcagcacgcaggtcaacgaggataacaccgtcaacacgcttacgtcgagcccaatcctcgtagaccgacaactcttccctgaccgatgagcagggccgatacaacagaccgtaacctttgagactcagggattcatgcaaaccggtcatgaaatgcagcatgaagccttcgtcccgaagaccgtttgaggagcgtgccggggcgaagccaaccgtcatggtcttcgatgagccgagcgcctgcgccgcatacaccgggctccagccaagcttcgacgcagcctctttgacgcgccttttggtctcttcggagacgccgggacgatcgttgatcgcgaacgataccgcggtctgcgagattcccagctcgtcggcgatgtccttgaggcccacccgatgcggtttggcgaccggatgcgcggctcctgactccaagtggagggggtttgtgttcatcgtcggctccgtgctcgtcatcggcgtactctcccgtttcgcgatatgttggttccctgcaatggggaacctcaaaaaacggacttcgatagcactcaccattgcatgcatactgcatgaatcagtttagtatatggcatggcccacatcgatacagaacttctttgccctcattcaccacaaagtggaaattcgcacggcatgcattcgatacgggccgagatgccgcctccgggtaacaccgatataccggctcacccggaagcgatgtattcgtcagaacaaacagcggctcctagaggatcgcgccgtctgcgccacgtacctgcatctcatagatacgagccgcagtgtcgctgccctgcgtcggcttgttaaccaccaacttgacgtaacgggcattgaccggggcaaaggcgttggacgtggcaccttcagtgttgcccttgaccaacgcgacctgcgtgtattcggttccgtcctcactgacctcgatcgcatattcctgcgtgttcatgctggcatcctctccaccgacttgagcatgggaaatatcgacttgagagacggtcttgggtgcgccgagatcgacaacaagctcatgcggagccgggccggtgacacaccacttggtcttcacgtcgccatcaaccgcgaactcaggcttctcgttgccgttcgtgaacccgtcggcgctgacctgagcgccttgagagagcaacacaaggtccatgacatccgcggagacgacaatctgccccttcaacgtcgcagtggcctcgccgctcttgttcttcgcggtgatctcaacgtcatacacgccctccttgtcgtaggtgacggtgacggacttgccagtggcatgctccttgcttgatccgggcagagaccaggcgacctcggcagtgttcttcgagcttgcggaggtgaacgtcacttcgtcgcccacattcagcagtgtgcgcgaagccgtggcaccggctttcggcttgctgttgtcgggccaatccatatcggccttggcgctcgtgccttgcgtaccataacggtctaccggcacaatctcgaacgtggtgttattggtctcgcctacacgtgtcagtgcgtttgcatagaagttctcgacgtttgagacgccaaggaacgaacggctcttgtcctcgttgatctggtagatctcgtaggccggagccttgccatcggtcttccatgaaatgcgggcaccggcatacagggcgtcatcgtcgaactcgctgtcatcgaccttgacttcggtgaccttgccgagctcggtctcctcggagccatccttgagcgtgatgttgcccagcaacagctcgtagccggtcttatcctcggaagactggtaggtgaagtcgatgccggtgagcgtcttgttcgacaacttggcgatgtcgtagtcgatgacaccccaatcgttgccgaccttcttcttgccattgacggtttcgaccgagccatccgcgaaggtcagcacggccttaagatcggtatcgacattggccttggcggcaatcgacagcgtcggctttgcccctgtcttgacgctcgccgagtacagcttgaccatggtcttgccatccttggcgaccttgcccgagaacttcagtgacgatccgccgtaccaggcgtcggcatcgctgtaatcggccttggtcttattgccgccctcatcggcgactatccaacgataggtcggctggatatcgctgacggaacggttgttccaatccatcttggaaatctgcttgccttcacggaagaagctgtagcccgaaccgttattgaagttggtcacaaacggcagcgaggtgacagccgactgctcggccacgtaattggatacgccggtccacttctcatcgtcctcatacggagtgctcaccgatggattaccctcatcgttaacccatagacgactctcgtttttgcggaatgtggtcggattgccggcggaccaatatgcccagctcgggcagtacaggccgagagaggtatgcgtcttgccatccttgccggcgaacaggttccatttgaccggggtgtcatagccgtcggcctgcacatcgataccggcgtacagagaatacgggtcgatgccgagttctttggctttggttgcggaggcggcaagcaggtcgtcgccggccagtttgtcctcggtccaccagaagttcagaaacatctcatcggctatcggatgatcgccatccgtcatgtacatcgagttttcatcggtaagggcattctgccaatcgattgagccgtccttggtcatcgagtcgtaatacacgacacgcaggtcgggggcctgcttcttgaggtaggcgatgaacgcctgcatcttcgtcgcgcagtcggctcccagcgaggtttcattctcaccctctgtctcctggttgatgaaccagccatcgaaaccgtacgtggtggcgacctcaatgagcttgtccgccacggggaacgagccatcggacttttgggcaagcgtctggtccagccattcgaccttgcctcctgatacgttctgagggaagaagactgtgcccagcaccggcacgccgttggtatggcccatgtcagtcacatcggggctcggcggcacgatgatgccttcgcccgaagagccgccccagtacacaagctcgtcaacgtactgccaatacgagaacgtgttcgcgttcgcggtgttcaggccatgcggggcgttgccgcttgtcgaggagttcatgatcgatatggccatcaccttggtatcggtgttctgcgtgtcattgactggtttgaggtcggccttgtccacacgcttggccaacggcacagtgctcad

SEQ ID NO: 1770 - DNA, 15691 bp, Unknown
  MAG_14  MAG No. k141_28819
gcgaacgcgacgcatttcgacgagggaggcaggcaggaagccacgcagaccgatgtcgacgatgaggccgcccttgacggcttcgatgacggtgccctcaacgacgccgtcagcttccttgatcttctcgatgtcgccccaggcgcgctcgtactgggcacgcttcttggacagaatcagacggccttccttgtcttccttggtgacgacaagggcctcgatggcgtcgccgacctcgacgacttcgtcaggatcaacgtccttcttgatggaaagctcgcgggaggggatgacaccctcggtcttgtagccgatgtccaggaggacttcgtcgtgatcgatcttgacgacggtgccctcaaccagatcaccatcatcgaagttcttgatggtggaatcgactgccttgatgaagtcctcttcggtgccgatgtcgttgatggcaaccttggcgacttcagtgttgttctctgccatgtaaatatatggtttctaatagtggatggataatttctcgatattcagttatacgcacacccttacaggcatacagatattcacaatacaagcaactctgcccaaatttcctaggaaactctaggcgtgtcgttcggccatttccacgacgttggccaggagcatggctcgggtcatggggcccacgcctccggggttgggggtgtaggcggaggccttgtcgtagcaggccttgtccacgtcgcccttgatgcggtagcgaccggcttcttcgtcgtagacgcggctgacgcccacgtcgaccagcacggcgccgtccttgatcttgtcgggcgtcacgaatccggccgaacccattgcggcgacgatcacgtcggcgcggcgcatgtggtcggccacatcccgggtaccggtgtggcacaaggtgacggtggcgttgacggcgttgcgcgtgagcatcaggccaatcgtgcggccaatggtgatgccgcggccaagcacgcacacttccttgccgttcagatcaatgtcataggcgtcgagcagctcgagcacaccgcgcggagtgcaaggcaacggtgtcgaaatgtcgccgcgcacatgcagcaccagttcgccgaggttgtacgggtgcatgccgtcggcatccttggccgggtcgatcatgtcgatgatcgcgttctcgttgatgcccttgggcaacggcaactggacgatgaacccggtgcaggccggatcttcgttgagttcgcgtacggcagcggcgatgtcgtcgaagctggcgtccgccggcagttccttcttgactgaggtaatgcccacttcctggcaatcggcgtgcttgccggccacgtacttcatcgacccgggatccgaccccaccagcaacgtgccaagccccggctggatgccccgggccttgagcctgctcacccgttcggcaaggtcggtcttgatttcggccgcgattcgtttgccgtcgatttttgtggacatcaacgccctcccctgtggtttcggtgcattctatcgaaacgataggctatcgttggaacaagtcaggattatatatcgttcgctctcacgaagaaggcgtgccatggggactcaaatcacacgacttacgcgactcgccgcagccggcctgagcgccgtcctgttgttcgcgaccgccgcatgcgcagccacctcccccactgaaaccgagccggacaacaagaccagtgttcccgcaccgaccgggccgatcaatgtggtcgcctccctcaatcaatggggctcgctggccgccgagctgggcggcgatgacgtggaagtcacgtccatcgtgaactccaccaatgtggatgcccacgatttcgagccaaagacctcggacgtcgccaagctgtccaaggcccagatcatcgtggccaacggcgcgggttacgattcctgggccaccaaatcgatgaccaagaccacgaatatcgtatccgccgcttccgtcatgggtgccatggaaggcgataacccgcatctgtggttctccaaagacgctcgatccagcatggccacggccatcaccgatgcatatgtaaaggcactccccagcaagaagaaggccttccagaagcggctcaaggcatggcaggcggatgagaaatcgctggaaacatgggcgtccgagttcaccagatcccactccgacctcacctatgcagccaccgaacccgtggtctattatctgatggccgatctcgggttcaagaatcagacgcccaaggggtatacgcaatcgaccgcttccggcggcgaaccggcccccgcggacctgcagtctttccagaaactcatcgaagacaagggcgtggatgtgctggtcaacaacacgcaggaagccagtgacgcgaccaatatgatcactggcgctgccggtcgtgccgatgtgccggtagtcgacgtctccgaacaaatgcccaaggataccgacacgctgaacgcctggatcaaccagctcatcaacaccatcatcgacgcggtggatccgagctatgactgcgaagacgccacggacggcaacgcgaattccgatgattccagcgccgacggcgccgccacggatgatgccaatgcgcacgattccaaggccagcaccggttccagcccggagcccaagtacatccgtcagtgcaaggcggccacatccagtgactcgtctcaggattcggcaaaggccgatgcctccaatggcgattccggcgatgcctccggcaacgaccagaccgactccggcaaatagttagaagcaaaggacaacggcatcggattcatgcaatgccgatagacgccttgcatgagaagggttgtgcgaccattgtcgagatggccgcacaacccttttctttggttgtcaccatccgtacacgatattgagaacgattgtcagcatcgtttgccacaatcgggcgttatgagtgaaacttccgattgcatcgtgttcagcgatgccgccatcaagcgtggtgaccatatcatctggcagcatggcacctttgccattcccaccggttcggtcacggccatcgtcggcaccaacggcaccggcaaaaccacgatgatgagggccgagctgggacttttgccgctttgccatggcagcctgaccgtactgggcaagcccgcaggcgagatgaacaaacgcatcggatatgtgccgcagagctatgtggcgaatgtcgattccaatctcaccgccgaacaatccgtgttgctgggcctgaccggcacccgattcggcatccaccccatcaccaaggcccagaaagccaaagcgctcgaggcgatggagttcaccggcatcgccgacaaggcgcagtaccgtctgtccgaactgtccggcggtttgcgccagcgtgtggccatcgcccaggcgttggtgtgcgatccacaactgctgatgcttgacgagccgttggccaacctcgatctggccagtcaacgcgccaccgtacacgtgctggccaagctgaaccgtgaactgaacatgaccatccaagtggttgcgcacgatctcaatatgctcttgccgattctgaccggtgccgtctacttgctcgacgggcacccgcactacgccgatatgcacaaagtgctcgactccgacctactcacccacctctacggcacacaggtgcaggtggtcaccactccgcagggtgacatgttcgtgaccccgacgccggatgagccccaggaccagccgcaggatatgcacacggcagccgaagtggcgcaattgcaccatcacgagcacggcaacgccaccaatggcagtgccgccaacagcgccgagaatcgataacatcaagctagccgatccacagcccgtcaacgggctgcagctcaggcatggagaaaatacaaggacatgagcaccatcaacttttcgtacgatcccgaatggctggacacactgtccgctccattcatgaccaacgccttcatcgccggcctgtgcattgccctggccgccggtgtcatgggatacttcaccatcgcccgtcgttccaccttcgcggcccatgcgctggcccatatcggtctgccgggcgcgaccggcgcggtgttgctcggcctgcccgtatcactgggcatgggcgtgttcgcactgggcggcgcactggtgatcggtgctttgggcaagcgcgtttccgagcgtgaaatcgcaaccggcaccgtactggccttcgccaccggcttgggtctgttcttcgcgcgattgtcgagttccgcctcccagcagatgcagtcgatcctcttcggctcgatcctgaccatcaccaccggccagatcatcggcttcgccgtgttcgacgtattgctgctggcattgttggccatcatctaccgcccgctgctgttcagctcgttggatgagcaggtggcacaggccaagggtgtgccgatcgggctgatgaacgtggcgtttatggcgattatggccggtgtaatcaccattgccgtgccggcagtgggcaccttgctgattttcgcgctggtgatcacgcctgcggccaccgccaatattctggccggctccccattcaaggcgatggtgatcgccagcgtgctgtgcctggtgtcgatttgggccggactcgtgctgtcggcgatgttccccgcccccccgagcttcattatcgtgacgctttccaccctgttctgggctatcgccaaggccgtggagacagtgcggaagtaatctcattcatttttcttgcccccgctggcaaattcacagcgggggctttgttatatcttctccaccaaggcattggcgatggcggcgatgccttcgccgcggccagtgaatcccatatggtcggtggtggtggcggtaaccgataccgggcaaccaaccgccgcagacagggcggcttcggcttcagcacggcgtgtgccgattttcgggcggttgccgatgatcgccaccgaggccgatgccggcgtatacccgttggatgccagatgcgccacaacttcttgcagcatatcgatgccatgccttccggcaccatgcgcgtccacaccgacaccgaacagtgaaccaatgtctcccaatcgggcggcggcaagcaacgcgtcaatcagggcgtgcgcggccacatcgccatcggaatcgccttcgataccctcgtatttggcggcatcggcctcgctgcatgaatcagacgccggccagtaaagcccggcaatccacagttcacggcctgagccggcaggcgcaaaacggtgagcgtcaaaaccctgccctatcaacactcctgcagaccccatgcagtccccttcgatggcgctacccagacgaacggcagcaaacgattatgaatcacgaagccccggcgtatcgcataaggacacgaccggggcctcaacaatcaaatcacttcttcttggacttcttctcggcttcgacacgagccaaagtatcggccgcggcctcttcgggctcggcggtgtgatgcttgtcgtcaccgggttgagcgggctcgtagcccaggttcacgtcgagcagacgctgggcttccgcctcgtcgatcttctcggacaaggcgatctcagaagtcagaatggcgcgggccttggtgagcatacgcttctcgcctgcggacaggccgtgctcgtcgacatcgcgctgggcgagatcgcgaaccacttcggcgatcttgttgacgtcaccggtggcgatcttttcgacgttcagcttgtaacggcgagaccagttcatctctttctcgatgatcggggtccgcaggatgccgaacaccttggccacttcggatgcggagacgatgtcacgcacgccgaccttcctggcattgtccacgggaacgttgatgaccaaaccatcggaagagagtacggacagctgcagatattcgcgcgtcactcccttgaccgtccgctcggtaatggcctccaccttcgctgcaccatgacgcggatagacgaccatatcgccgactttgtaagacatgtaccctccgagaactgacggcttacacacaaaaacttgaataattatgccatgcggcctggaccgcccctatgagagcgctcacaaccacggagacacaccgaaaagggcaagaattcgccattttcgacgcgccaatgtagcgttttcgactccaacgcacgtagactttgggtcatggctaaagaaacgaagatcaaggaagataccgtcaccgtgcctgtcgcccaaggcgacctcgatgcggtgagcaatgctgaattctacaacccccacggagttctcggcgggcatctcggcatcggcaagcatgccgacaccgccacaatccgtgtgctgcgtccgcttgccaagtccgtgaccatcctcacccaggatggcgaatacccgatgacccacgaatacaacggcgtgttcgtggctaccgtgccggcctccggcaccaagaagcagcccacgattcccgactaccgcgtcaggaccgagtgggaaagcggcgcagtgctcattgaggacgacccataccgttatatgcccacggtcggcgacatggacacctatctgttcggcgagggccgtcacgagaagctctgggaggcgcttggcgcgcacgtgctgcgctatgacgatccgatgggcggcgtggacggcacgcctggcgaacaggtggtaggcaccgcgttctccgtgtgggccccgaacgcccatgccgtgcgcgtggtcggtaacttcaacgcctgggatggccgtcgtcatgccatgcgcgagctcggctcctccggcgtgtgggagatcttcattcccggcatcggcgcgggcgagacctacaagttccagatcctgaacgccaattacacgtgggagatgaaggctgacccgatggagcgtcagcacgaggttccgccgcacaccgcctccatcgtcaccgaatccacctacgagtggaacgatgacgcctggatgcagcaccgccgcaccaccaacccgcatgatggcccggtctccatctatgaggttcacgccggcagctggaagcagggactgacctaccgcgacctggccaagcagctcgtggactatgtcaagcaggaaggcttcacccacgtggagttcatgccactggcacagcacccgttctccggctcctggggctatcaggtcaccggctactatgcggtggattcccgcctcggctcccccgacgacttccgttacctggtcgatcggttccatcaggccggcatcggcgtgatcatggactgggtgcccgcccacttcccgaaggatgccttcgcactcggccgcttcgacggcaccccgctgtacgaggacccggacccgctgcgcggcgaacaccccgaatggggcacctatgtgttcaacttcggacgccgcgaagtacgcaacttcctggtggccaacgccctgttctggctcgaggacctgcatgtcgatgcgctgcgcgtggatgccgtcagctccatgctctacctcgactacagccgcgaacccggccattggcgtccgaacatctacggcggacgcgaaaacctggaggccatcgacttcctcaaggaagccaccgccaccgcgtacaagaacaaccccggcgtcatgatgatcgccgaggagtccaccgcatggccgggcatcaccgcccccacctccgccggcggcatcggcttcggtatgaagtggaacatgggatggatgcacgacaccctcgagtatctgcacgaggagcccatcaatcgcaagtggcaccacaacgaaatcaccttctccatggtgtacgcctactccgaacactacgtattgcccatcagccacgacgaagtcgtgtacggcaagggctccctgtacggcaagatgccgggcgatggctggcagaagctagccggcgtgcgttcgatgttcgcctatcagtgggctcacccgggcaagaagctctccttcatgggcaacgagctggcccagtggggcgagtgggatcacgacgcctccatcgattgggattgcctgaactggcaggagcaccgtcaggtccagaccatggtcgccgacctcaacgccttctacaaggcgcatccggcactttggagccaggacttcgatccggccggcttccagtggctgaccagcgacgatgccgaccacaacacgctgagcttcctgcgcatcggcaccaagggcgagaccttggccgtggtggtcaacttctccggtgaagcctggcccgattaccaggtggcgctgcccaccggcggcaagtggaccgaagtgttcaccaccgatgacgccaagtacggcggctccgacatccacaacggcaccttcgaagcggtcgagggcgaatatcattcgcgtccgttctcggcgaagatcaccgttccggctctgggagttgtattcttgaagccggaagactgaactggtcaacaggctgaaaggtaaccggtttatttatgctcaataccacagcgcgtcagaatacgacaccgcgcatggtgctggtggtcgaggacgagcccacactcgccacggccattgcccagcgcatcaccgctgaaggatggaccgctcgcgtggccggggacggcgcttccgccgtccaggccgcgtcccagctacgccccgatctggtaatcatggacatcatgctgccggtcatggatggtcttgaggccaccaaacgcatcgtcgccgaacgtccggtgccggtgctgatcctcaccgcacgtgatgacgaggccgacaaggtcatcggtctgggagcgggcgccgatgattacatgaccaaaccgttctccatgcgcgagctcatcgcccgctgcaaggcgctgctacgccgcgtggagcgtgcgaaggtcatcgccaagaattcggagaacgagaagctgctcgacttcggttcgatggtcatagacccggcccagcgcatcgtcaccgtgaacggcgagcaggtgcatctgacccccaccgagttcgatctgctggccacgctggcccgccgcccgaagtcggtgctcacccgcgaaaagctgctcgaagaggtctgggactgggtcgacgcatccggcacccgcaccgtcgacagccacgtcaaggcgctgcgccataagctcggcgccgataccatccgcaccgtgcacggcgtaggctacgctttcgagccgccgaccgcgtgatggcatccaaaaaacaacagcaatcccggcttgatgcgatgaaacctcgcgtcaagccggttgatttgttctcctctctgaagctggaactcagcgtactgatcgttatcgccactgccatcgcgtttgccatgtgctggttcctcctgaaattcggctggtccggttggatcgccatgccgctgactttggtggtggccttgggcatcacctatttcttctcccgcggcatcaccgctcccttacgccagatgcgcgatgtggccgaagccatggcggatggcgattacacggtccgcgtggatatcgatcaggatcgtcatgacgaggtcggccagctggctcgctcgttcaacgagatggccggcgaactcgaacatgccgataaaatgcgccgcgacatgatagccaatgtgagccatgagctgcgtacgcccgtttccgctttgcaggcgatggtcgagaacatggccgacggcgtcaccgagcccactcccgccaatctggagagcatcctcacccaaacgcagcgtctctccgacctcatcgccttcctgttggatttgagccgtatggaggccggtgcggcgagtctgaatatcgaaaagttcaacttcgccgactttcttgacgagaccatcgagccgttggaaatcgccgatggcggccacgcccacgacatccgcgtcaccgtgccggccgacatctcgatggaaggcgatcaggaccgcctgcgccagctgttcaccaacatcatcgccaacgcactgaagcattcggccgacggcaccaccgtgctggtcgatgcccatgaggatgacagccaaggcaccatcgtgaccaatgtggtgaatttcggctcccagattgcaccgtccgaccgttcggatatcttccggcgctttgtcaaaggcaagacgggtcccggcaccgagtcgggcggcaccggccttggcctgtccatcgcacgttgggcggcccaattgcacggcggcaccgtcaaagtggtcgatgacacgcgaggcgccgatttcgaaatcatcctgcctaaatatcacgtcgccgaacgctgatattgtccgccgtcctaccgtatactgtattcgaacagatgttcgaatacagggtgggaggcacagcatgacacagcaatccaagtcacgaaccatgccgcacgacaccacgctgtttgtcatgcagatggccggcgattccatgatcaatgccggtattcataacggcgatctgctgattgtcgatcgttcgttggcaccagtccccggagatgtggttgcggctgtcatggacgatgaaatcgccatcaagcggctggtttcacgggccggcatcaccatattgcacgccgagaatcctcgatatcccgattacatgccgagcaacggcgcttcgcctgctatctggggcatcgtcaccgatgtcattcacccgttgatatcgtcatcggaccgtcgcgccacggcatccgccaataccagcacgcccaccactttagtaccggcctgctgaaatgtctgaacgcattgccgcacggtggcacctgtggtgacgatgtcatcaatgagaagcaccacgtcgccatggcctatgagatcacgcttcaccctgacatgaccggtgatacggcgggcacgctgtgccgaagaggtctgctgcacggagcgtgccttggtggaggagctcagggcattgcatggtcgcgcatcgacgccgtacccacgcaatgcccctgccaccgatttggccaacggtgccgtatgggcacgccctcttcggcgcattgacgcccgcgatgacggcaccggaaccaccaatacgcgatgccccaagcatgatgatgatattggcgtcttgttcagcagcgacaccatgatgcggccgaaagggccgtcaagctcggtatcgtcgtggtccttccagtcgagaatggcacgacgcgccgctccctggtaaatcgatgcggaccatatacgggctccgccaccaccgtctgtatcccgctcccggcattgtgcgaacaaggcccgacatgccgcacacaatacctcatccggcgcgtcacacccagcgcagccgcgtggaaacagcagattgcaggcctgtgcccacatcgcatgccaccacttgtatacgctcggcccgtccataacgcgtcaccatcaagctggagtatcgaatcgcgcaagcagtgcatccagcagttgtaccgtgtcttgcggattctccacacgaacaccgatcgcaccggcctcaaccgcaggatagtcattacccgtaggcgtcatgcgatcgcccacgaacaccatttcatcggcctgtatgccaagtgtctgcgtcagcttgcgcacggcataggccttatcgatgccgcattcgctgacatccacactggtgtagccgccggccctgacccgcatgtgcggcagatcggccttgaccgcttcgaccagcgcctgtttcttcgtgttatcgcgatcccatgcctgtttggccgctacgggtgcgaactgtcccagagcggagaaggtgatctggctgcccctgttctcgattcgaggcccccatacctgctgttcccacaatcccagttcccgggcatgtcgctcaagactttccgagacagcggccacggtggcttcggacagatcatgcgcatacaccaaggcccattgcgtgccatcccaccggtaataccgggagccggaggcaggcatgacatgcagattgccgcgcctggcattcggggtgagtacatccagcacctgtgaggtgaccaccgccatgccgccccctgagatcagggccaccaccgtatggtcgagcagcgcacagaaccgttcgatcatcgcgggcctcatcggctgttttgagctggccagcgtgttgtccaaatcgaaaccgaacaccttggcgttggagcagacattatcgaaatcaagttcggaccacgaacgtaccaccatttgtcgcgcctccctcgttgacgaatgttcacagccaatgaaccaatcctaacgcatgttgcctccgccatgtcctatggtgggaaccatgcttcagccaccttggaacgcacgaatctaccgcaaccgccacggtcgcggcacacgaaccccgatgttcggcacccgtctgccccgttaccgcactcgcaccggcatgttcgacgatatggtggcggcccaggttcgcaggctcggccaagcgtggccggaactgatacgtccgctccagttcgcggtggaggatgtgccgccttcggatccgacgccttggcagaccgagccgaatatgacgtcccagtgcttccccgccagccacggcattcccgcacgagtcgtgctctaccgtatgccgttgcagaccgaggcacctaccaagctcgaattgcagttggccgtcagggatgagctggtggcccgcatagcggaattgtatgggcgcaggcccgaggaaatcgaccccgattggggcctgtgacagtattgcggaggccgtgccacttcaagtaagacagtggcacggcccccgcagctatatcggcgccgaaacatcatcagaccgatgcttcggcgagcgcgctctacttgacgatggaggaatcgttccgagcccagacatggaccgtggcgggcatcagcgttgaagcgtcgatggcggacaatccggcgatgtccttgtcttgcaacgaatcgtgactgaaacgcgctccccagctcactttcttggatgagtcctccaacatcagcacgaccgcggtgccatgatcgccggaaagtttgccggtctcaatcgtttgcgccgcgttcgcatccagcgtgatttcctcggaggtcaccgaagcaccggcatcatcgtaggcgtgcaaggtgaccgtcctgcgcgcattggacgtattggccagcgtgatggaggcctttactccgtcgggaagggccaaccccgagaattcggatggctcgccggcattgaccaatgcgaaatcggcttggccggagtcaccggagcgtgtggccttgacggagaacgacacggcatcctctgcggtggacatcacgcccaacgccccatcaggagcctctcccaagtcgatcgccgtcaccttatcggcagtgacggtggcatctttggcgggaaccaatcctttgtcggtaatccatgacagcccggtgctggtgtctgccttggcgaacagataagcggtgaccgcatcgccggcagtgatggacggcgccaccgacgcattggaggcggtcggcagcggcagcgcgaaatcagaacccttcggtgtcagaccatccatggtcaccgtacgtaccacggacgcgataggagtctccttgctggaaacggtcacgaacagaccatgctgcccatcgaccgcggcggacagttccatcgaggactccccctcggccggcacagacagcgtggattgtgtggacaatgccattttcccggctgtctcggaaccccagacggcaatgtcgacggtggtcggcttggtggagggattcgagacgatgagctgctgtgtggtaccggtcgtgccgccggagagcaggaacgactggctgagcgaggtcgatacgcaggatgccgccgatacgcctctcacatcgccgtcatcggcccatgatgcgatggtgccgacggtgccggtgccagctgcggcctgcaacatacgggtattgatcaggcgagctccctgatcgatcttctgagcaccggttttcaccgaggaatcgtcggtcggatcggcgtctttcaaagtcacgtcatctgaactggacttttgcccgatcgccgagacagtggcgctgtagacggagccgaacgccgcatagcgcgcctgtgtgctcagattgccgacagtggcctggaaggcgctgtcgccgtacgtgccggtatcggccaatcctataggtgccgggcagtaggtttcggactgggtcggactaactgtctggtcgatggcattatcggaagcggccaccttgtccacccagatattggggatgggggccatgacgagaacgacgaacagcgcaatcaacaccagcatggtgatcacaccgagcacgatgccgatcgcacgtttgaaaccagaagttgtgttgctcatgcctgctcctccaatccgtaggacggtcgtctgcgaggcatggcgaccaagcagtacaacgccgtgatcacacctaggcatatcagccaggcgtgcctccagacactatgctgtgcacgttgctgccatgaggtatccacctgctgtgaggtgctgctacgcagcgtcagacgatagtagctgccgctatccgtggagaccagggactgggtgccgttcgatgcggcgatattcgcgctcaactgttcatacggcatgtcgttcgaggaatcgccggtctcgggaaccacgtagatgccgccgaatccaagcgcgctgatggccgcgatggcctcttcgtcgggattggacagcagcgaggcacaggcctgggccagctgttcgtcaaccgcatcatgcttgccggacagcaggcgcgcccgctggaccggggaactgtcgatcagatcgccgcgcgaggtgcgcatcaccgcatagttgacgatgttgcgggtctccgcgctcacggcaagcacacgatgatcggcactggcctccagataatcggtggtgaccatgggcaggccgttttcggacacgcccagtcccgcatccttatgacgttcgatgccatacatgcattggatgccaatgcagcacaccagtatcagagcaagcaccacacggccagacacgatgagcacatgcagactgtcccttttcggtgcgggatcgctgccagacgcatgcaacggttggaatcgcttcaccgccccaccggcgacgagacacacgcaggcaaggaagcccaatatcatcatcgcgatgccaggctgcgcggaaccggccacgacaccatcggcatccacggctatggccacacggctggaaatcagggcgagcgcgcctccgcaaacgattaccacccacatcagtcgcgaggtccgcaacgcgaacggcagcaccagcgaagcaagagcaagcagcgtgatgacaccgaacagcacagtgaccgccaaatcggcatgctcagtcgatcccatttgccatcccaacgcacgctgtacggcctcaagcagactcagcgacgccggcgacccgttggcggatgacgttggcaccgtgatgtcgccgaacagttgacgccacatgcccaaaccggcgtaacgcaccgcattgacgagcgtaggagccaccgcaaaggcggcaggaaccggaataagcaacagcatggcgcgcttgcgacgcacgaacagcaggaacatcaggaacacgacgatcagcgcgaacagcagctgcggttcggcggccaccacagggatgaagcacagtgcggcgatggccgcggcctgaacggatgtgcgcggcttgagcgggtcttcggta

SEQ ID NO: 1771 - DNA, 4659 bp, Unknown
  MAG_14  MAG No. k141_29105
gcatcctgtctgagctggaacaggacaagaccttccttagactcgccactggtgacatcgaggtttcggacgacatcgacaattccgttctggccggtgtttccgaaggcttgcgcccggctttggccgccgccatcgggcagggtgtgaccggcaaacccggcaagccggtcgtgctggtcgtggcctccggccgcgaagccgaagagaccgtgggctcgctgcgctcctggtatgacggcgacccggacgacatcgcccagctcgaagcctgggaaaccctgccgcacgagcgtctgagcccgcgcgcggacaccgtggccagccgcatggccgtgttccgcagactcaagcatccgagcgataccgatccgatgttcggcccgattcgcattctcgtcatgccgatccgctcgctcatccagccggtcgtccaaggactgggcgacgtcgagccgctcgtgttcaccgtgggggaggacctgcccctcgacgaagccgccaaacgtctgatcgaaaacgcctacacgcgcgtggacctggtcatggaccgtggcgagttcgcggtgcgcggaggcatcctcgacgtgttcccgcccaccgcaccgcacccggtgcgtatcgaattcttcggcgacgaaattgacaccatcaaggaattccacgcctccgaccagcgtacctacggcgacggcctcaagaccatctgggccaccgcatgccgtgaactgcagctgaccgacgccgtgcgcgcccgcgccaaagccttggtcggttcgattcccaatgctgaggacatgctcgaatccatcgccaacgccattccggtcgaaggcatggaatccctgatgcccgcgctcgtggaccatctggaaccggtgggctccatgctgcccaagcacgccgtgatcctcctgagcgacccggagaaactgcgccgttccgccgaagacttggcaaaaaccgcgaacgagttcctggccgccagctggcatgtggccgcttccggccacggcgccggcgcgcccatcagcttcgacaaagccagcttcctcgactatgcggaaaccatcagctccctcgaatactccgaacatccggtgattcgcctcaccagtttcggcgtggacaccacgctgaccggccatgtgcagctcgacgcccagaacccggccgaattccgaggggatgaggccaaggcctcccaaggcatcgaaggcctgctcgacgccggcttccacgtcaccatcaccgccgctgcgaccggcaccttggccagactcaagcgcgcgatcaacactaccggcatcgccaatttcgacgtcatccgctctcaggccatcgacggcttcgtggacaaagccgccaaaatcgccctgctcaccgaacgcgacctgaccggccgcacttcagccgtggccgtggccaaaacgccgaaacgccggcgcaaggccatcgacttggtggaactcaaaaaaggcgattacgtggtgcacgagcagcacggcattggccggttcatcgaaatgcgccagcgcaccatcggcaccggcgccaacaaaaccactcgcgaatacctggtcatcgaatatgcgccttccaagcgcggcgccccggcggacaaactgttcatccccaccgaccagctcgaccaggtcagcaaatacatcggtgccgaagcccccaagctcaacaagctcggcggctccgactgggcggccaccaaggccaaggcccgcaaacacgtccacgagatcgccgacgacctgatcaagctgtactccgcccgccagcgcgccaggggcttcgcgttcagcccggacaccccatggcagaaggaactggaagatgccttcccctatcaggaaaccgccgaccagctcaccaccatcgacgaggtcaaatccgacatggagaagcccgtgccgatggaccgcctcatctgcggcgacgtgggcttcggcaaaaccgaaatcgcactgcgtgccgccttcaaggccgtgcaggacggcaagcaggtggccgtgctcgtgcccaccacgctgcttgtccagcagcattacgagacgttcagcgaacgattcgagggtttcccggtcaatgtggcggccatgagccgattccagaccaccaaagagatcaacgagaccatcgagggtctggaaaccggcacggtggacgtggtcatcggcacgcacaagctgctgaacccgaaaatcaagttcaaggatctgggactcgtcatcatcgatgaggagcagcgtttcggcgtggaacacaaggagacgctgaaagccctgcgcaccaacgtggacgtgctgtccctgtctgccacgcctatcccgcgtacgctggagatggccgtgaccggcattcgcgagatgtccacgctggccaccccgcccgaagaccggttgccggtgctgacctatgtgggcgcctacgaggacgcgcaggtcaccgcggccgtgcgccgtgaactgctgcgcggcggccaggtgttctacgtgcacaatcgcgtgcaggacatcgcgtccatcgccgacaagatccatacgctggtgcccgaagcgcacgtcggcatcgcccacggcaagatgggtgagaagcagcttgaccagatcatccgcgacttctggcatcgtgacatcgacgtgctcgtgtgcaccacgatcatcgagacgggtcttgacatatccaacgcgaacacgctgatcgtcgaccatgccgaccgtttcggcctgagccagcttcatcagctgcgcggccgcgtcggccgtggacgtgaacgcgcgtacgcctacttcctgtacgacccgtccaagccgatgaccgagcaatcccacgacaggctcgccacgatcgcgcagaacacggcgctcggctccggtttcgacgtggccatgaaggatctggagctgcgtggcaccggaaaccttctgggcgacgagcagtccggccatatcgagggcgtgggcttcgacctgtacgtacgcatggtgtccgaagccgtggagaagtacaaggagcccgaagagaacgtcgagccggtggccgtgtccatcgacctgcccatagaggcgtcgattccgatcgggtacatcgattcggacaagctgcgtctggaagcgtaccgcaagctcgcctccgctcgcaacgaggccgatttgaaggatctggaagaggagcttaccgaccgttacggcaagccgccggtcgaattcgagaccctgttcgacgtggcccgtctgaagttcaaggcccgcaagctcggcatttcggagattctcgcgcaatccaaccgcgtgcgcatcggccgtatcgacccgcccgaatccatccagatgcgtatgggccgtatttacaaaggcgcccaataccgcccggtcacccaccagctcatcgtacccaccccgttcaccggttccctgggccaaggccccatgagctccgaccaggtagtcctctggactaaccaactcctcgatgacttggcatggaggccacaacgatgaaaaaccaacacgcggcaacacttgccggctatgagattccccgcctcggcatgggcacgatggcgctcgccatcgaggggcgcccctctaaccatgatcaggcaatcgagaccatccatgccgcgctcgatgccggagtccgttatttggacacggcttggtcctattatctgcccagcgcacccggcaccggcgaaccggaggatatgggctatggcgaatatctggtccgcgatgctctgcactcgtggcatggccccaaagatcaggtgctcgtagccaccaaaaccggctggctgcgcacgcttgacggcaacggcaactacggctggcaggccgacgcccgacccgaaaccatgatcgccaatgccaaggaatcagcccgccgcctcggtgtcgatacgctcgatctgctctactcgcactgcaacgatccgcaggtgccgtacgaagaccagatgggcgcactcaagcagctcgtggacgaaggtgtggccaaagcggtcggtatctccagaatcgacaacgcggacatcgaagtcgcccacaacattttgggcgatcgtctcgtggccgtccagaaccagttctccccggttcaccgcgaccccgaacacacgttggagacctgcgaaaaactcggtttggctttcgtctgctggtcgccgctcggtggattccttgacccgttcaacgggcatctgttcgaccggttccgcgaagtcgcgaagtcccacgactgctcctaccagcgcgtcacgctcgcgtgggaacttgcgcaataccaatatctgttcacgattccctcggccagaaacccgcaggagattcaggactcgttcaaagccggcgaactgaaattgtccgacagtgaaatcgactacctcaatggcaaggacatcgactgagcgatttcgtccgtactgtcttgcaatcaggcggcacactggcattgtgagcgctaacactaaattttgggcgtgttgttcacaacgtccacaaatcgcactactcttaagaatgtcattcaagatacacaaccgttttaaggagtagttgtggcagtaattgaaagcgtttacgcgcgtcagattctcgattcccgcggcaacccgaccgttgaggtcgttctcgacaccgaaga

SEQ ID NO: 1772 - DNA, 7748 bp, Unknown
  MAG_14  MAG No. k141_29189
accgaggatttcaacaaggaccgcgccaacctgatcgcggcggacgcggcggtttcggccggcgtgctcaaggcggccaccgactatcgcggcgtgcgtgcgctgccgcgcgacttctccatcgaacttaagcaaggttcgatcaccaatcaggagcgttccggccgctgctggatgttcgcctccctgaacacgctgcgctacgagcttatgcatcgctggaaccttgaggatttcgagttctccgagacctacctcttcttctgggatgcgatggagaagtcgaacacctacctggagaatgtgctgcgcacgctcgacgagcccaccgactcgcgcctgttcgaggccatcaactggggcccgtccgatgacggcggctggtggcagatgttcgccgcgctggtgaacaagtacggtctggtgcccaagagcgcctacccggagtccgagaactcccgtaattccgatgatttcaagcagtacctcaactccaagctgcgcgagttcgcggccgagctgcgccgccgttcggctgcgggcgctggcgaggacgagctgcgcacgctgaaggacgagtacatgggcaccgtgtaccgcatctgcgccgtgtcgcttggcgagccgccggagaagttcgacttcttcgcgcgcaccaaggatgacgatgaggataagaagggcgaggcctgcaagtgcaaggccgaggccgacgcagacggcaaggccgaatcctgcaagtgcggcgactcctgcaaatgcgagggcaaatccgacgccaaggcctgcaagtgcgataaggacaagtccgacaagccgaaaaccggtaaggacgagcgcccgcagattcgcgagatcggcatcaccccgcttgagttctacaagaagtacgtgccggtggacgtcaacgatttcgcgacgctggccaacgccccgctcaagaaccgcccgttcaaccggcgctaccgcatccgcttcagcgcgaacgtggccgaggcgggcgatatggagttcgtcaacgtgccgctggacgtgttcaagaaggccgcgcttgaccagctcaccgccggccatccgatctggttcgcctgcgactgcacgcagttcgcgctgcgcaaggacggcttcttcgaccagtccgtggtgcgcgtcgaccagctgttcggcaccgagttcaccggcgacaaggcccacggccttgaatacggcgacagcccgagcaaccacgccatgactttcaccggcgtgaacctcggcgaggacggcaagccgaaccgctggaaggtggagaacagctggggcaaggacgccggcaaggacggctactacgtcatgtccgacgcctggttcgaccgctacgtcaccgagctcatcatccgcaaggaatacctcgacgacgccacccgcgccctgctcaccaccgaaccggtcgaaatcgacccctggcagcctctcacccgccgctgccgctgacgttccgctggcgggagcatatattcgaatgccccttctctctgttcagagagaaggggcattacgttatgcgagtacgcccggccgcacctattcgagactatcgcggctgagctgagcaaaagtgccgtcatcatcggccaattgccggtaggttccggcctcgctaattgttccgaactagttatccacagagttatccacatctcccgcaagctagagccacataccccggttttcatagcgagcatgtgaccgctgcgctacggtggcgtcatgaacgacatattgcccactccaccgcccggcgtattcgacgacgaaccgtccggctggacccggccccacacaccgggcgttgcgtctgcgcgcaccatcaatcctgagctacgttcatcaccacgtatggtgagttccgcgccaactgtgattacaggccctgtgtcgccagcaatgagcgaaaccctcacccaacgtaagcgggaaatgcttaaacgatgcacggacgccgcgcaacagctcgggcaaccggtgctcttcggcatggccacatcgccgatactgcaatccgtgccgcttcccaaggattgcgatatcgaccccgccgagctccataccgtctccgactcacaccgcacacgaatacgtgccatcgtgccgccaacgacaccacacatctggaagccgctgagcgatgcgcacaatgtgcgtatcaacaaacatgtgtacgcactggatctgatacacacttgggcacaactcgccactcatatatcgctcgaatcgctggtcatacttggcgacgcaatccttacggcaatcgcccgcaagccgggtctggcgaacggccgcactgctgacggcatttatcaggacttcgtgcggcaagtcaccgaactcccgaaattcaacgcaaaatccaagtgcatgatcactcttgcattcattacgccccgcgtggactctccaatggaatcaaagacccgcatcgcgacgacgaaatacgggcttccgccagccgtgacaaattacacggtgcccggcgcgacattcagcaacggcgcgccgataacgctcgatctcgcttggcccgaatttcgcgtcgccatcgaatatgacggcgatcatcatcgcaccgacaaaaaccagtggcggcgggacaacgacaagcgcgaactgctgcgacatcatcattggatcgtcatcatcgccactgccgcgaacatggccgatgagccatcccaagccgaactcgcctaccgggtcgggcggcagttggcattgcgaggtgccgtattcgatttcactttgacggcaacgccactcgatgagctcgcccggcggaggcgacgaagaatataacgtttatcgcgaaagtcgtacagtatccatgttgcgccgacgctgcgcgactcggtgtccgtgtccgatgtcccggtagcgatgtcaatcgatttatgtgtggaccgggccagatttcgctgtcccggttctccatttcgcccctttttgagcaaccaagacaaaatttcattcacctatcaccccaccgtgcaatattcgccatcgtacatcggcggaattccggggttttgggattatggataatgggcgtttacaaggggggctgtcccggttcccaaaaagaagccgaaatcacgaaccgggacagcgaaatctgtcccggtaatcgcgtcaatcggttgccgtcatcaccggaacatcaactgcgcataggtcgaacgcttcaatgcgcaacaggcatgcgaccatatcgcgatagcgatattccgacggaagtatgggactcaccacgcgaccaatattatttgccgagctttggagcctcgtgcttggcgtggcggatcacggcatcggggaaaccggcgtggatgtagtcggacagcatccgcaatagcctctcgtcaaaggtgtgccgctcatcgctgctggcatcgaccaggatgaaatcccatgagtattcggtgtcaccgtcgttgatgatgagtccgcggccagtgatttttgcggccagcaacgcggcgatctgtatggcgcctcgcttgaccaaggccgattccgcttgagtcaggttgcccgaaaatgtgacggtatacatcatcagtccccccttctttgttattttctagaacagcaatgccttattgtaaacagacagcactctgccataatccttttttcaatatgcggcccatggcattcccagcattaaaaaaagaaacccggcggagggggccgccgggtgagagagaagagagaagaagggttcagttatggggttcgaagaacctcgccaccggtatgaacttcattccgttgacatcttctatataaccgccccatgcttggcgaattgatgtgcttgtctgggaaaagtcttggcggagtgtgacgaatttgtgacgcccgccgacaaccggcctcgcattgtcggggcttgaccgcacatacggcaacgggccacctcgcaacacttcatgtgcgaggtggcccgtcagctacgagctagcaatgccgaatcactcggcggcgagcttggccttctcggcggccagacgctcggcttcggcggcacggcgagcagccagcgcttcatcgaagcgagccagctcctcttccacggcctcggtcggaatcttggcgaagatcggtgcgggcttaggcaccacggcgccgacctcgatcgcctcgctcttccacgggtgcacgttcacaccgagctcgtaatcgccggtgatgatcggatacgtgaagccgggcttgtcgagatcctcgacttccttgagctcaggcagcggcgagaaggtaccggtgccgccgagcgcctcccacaccttctgtgcggagtgcggcaggaacggcgcgagcaggtggttcgcgtcagacacggcctgggcggccacgtgcagcacggtgccgagacgagcctggtcgtccttaatcttccacggttcggtggcagaaatgtacttgttgatgtctccgaccacgcgcatcgcctcggatagggcgtgcttctggtggtgggtttcgatggaggagccgaccacgtcgaacgcggcggaagcctcttccagaaggccacggtcttcgttggtcatcgaatcctcgtccagcggcggaatctcgccgaagttcttgttgatgaggttggccacgcggttcaccaggttgccccacgaggaggcgagctcctcgttgttgtggcgcacgaactcggcccacgtgaagtcggaatccgaggattcggggccggccacggaaatgtagtagcgcacggcgtccacggggtagcgggcgaggatgtccttgacgtagatcacgatgccgcgggaggagctgaacttcttgccttccatggtcatgaactcgctggccaccacctgctcaggcaggttgagcggacccatcgggccggtttcgccgcccttggagcccttgccgttgtacgccagcatttcggacggccagatctgggagtggaaggtgatgttgtcctttcccatgaagtagtaggccgggcagctcggatcgttccaccattcacgccacttctccgggtcgccctggcggcgggcccattcgatggaggccgacaggtagccgatcacggcgtcgaaccacacgtacagcttcttgttcgggttgtcgatccagcccttcaccggcaccgggataccccagtcgatgtcacgggtgatggcgcgcggcttgacctccttgaacaggcccagcgagaagttgatgacgttggtacgccagcccttgcgggtctccagccatgccttgttggcttcggcgagcgccggcaggtcgaggaagtagtgctcggtctgctcgaagcgcggggtttcgccgttaatcttggagacggggttgatgagctcgtccgggtcgagctcgttgccgcaggcgtcgcactggtcgccacgcgcaccttcggcgtggcaaatcgggcactcgccctcgatgtagcggtcgggcagggtacggccggtggacgggctaatcgccacctgctgggtgcccttgtagatgtagccgttctccaagcactgcttgaacatctcctgcaccacgtgctcgtggttaccggtggtggtgcgggtgaacaggtcgtagctcaggccgaggtcgcacagatccttggcgatcacgcggttgtaacggttggccagttcctgggcagtgaggccttccttctccgcctcgacgagaatcggggtgccgtgctcgtcggtgccggacaccatgagcacgtcattgcccttcatgcgctcgtagcgcgcgtagacgtcggagggcacaccaaatcctgcaacgtgaccgatatgacgggggccgtttgcatacggccaagcaacattcaccaaaacatgactcataaggcttgattatccggcgcggcggggacacgcccggatagctgccgcgccgccatcctcatcccactcacctatccgcccgtaacttcccccacatacttatccgtacaccgcttgcgcgcttatccgcatacgcattcgcacacgtatccgtacgtgcatccgtacacacgtccacgcacccatccgtacgcacgtccacgcacatccgcacacacttccgcctgtcgatatccaccgagttatccacatcattcgcgcacctagtgaagttatgcacttatccaccgttttcgcttatccggtggcgcgcaagccgtacttctgcatattgttcggtcatggatatcacagcaggtccgatgacggacatcacaacagtcacctcgccggcaaccgcgcagcccgcggtgccgccgatactgtttaccaaggatctgccgggaccgctcagccttaaccgtctggccgccttcggcgcgttacgtaagctcgacgattccgccggctactggatcgagcattcgggcacactgtatggtcgcgcaaaaatcgtcgcggaggtcgccccgtttggcactgtggtgtgttcgatgaccgccgcttgggtatggctgggaggccccgactttccgagcaccatagacgtgatctccacatcgcacttccgctcggcatccgtcagccgccgtatccgcgtattcaaaagattgacgttgccggagcaaatcatcaagctcggcgggctgcctgtcaccacgccagcccgtacggcttgcgacctggtgatgagtcctgaagacatccccgatccttccaccgtcaacgcactggtgtgtcagctgatgtccgcgtaccagtttcggccaaacgactgtctgcaaatcgtcaaggagcatcggcatcacaagtatgccggacgcgcacgcatgttttttgaatcggtgcagaaggagattgacgaaccggctttggagcaatgcgcatgacgaggggattcatcgccaaaggacatcgcagaggccgccatgccgctcaccgtttacggcatttgcggcaggcgcaacggttgcctcgccacgcggcggcggcacactcatccgaatccgcatcgcgcgcaatctcggatatgaccgcgccgcctgaaccacccatcagacttacgcccgcggtggcatgttcgcccgatacggatgttgccgtgctctggcacatcgcatatcacgtgcccgaactgcgtaaatggctggttgccaatcccaaagccgacgcgcctttgctggaattggtctcgcagcgtggtgggcccggggtccggcaggcgttggaaatattgttcgagtcgatggaagcgtaacggggagataatcgccggctgctgcgctatcccttgattttcagcacagccgcatacacctgcttgcgattggccaacgatccgtcagccagtggatgctcctgcaccacttgcgcgatggcgtccttgatacgcaggccgtcctccaaagcacggtcgatggccagcacggccatgtcatccacgctcaacgtactgggcgcggccgcttcggcctcctcgttggacgcgccgccgacgaccagcaccatctcgccacggggcggatcatcaatcacactttggcgaatctcgccaatcgggccgcgacgaatctgctcataatccttggtgagttcgcggcacagggccatcgggcgattcgggccgaacgcgtccagcagatcgtccatcgaatcggcaatgcgatgaggcgtctcgtagaacacgatggtgcggcgttcgggcaacagcgtgcgcagatactgcacgcgctcggaatgctttcgcggtaggaagccctcgtagcagaa

SEQ ID NO: 1773 - DNA, 13914 bp, Unknown
  MAG_14  MAG No. k141_30649
ctacttcgctttagacttcgatgcgaccgatgaccaggtgaccagcaatatcctgccatacttccgtgcggtttgttcgtctcttggtggtggatacggagtagggatttacgcgtcccgcaatatttgttcccgcgtcatcggtgcgggatgcgcgagtaacgcgtttgtgtccgacatgtcgacgggattctcgggaaatctcggcttccctattccggacggctggggctatgaccagttcaccgagattgacgattacaagggccagggctgggatttggaccgtgttgcctattccgggaaggtatcagcatgcgtttcactgttgcctgccgtgccagtgcctgcgcctgatcccgatcccgtctcgccagaaacggatccgctgctaagatgggtcgccgtcacggagcaggagtgtcgcaaagcccttgccgctctgggtacccaggtagcggtttacgaggacagcatcggtcaattcatcctggaatggctccgcaaacctgaatactggtcggaaggcggtagcgggacacaagcaatgtggcacgcatatactcctgaagtttcgactccgcccgacttggacgcggcgcgtgtggtatgtgccaatgtatgcgaagcacagccttcaattaaagagaaactgccatcgactcgagatgttgcacacatggctgcaactgctctcggatacctgacatggggtatcgaaaacaatccagccaaatatggtctaggcgatttaggtggctggcctctcgacttgttgcagatctggggtgcctatcgccgtgacggcaagcataccgacttggcagcatggctctataagcaccttgggaaggacgaaggattcgggtacgatgacgttcttgcggatgcagatgcatggctaattgctcagtatatgattactcacccatccgatacttcgttgtctacatcgatgcgtgatgtatttaaacaaagtgaggcgaacaggattaaacgattctatgacaagcgattcgagaacaattctgacaaccttgctgcggcgttccagaaactggtcgatggcattgacttcgggatctttgacaatatttggtattcagctaaagcattgaaagatgcttctcatgccgataggcttcctgatgtggcagaagcagacacccttgcgcggatgtatgctgcttatctggagagtccgcgtcgatagaggctagctaatgaatcggtgaggaagattccagagactgcctcaccgattcattaactgcatacagacgcggctgcttggcgaagagacacgacgtctaccagccttcctccattgcggttgcccagagatagaacatgaagagcagcagactgaagagcgagatgatgaatgttgcgatttttgcaaagatgtgcttattgggaagcggctgagaaacaccggggaactgatcatcaacgaacagctgcgcaatatggaggattgcgactgcaagccagcagacgagtccagcacctaatgtcgccagaagccgatgagaatagacgatttgttcagccggcgttttcccacaaggaggggaaaacgttgttaatatccggcaagcgacatcgtagttgccatcatgaggaccaaaccagccaataacagaaggggatagcaataccagtcctatccaccacagcgtgcgtcggatggtcgcgagtctgtcgcccggcctagtgtccggcttgccgccttcgccctccgtcccggcaccgtccgcgggcgtgtggtccccctcgtgcgcgtccgtcgtcccgtccgtgtttctttccgcgtccatatgtccccctccgatcatccgagtctgccgctcggcccgcgcgcccgttctatgtgcgccgtcgccggccagtctagggccgtatgacgcgagcggggaggcccgcgccgtttatcggcacggaacctccccgctcgcttttgtcggtcggtcggccgggaatcagcccgtgttctgcaggcccgcggcgacgccggagacggtgcacaggatgaggtagatgaatcctgcctgttggctttgcgagagctcttccttgtccaccttcttgcgcagcgacttgagcgccagcacctgggtgacggacagcgcgtccacgtatggggagcggatgcggatggcctggccgagcacgtggcggtgctgcaacggccacttgtcgcccacgatggccagaacccacttgcgggtgagctccatctcgttgagcaccttctcattgaggtcctcgcggtcgccgagggcaaggtacatcctggcgatgcgctcgtccgtcttggcgatggacatctcgatgttgtcgatgaaggtggagaacagcggccattcctcgtaagcctgacgcatggtctccagatcgccgaacttctcgcatgcagtgccgagaccgtaccaagcggccaggttgatgcgggcctgggcccaggagaagatccacggaatcgtgcgcaggtcgtcgagcgacttggcgccgaggccacgcttggccgggcgggagccgatcggcagcaggccgatttcggtcagcggcgtaacgatcgagaaccacggggcaaagccgtcggtgttcaacaggtcgaggaagcggttgtgcgcggcctcgtcgagctgagcggccatgtcggcatacttctcggtcatctcggtgttgcgcttctccacactcggcgcggactgcagcaaggtcgccgcagccacggattcgacgtggcggatggccagcaccgggttgccgtaacgggcgaagatgacctcgccctgctcggtgagcttgaagcggcacttgacggaaccgaccggctgggcgagcaccgcgcggttggcggggccgccaccacgaccgacggcaccgccgcggccatggaacagggtcaggtcgatgtcgtgcgactcagcccatttggcgatgcgctcctgagcggagtgcagggccagcgtggcggaggtcgggccggcgtccttcgaggagtcggagtaaccgagcatgacctcgagcttgttgccggtggccttcagacgagcctgaacctcggggatcttgatcatttcctcgagcacgtccaccgagttctgcagatcctcaagctgctcgaacagcgggatcacgtcgatggtgggcacgtcctccgggtgggagaaggccaagcggttgagctcgtagacatccttgatgttctgggcgctcttggtgaaggagatgatgtagcggcgggcggccttgaggccgttgcgcttctggatggcaccgagagcgcggaaggtgtcgagcacctcgtgcgtcatcggctgcagttcgccgcgctcgccgtgcaggccgtgctcgcggatatccgcaagggcgcgggcgtgcaccacggagtgctgacggaactccatctccaccatgtggaagccgaaggtctcggtctgccagatcagatcctgcagcgggccgtaagcggaacgcttggcgccggcggcggccagcgaacgctggaccaccttgaggtcggcgaggaagtcgtcgcaggagtggtacatgaggtcggcgtcgcgctcgatggtgtagtgcagacggtcggccatcaccagcatgaccgcgcggtgcagttccttgttggagatcagggcggccttgtcggtcagacgctcgctcatttccttctggtggctccagaggctcttgagctcggcgctcggcggcgtggtctcggcttccatcgtgaggttgcggcccacggtgcgggtggcttcctcaagggcggcgattacgtgatcggagaacttgcgggccacagcgcggctcaccttggcggtgacgttcgggttaccgtcgcggtcggagccgatccagctgcccgggtggaagaacgcggggcaagcgggctcgacgagaccggccttatcgcccaggacccagtcgtcgaagcgacggtagaccttggggatggtgttgaacagcgtgttgtcgaagatgtcgagaatcgtgtccgcttcctcaaccggggtcggcttcttcagcgcgatcggagaggtgcggaacagggcgtcgatctcgttgtagagacggcgcaggcattccttcttatccgagccgccgaggcgcttgtactcctcaagcaattcggaaacgcggcggatcttgccttccacggccttacgacgggcctcagtggggtgcgccgtgaagacggggtggaattcgagctggttgagcagttccttggccttggccgggccagtctcattgatgagctggtggtaggcgacggtgagctcgttgatcgggtcgaccgcctggtcaacggacacgttgttctcgcgctcgtggagcacggaaacacggtagttctcctcggacaggtttgccagatggaaatacgtggcgaatgcgcgggccagcagctgggcgtcgtgcaacgtcatgttgtcgatgacgttcacggcctccttcaggccatcctggtcggggttcggatccttcagctcggcgaaatgctcggcgctggcctccaccgcgtaatgacgcacggtgtcgaacgtagacagcagttcggggttgtattcgcccagtacgttacgcaggatctcaagacacagatccatgtcgtacttcaggctttcgggaagatcatgctcctccgggccctttcggccggtcccggtagtgacgatggcggcgtcagcgggagtgatctgttcttcaggtgttgccatataacctcctttgccgaataacaggttgctcggtctaccggtcgtctgcggctcctccgcagttgttgaggccagtcgttgcgagcccacagcccatattcaacgtggttgttgtgtgggcaatagtgtatccccgcgaaatcgctatttgcgttacggagtccatatagtgcgccaagttgtccacctatagagaccgaatatcggacagcatatgagacactgtccgattcgcggaagatttgagcaccttacgattgctggcgggggaggcagggagtagtaatgagggatgtgagcgaacagaagaaaaaaagtgcgcccgaagcgaaaggcgcaacggctgtacgtaaattccacacccactccattccgctggacatggaagatattgcgcgcgattgggaaaaaccggtggtggacgccggtatcgccgccaaagccagcgtgattgtacgggtcggcatgctggacctgggagccggcaccggctccttccgcgtgcgtgaaatgatgcaccgcatcgcctacccgctgggcgtgcacgtacgcgccgacgtgaacctgacggatatcgaggccacctgcacggatggtcgtaaccgcatcaccgaagtcgtggatttgccgagtaccggcgtgaacaccgaacgtatctggctgctggaacatttcgccgactggttctccgtgaatctcggcaaggggtcgatgtatcacgtcgattcgcaactgtccgatggcgtggtcaagcatttggacgaacgtgacgcttcgcagtattcggccgatctggccaagcgcctgcgcgaacgtgccaaggccgaggctgaggcggccaacggcagcgtggacgaggcgctggatcttgcgtcgaaaaccaaggtactcgtgacctccgtggccaagtccttggacgatgacaatgaagaagcccaccgacttttggcggacagcgcggaagtcactccggtcgaagacaaagcggccgaagagaaggcctacgacgatgccgaagtgtttaccggtgactccaatgagtcggttgaatcggcgaacgcggcgaatgccgaggcgggcgctgagggcgcggcggcgaacggcgcaaccgccgaaagccctgctgcaagcagtacgaagcgcaagaatcgcgtgcccaaggaatacgccgaacacttcaacgagcgctccgacgaagagaaggccaagggcggtatcaccgtgcggcaggcgcacgagcgactcgatctgattgagcgccgcaagccgctgtacaagccgtggttctccggtctggcctccgccctggcctgcgcggccttcgtgttcctgctcggcggcggcccatacgacatgatcggtgcgttcgtgggcgcgggccttggccagtggatgcgtcgccggctgtttgcataccatctgaaccagttcttcgtcacctttgtgtgcgtggccgcggcggcgctcgcctgcaccggcaccctgcgactcatcggcattttcgacccagtcgcgctctcgcacgatacggcctacatcggcgccatgctgttcgtgatccccggtttcccgctcatcaccggcggactcgacatggcgaaaatcgacttcccctcgggcatccagcgcgtggcgtacgtgctgtgcatcatcctgatggccacgctggcaggctgggccgtggccgtgatggtgcacctgcacccggaaggctttgaaccgctggggcttgacccgtgggtcaacggattgctgcggttcgtggcggcgttcgtcggcgtgtggggcttctccgtgctgttcaattcgccgcagcgcatgtgcctggccgccgccctgatcggtgcgatcacggacacgctgcgcttggaattgcaagacttcaacgtggcacccgagatggctaccttcatcggcgcgttcctggcgggcattctggcatcggcgtggcgttcatccgtgcgacgtggctggctaccgccgcacctcggctacccgcgcatctgcctgaccgtgccgtcgatcgtgatcatggtgcccggtctgtatatgtaccgtgccatgtggtacctcggcagcttccagaccatgaatgcgctggactgggcgttccgtgcgttcatggtgattatctgtctgccgatcggcttggcgatggcccgcgtggtgaccgacaagtcctggcgctacgacatctgaccgtcatcttggctcccctcaggtggggagctcggataaaacagcgtctcagtatggaaacggtggaaggtgcttgagcccttgtatccactaccatcaggcgaagtgcgttgcggccgtattcacggctgtgacggtctgtatgacgccgctccggcgtcaatcgcatatcagcacgcatatcagcacatagttctgccatggcggtagccgcttggcgtcatgattggggaggtgtcgcagttggccaacgatttctggattctgctggccatggtcatctattttgcggccatgctgtccatcggattcatctactccaaacgctccaactcctcttccaaggaatactttgcgggcgggcgcggcgtggggccgtggctcacggccctgagcgccgaagcctccgacatgagcggctggctgctgatgggcctgccgggcctggcctacttcaccggcgcggccgacccgatgtggaccgccatcggcctggcgctcggcacctatctcaactggaagcttgtggcccggcgactgcgccgctactcggtagtggccggcgatgccatcaccattcctgacttcttcgccaagcgtttccatgacaagaagggcgtggtctccaccatcgcggccgtgatcatcctggtgttcttcagcgtgtacgtgggcagctgcttcgtgaccgtgggcaagctgttcgccacgttgttcggtttcgactaccacgtcatgatgatcatcggcgcggtggtcgtgttcgtctacaccgtggtgggcggctacttgtccgtggtgatgaccgacttcattcaaggcatgctcatgttcttcgcgctcgcggtggtgttcatcggcaccgtggccagcgcgggcggcatcgacaacaccgtggaattcctgcgtgccatccccggctacctgtccggcacgcaggtggccgcgcccaagctggacccggccaccggccagcagctcgtcgaggcgggcaaggccgtgttcggcgcgccctccgactacggcatcatcaccatcatctccatgctggcgtggggcctgggttacttcggtatgccgcaggtgctggtgcgcttcctgtccatccgcagcgtggaagaagtgcgcaagtcccgaatcatcgccacctcctggtgcgtgatttcgctgggttgcgcagtgtgcatcggcttggtggggcgcgcgatgatgcccaccgaactgctgacctccaccgatgcggaaaccattttcatcgtgctggcgcagaccctgctgccgagcttcatgtgcggcgtggtggtctccggcattttcgcggcctcgatgagctccagctcctcgtatctgatcatcggcgcttcggccatgggcgagaacatcttccgcgggctgctgcaccgcaaggccaccgacaagcaggtcatgatcgtggccagggtcacgctggtggtcatgttcctgttcggcattctggtggcatacgaccagaactcgtcgatcttccaggtggtgtcctacgcgtgggccgggcttggcgcctcattcggcccgttgatgctgtgctcgctatactggcgtcgcgccaacaaggccggcgccgtggccggcatgctgtccggcacggcggccgtgctgatctggcacaacctcgtcaagcccttgggtggcgtattcgccatctatgagctgctgccggcgttcatcatttcgctgctgttcatcgtggtggtttcgttgctgaccgccaagccgaacgagcgtatgctctacgaattcgaccactacatggacgatccgctgcccggcaccctgccgtccggcaccgtgctcgtcgacgagcccatggaagccatggagtccgaggttcgcagcggcaaatgacacgtgcctgctgtgcggtcgcctcgtatggcagaggagtggcttttttgtggttcggcaggaaccattgaggccaaaacggacttcgaggggctgatttgacgttctggagaggtctacttccgtttcaaggggctgatgcctgagtagacgcggctccaaaacggcggaatggcgttggcgtaagggcattgatacacgtgatctagcggatgatcagccccttgaaacggaagtagacctccggcggaggccaaatcagccccttgaaatgggttttgaataccgtagcgcggtgcggacggtgcggactgactctaccgggcttattattcctgcgtcgtcggaataattggcagcagaggctcgaatttcagccgtttgtacagcggaatacggcgtagctttcggacatcgctaatttgctgggtggtttgccgcatcgtgagctggaccgttttgcccgtaacctcctgtatcctttcggcaacccttcgggcaagggcctcttctcccgcttcgtcgccaatatctaatttggtgacttgaatgtacttccagccagcgtcttcgatcatctggcggcgtctcgcgtcattcagccattgcccggcatgatgagagccttcgtattcgatgcataccttgaattcagggtatgcaagatcgagatatatgggtctggtgttgtttcctacgaatattggataattcacctgcgggcaatccagaccgtatttcaagagaaccaaacgagttcgtgtttccatggaggaatctgtgcccgcgcgcgccaaaagcagggcgcgacggcatttgttatacccgcggaacaaatacgaattggtgccattctctttgtcggctcgcacctgggcctcggcctcatcgagatacagagaaagggcgtcgatggttgttctgcagagccttcgatctcgtcgcatcatggaatcagcgagaacgatgagttcttcaagttcgagatacgcggagaacatggcccatgtgcaagctggtgaagtgcatgtgaattgtccctcgattatgaccgtgtctagtgggaaaggccatacaaccactttgacccccacaatgtgccgtttgtcattggcgtgtggaaccgcaacaatggttgtagttgcaaggcctctgtgtttgcttgatatgcggggtacttcaattgacaaaagctccaacgctgttgtcagggcatagggtgggcgccatgcgcttcgtcgttgaacatctgcgcacgtctgcattcgttgatacttctgcattgtcagctcggtcaatgccgttgagctacccatgatgatcaccccttcgtgatgttcgctttgtcctcgcagtgtagagtccggctaccggccttgtctaccgccccaatttttcggtggataaatgtggataagtcggtggataaactatgggcgttcatcgcagttgcaggcatcccgcaattacatggaacgtaggggtttgcaggcagccagcgggaatcgccgccgacggcgcgattcagcttgaacgaatctccatggcgttcatgcaaaggtggcatgatggcgggtatgagtagcttggtgcgtattgtcaatgccggtgttccggggtctcaggaccgcgtggatgtggtgcttcgcgatggggttgttgcgtctgtcggccctgctggaacggtctcggcttcggacggcacgatgcagactaaggcgcatacgacatcgttggcatacgcgacgaatgccattgcttctggcagcgtctcaatcccaacgtcggccgccgcacccaccgacgaaaccaccatcgacgccgacggcctgtgggttattcccggcctgtgggactgccatacgcacttcacgcaatgggctaagacgctgggccgactggacctcatcaatgcccgttccgccgccgaagcgatggacatgttgcgccgtcatctggatgagcgccgcgccgccggcacgcttgacccagatgccttcgtggtgggcatgcgattccgtcactcgctgtgggccgacgacgagcagcccacactggccgcaattgacgccgtgaccggcgaacagccggtggccctctccagcgcggacatgcactgtggatgggtgaactccgccgcggcccgcaggcttggcgtacatgtggacggatccggtctggtcggcgaactcgaatggttcaacgcctacaccgccttcgacaaggcgccgggcgctgctgaagagactgaccgtctgctgcgcgaggccgaacaggacgccgcaagcaagggcgtggtgggcatccgcgattatgaaatggccgaaaacatcgatacatggaccaatcgtttcgcggccggcattaacggtttgcgcgtggacgccggtgtataccccgagcggttgcaagccgccattgacgcgggttggcataccggcaacccactgccgggcagcgccgggctcggccatgtgggcgccatgaagctcatctcggacggatcgctcaacacccgctccgcctactgctccacgccgtattcgggcatcgagccgccgacgtatggcacgctgagctacacgccgcagcaaatcgaagactatatgcgcctagccaccgagcatggcttcgacatcgcctgccacgctagtggcgacgaagcgaacaccattgcgctcaacgcagtcgccgccacgcacgcacatggatcgatcgagcacgcgcagatgctcaaacccttcgatatcccgcgtttcgccgagctggggctcacggccagtatccagccgcagcacgccatggatgaccgcgacgtcatcacccgtttctgggccaacccggccggtatcccttatccgttcagggccctccacgacgccggtaccacgctgcgcatgggctcggatgcgcccgtggccccgctggacccgtggctggccatttccgccgccgtgttcggctccgaaagctctgaccgcgagccgttccagcccgagcagtgcctcgatgtgcgcacctcgctggcagcctcgaccgccactggccgtgaccgccttgcatccggcgacccggccgatatggtgttgttggacgccgacccatacgccgccgatactccggaagccatgcgcgctatgccgcaacacgtcgtaatgacattgctgtgcggggagcgtacgtattgatgcaagccatcggcatgaagtgaccagaggtccgtcttgatagccgcgttgcacggaaaacatgttgtgttttttgaattgagagttactaacgcttgattctccgtttcaaggggcggatttgagcctttccggaggtctatctccgtttcaaggggctggtcatgcgctcaatctcagataaaatcccattcacgccaacgtcattccgccgtttttgtgcctcgcctacttgagcaacagcccctcgaagcggagatagacctccggaaaacaagaaatccgcccctcgaagtgaagataggacacagcagacgccgcaatacaaaaaacgccgtgtcagttgcccagttggggctgacacggcgtcttgctacgagcggcgggaaaatcagtacttcatgcccatggcctcgcgcacctggtcgagggtctcctcggcgatggcgttggcgcgcttgttgccgtcgtgcaggatgtcacgaatggagtccatgtccttggccagctcggcgcggcgctcgcggtgcggggccaggaactcgttgactgattcgatgacgtatgccttgagtgcgccggcgccggaatcaccgatctcctcggcgatgtccttcgggtcgcggccggtcaccagaccggcggtggtcagcagggcggagacctgcgggcgggcaaccgggtcgaaggtgatgcggcgctcggaatcggtcgggctcttcttgatgagcttggcggtttcctcggcggtggcgcccagcatgatggagttgccgtacgacttgctcatcttgcgggcgtcgagacccggaatctccggtgcctcagacagaatggcggccggctccgggaacaccgggttcttcttggcgtaacgctcgttgaaacggcgggcgatggtgcgcgtgatttccacgtgcggcaggttgtccttgccgatcggcacgacattggccttgcagaagaggatgtcgcacgcctggtgcaccgggtaggtgagcagcaggccggtcaacgcgtggccggacgcctccatctcggacttcacggtcgggttgcggtgcagctcagcctcggtgaccagggacaggaacggcagcagcagctggttctcggccggcacggcggagtgggtgaacatcatggtcttgttcggatcgatgccggcggccatgtagtcgagcaccaggttcagcacgttgtcttggatgtgctcggtggtgtcgcggtcggtgatcacctggtagtcggcgatgatgatgttcgtgttgacgccgcgctcctgcatggcgacacgctcacggatcgagccgaagtagtggccgaggtgcagccggccggtcggacggtcgccggtcaacatggtgaaggacgacggcttggcctccagcttggcgagcgtttcgtccgaacgctttttggccgcgaggaagctcgcgcttatctcattgcctgccgctgtcagttgctgctcgtcggtcatgcgaaaatcctttaaatagggctcagataaacgctttttatggtaaaagtgtgagccgacaacgaacaagccactattagtggtactctctattgttgatgaatcgaacagcacagtaattcgcagggggtcagatgggccgcggacgtcaaaaagcaaaacagcagaaaattgcccgaaagctcaagtacctgaccaccgataccgattacgatgagctggcaaaagagctgagcgagcaggagccgggaacgggctctcctgacccgttcgccgacatggatgaccagtatgcggacaaggatgtggattccgctgctgacgaccacgcttccggtgccgccgaggcagctcccgccgcgcaggaggacgacctcgacgagtacgccaagtgggcagccgaagcggcagccaaggcgaccag

SEQ ID NO: 1774 - DNA, 3627 bp, Unknown
  MAG_14  MAG No. k141_30716
cttcggattgggataccgcgccaacagacacgtgggcacgccattgtggttcttcctcttcaccaccgaaccgaaccgtctgctcaaacctcttctcctgcgcatggggccagccttcccgcatcggccggcgataccccagatgataccccaaggcgcgcaaaccgacacaaacagagccaccgagacacaaacaccaaaccatcacaaaccaagcaaaacccgtaaaacgcaacaaaaacggggctcccgaaccaaatcggaaaccccacaaacacagcccactgggctgtccgctttacggctcggcctctgtgaggggagctgtcgcgcagcgactgaggggagtctctagagcgagaaaccgggccggagcctgctatcggtttttcgtatagcgtattacgggctttcgggcacgcgcgccggccggctcgaatacgatacaaagcatggttactccccgaatcagttacgcgcacctgctcgccaagccgaaccccaagcacgtcgaaagcctgctcaagttctttgagaatggacgctcccagcggggcgccggcggcttcggcgtggagatcgagcacctgcccgtgcacaacagcgacgacactgccgtaagctactacgagccgaatggcatcgaggcattgctcaaacgcttggctccgtactacgacgaggagaaggaatactgggagaacggccatctggtgggtctcggccgttccggcgtcgccgtttctctcgagcccggcggacaggtggaaacctcaatcggcattttgaagaagccgagcgacctaaatacgctgtactccaagttccgtcgcgagctcgacccgattcttgacgatctcgacttccgcttggtcaactatggttaccagcccaaatccagctttgcggatgtgccggtcaaccccaaggatcgctacgatgcaatgaccgactacctcggccgcgtgggtcagttcggcccatgcatgatgcgttgctccgcctccacccaggtcagcatcgactacgtggacgagcgcgattccatcgaaaaactgcggttgggcaccgtcatcggtccgattctggcgtacttcttccgcaacaccccgtatttcgaaggtgagacgaacccatggccgttgctgcgccagcgcatgtgggattatctcgacttccagcgcacgaatgtgctgccgggcctgttcgacccgcgctatgggtgggaggattacgccatcgacgtgctgtccacgccgctcatgttcgctgacctgacccatacccctgaagctgtggcttctggagcaagtcccaaggaactgcatcgcccggccttccgcgagaacgcgggggaggtgtacccggaccgcgaactcaacccgtacgagatcaaccacatcatctccacgcacttcaatgacgtacgcctgaagaacttcatcgagcttcgccactgggattccttgccgatcgagcgtgccgaacgtctgacggagattgtgtcctctctgttctacgtgcccgagcatcgcgaccgcttggaaagctacttcgagggcatcagcgaggaagaggtgttcgaggccaaggccaacattcaggcccacggccgcgaagccacgccgtacggccagccgctcgacttctggaaggaattcctgggattggagggcctcttgtccgacatccccggcgacctgaagcaccccgacgtgttccaggagtaagcgaagaagcatatacagaaaaatctattgcgcgatatcggtgtcgaaggcatgacagaatgttttgttttggcaccgttttgcatatccggccaaggatattggatgtggttgcgcatgggagtggggagaatgcggatagactggcggatatgacatctgggaattcattgcagcataagcgtgttcgcaagtcgccgggggaacgccggcaggaaattctcgatgccgccgtgcgactgatttccgagcgtggctacaacggtacttctgtgcaggatgtggccgatgcggtcggtgttaccaagcagggagttttgcgatattttcctagcaaagataacctgcttgccgcgatgtatcacgagaattacaacacgtttggcagtgtggaagacttcatggcctccggcctgcctggttcagtgcccgatgatttcagattacccgcgtatctgaggttcttggtacattgcaattccacgcgccccatgcttgttcagctgttctcgatattgcaggtcgaatcgttcaatcctgcgcatccgttacatgacgagtttgccaatcgtcgggattcaatatggcgatactattcgacatacaactggaacctgccttccgaattcacctcgtttgaggaggtccggcccacgttgcgccatgctctggagatcatggatggtgtgcaactgaggtggttacgggggccggccattgacttatgcgatgaatgggccgatctggagccggcgatatttccttcgccgatatgggacgggtatcgctgattcgctgtgtgccttgaactgaggcttgtgcttgatggcggcagtaagtatgcgggcgaacgaaggggtcgcatacatacggtcgttttggtgtatgtgatgcgcgcggcataagcgtgttgtatgctgtcaatagataaactaccaattggtaattaaaaagctgttcgatttcactgaggaaagcgacttcgtatgaccgacaacaccacgcctgccgcaactgctgaaaccttaccgtacaagaatcctgatttgcccgctggtgagcgaatcgccgacttgctctcccgtatgacacttgaggagaaggtcggccagatgatgcagcttgacgcccgcggcggcgatcttgaggatctcatcgtgaataagcatgtcggatccattctgcataccagccccgaggatttatctcgtgccgccaagaccgtcaatgagaagacgcgtctgggcatcccgttgattatcggagatgactgcatccatggatactccttctggccgggcgccacgatcttcccctcccagctcggcatggccgtcagctgggacgccgccaaagtcgaagccgctggccgcgccaccgccgaagaggtctcctgcaccggcgtgcactggacgttctccccggtgctgtgcatcgcccgcgacacccgttggggccgcgtggacgagacctttggcgaggacccgatgctgatcggcgaactcgcctccgccatggtcaagggctaccagggcggcgccaaggccggcgaggccctgccgaagaacgcgatcctggcctgcgccaagcatttcgccggttactccgagacccagggcggccgtgacgcctccgaagccgacctctcccaccgcaagctcgaatcctggttcctgccgccgttcgaacgcgtggccaaggaaggctgcggcacgttcatgctcggctacgagtccatcgaaggcgtgccggtcacgttcaacaaatggctgctgaccgacaagctgcgcggcgcatggcaatacaatggcacgctgatcaccgactgggacaacgtcggccgctcggtatgggaacagcatgtcaagcccgattacgtgcacgccgcagccgatgc

SEQ ID NO: 1775 - DNA, 3157 bp, Unknown
  MAG_14  MAG No. k141_30829
cgaaaaggcggcgcgcaatccctccgtgcgtgacctgattggtcgttcatgggtgcacatcggcatcaaaaccaaagtacagcccgactcgtactactacgataaggaccaccccgagaaaaacgagtcactggtcaccttcgcacagcgcgaaaagcaaatgcgaacattgcacagcatgggtgcaggccgactgtacatgcacttggatggttgggcacagcccggatacgacaacgcacaccccgactatctgccggcctgtcaggaggcaggcggctgggaaggcatgaagtcgctggtcgacgcctgccatgagcaaggcgatattttcggcacgcatgaccagtaccgcgattactacttcaccgcgcaaacctttgatgccaacaatgcgattcggctggcagacggtacgatgcccgaacacgcacgctgggcgggcggccaccagacctacctgtgcgccgagctcgcaccggactacgtgcgccgcaatttcgccgaaatcgccgcgcatggcatcaagctcgactgtgcatacttggatgtcttcacctgcaacgaaggcgacgaatgctcgaaccccgaacaccgcatgacccgccgcgaatgctttgaccgccgcgccgaatgcttcgaatatctgctctcgcacggcatcctctcctcgtccgaagaggtatcggactgggcagtgccaagcctgatattctgccattacgcgccatacgacttccagatgcgctcacccaacgagccgcgccaaggtgtgccggtgccgctgtataacctcgtctaccatgattgcgttatcgagccgtggatgatggagcgtgtggtggacggcgacgattacatgctgtacgccttgctcaatggcggagctccatacctgattcgcgatgccgcatacatcggcgttgacggcgacatggacgacgaacagcgcgctcgcacggaaaacgacatcgaacgctgccatacggtcgctgcattccatgagcgggtcggcatgcaggaactggttcgtcacgagttcgtggatgatgatccgctggtgcagcgttcggtattcgcggacggcactgcggtcacttgcgacttccatacgcaaacctatcgcatcaccgattgaccgcatcactgactgaaaaaacaatgacacacagtgggttccgatggactggtggcaaattgccgccgataagcgggtaatatagccaacagtgtcaccgtcgaaacaggagtagtgaaatgccgaatcgtgcagaacgccgtgcccaagccaaagcaggccgcaggggagtgccgtcgcagtatgaccagacccgtggccgtggccgttcgggaatgattgacgaatatcagctgcagcagaagtcccagcgtctgcaggacggcaccgacggcaccgaatggaagcccagcggcggtacgattgcggacaccgaaaccctgctgaccactaacccgaactacacgaatccgaagatgttcaaggcaccgcattcgctgcgtcagtggttccgtgtgggcagctggacgctgatcgccatcgcgattatcgcgttcttcgtggttatgtggctgccaagccatccgatgtggctgatcatcaccgtttccgcagtgttcattgtgggtgtgctgagcctgttctttacggctggcgattccaagcataatccgaatttggatcagaacggcacggcagtctgatcttttgcccggtaaatccggcttgaaaagcaaaacgcacgacggaagttgtgcgttttcttgtatgcggtgccctaaagtaagaagtgcttgagtttctttctgacgcacgaaggagaggcagtccgatgaaagttgatattctaacccgcgaatacccgccgcacgtctatggtggggccggtgtacacgccgaggaactgtccaaggtgcttgccgagcgcatcgacgtaaccgttcgtgcgtttgatggcaagcgcaccgaggcggacattcctgctatcccgaatgctgccgatgctaagggcagcttgaaggtcgtcggctatgacacgccttctgagctggctgatgccaaccccgcattgaagaccttcggcgttgatttgcagatcgccaatgatgtggacgccgacatcatccacgcgcacacctggtatgcctgcttggcgggctacatggccaagatgctgcacggcactccattggttattaccgcgcactctctggagccgttccgcccgtggaagcgtgagcagctcggcggcggctacaatctgagctcctgggctgagaaggatgcttacgagcacgccgatcgtgtgatcgccgtttccggtggcatgcgcaaggatattctgactgcttacccgaacctcgatccgaacaaggtggttgtggtgtacaacggcatcaccatggccgacttcgctaccccggcaccagacgatccgggttggaaggtgttcgagcgttaccacatcgaccgttcgaagcccaccctgctgttcgtgggccgtatcacccgccagaagggcctgccatacctgctcaaggcactgcacctgatttccaaggacattcaggtggtgctgtgcgccggtgctcctgacaccccggaaatcgccgaagaggtcaagatcgcgttcgccaagctggatgaggaacgcggcaacatcgtctggattgaagaaatgctgccgaagcctgagctgaatgctttggaacacggctgtgatgccttcatctgcccgagcatctacgagccgctgggcatcgtgaaccttgaggccatggcctgcggtctgccggtcgtcgcatccgccactggcggcattccggaagtcgtggtcgacggcgaaaccggctatctggtcccgatcgatcagctgcacgacggcaccggcacccccaccgatccggacaagttcgtgcatgacatggccgccgccatcgacaggatcatggctgaccccgaactcgccaagaagatgggtcaggccggctacgaacgcgcccgcgacgtgttcagctgggagaccatcgccgacaagaccgtggaagtctaccagtccgtgctcgacgagcagaagaagtaagtagcgctgcaacgagtgcccccccctcagtccggctgcgccggccagctcccctc

SEQ ID NO: 1776 - DNA, 9030 bp, Unknown
  MAG_14  MAG No. k141_30931
catcgacgatggcgtagtggtggccgcgctgcacgaggtcggccttctcccaagccatgttgtcgcgcaggtagtcgaagccgaactcgttgttggtgccgtaggtgatgtcggcgttgtactgcttgcggcgctccggcggcttctgctcggtgatgatgcagccgacgttcatgccgaggaagcggtagatacggcccatcagctcgctctggtagctggcgaggtagtcgttgacggtgaccacgtgcacgcccttgccttcgagagcgttcaggtaggtaggcagggtggcgaccagggtcttgccttcaccggtcttcatttcggcgatgttgccccagtgcagggcggcaccgcccatgagctgcacgtcgaagtgacgctggccgagggtgcgcttggagacctcgcgcacggtggcgaacgcctcgggcatgatctcgtccaggctcttgccgttttcgatttcctgcttgaacttcggggtttgggccttcaggtcctcgtcggagagggcggaaatctcgtcctccagggcgttcacggccttggccacgttctccagcttcttgagctggtggccttcacccattcgcagggctttgtcaacaatatcgaccactgggttctcccttgactgataagtggtggtgtccgcgtaccagaatagcgcctcgcaccgtcagcaatcgaatttttcgacctttttacgaaaaaatggaccgcttccatattggaagcggtccatgcggtatcagctgatcgtgtcagcaggccttatcttcaggccttcttgacgttctccggagtatcgatttcgaacacgccgtagctccaaccgtgacggtggtagacgacggacgggcgtccggtctccttgttcacgaacaggaagaagtcgtgtccgatcagttccatctcgtacagcgcctcgtcgatgctcataggctcggcgatgtgcagcttgcgacggatgacaatcggcgtatccccaacctggacctccacggattcgccagggccaagatcggaggcgaccgcagcctgcgggctgttgttcggctcttcctccgacacctccggctcgggctccggggcgataacacccagatccaccgggaccgggttcgcgtaaccacgacggtgatccttgcgacggtcacgagtacgacgcagacgcagcgtcaacttatccaacgccatgtccagcgcactgaattcatcggtgctggaagcctccgcacgcaccacggtacgtccggcgataacggtgatttccacgcgcttggcggtatcggcctgacgcgggttgccctcatgggtcagcacaatctgcgcgcgctgagcatccggggcgatagcggtcacacgattcatcttggtctcgaccacatcacggaacctttgcttgacctgcgtgtggcgtccggtaacgacgatttccatgttgacctcctctaactcaagcggtgtaacccgctatatgtgttccgaacggcatcatcaccgaccgggtatgtttcattgtagacgaacaatgggtgaacggccggaaactcgcccagagaatatatgtttattcccgggcttttctctgcaatgaaacgatgtatatactggggttttggcagcagtctcctataagaagatttgataccggtttatcaggctggctcgtttgttcgtcatggtaaatactgcaatggataggcagcgttttcttgctctttctcgcacataccaagctcttacagatttgattcgtctccatacgacacgccacaacacgcccgacacgccccatccgatattcggcgcgtcgttcacgaatcgcccaactatgcccaactatggagaaaacaggataactgggcaacgtcatggcctcaccgcagggcgggatgccgccttttccgcaccttatgtataattgcaggcttgagacctcttgatggccgcggccgtgatcttcattgggatcggctgaggaacttccgggctccatagagcacgatggcggataacgtccgcccagggtgacctgagagatagcgcaacagagaacagaccgcccgtcctcgacgggtaagggtgaaacggcggtgtaagagaccaccgggcctctggtaacagtaggtcgcatggcaagcctcatcgggagcaaggccaagcagatggcggtaagggctgctcgcccgtgtcatcgggtaggctgctagagcctggcggcaacgtcaggtcgagatggatggccatccgtgccgtgcgttcgcgcacggcacgacagaacccggggtataagaggtctcatttttttcttggctacaccaacaattcggcggcgactcggcggagggtttcggggctgtgtcctttgcggccgcctgcggaccaaaaccgacgctgacggacctgacgatcgaggccatgggttttgcgggctatttggcggcccaattcccatgcggcatcttcaaagatgccatcttgctcagcttcgtcacacacctgttcagccagtttgcggtccacgcctttgcgagcaagttccaggaccgcaccacgacgacccatcatgcgaccggcacaatagcgtacggccgattcggcataagcgcggtcgtcaatcagttgcacgcgaatcagccgttcgatgacctcgtccacaatcgcctcgccatagcctttgctgagcaatcgttcgcgcaacgcgccggatgcacgtggggccgcgtccagcaaacgcaatgcagcctcgcggcaagcgtccaaatcattgggatcttcgacaacggcagcgtctctcccccgtcgagaaaaacgtcccggcggtttcggctgaacacgctgctcggcaatgggcatgtcttgcgacgcaacaggattgcgccgcaagaatgcttcggcactaatcatgttcaggccttagctgcgccggccttggcacgggtcgttttggcagcaggcgccgctgcggccttgctgtccttggccacgtcggcagcggcggcctcgctgacagcggccgctgctgcggcttcgccatcttccgcgaactggtcggcggaaccgatcagaccgaactcggccttgaccttattctcaatctcctcggtgatggccgggttgtccttaaggaactgacgaaccttctcgcgtccctgaccgagctgatcaccctcataggtgaaccacgaaccggacttcttgaccacgccaacctgctgagccatgtcgattaccgagccctcacgggaaatgccttcaccgtagagcatgtcgaattcggcggacttgaaaggcggggccatcttgttcttgaccaccttgacgcgcgtgcggttgcccaccgcttcgtcgccattcttcagggtttgaatacgacgaatgtcgagacgcacggaggcatagaacttcagggccttgccgccggtggtggtttcgggattgccgaagaacacgccgatcttttcacgcagctggttgatgaagatggcggtggtgccggcctgagccaacgcgccggtcatcttgcgcagcgcctgactcatgagtcgggcctgcaaaccaacatggctgtctcccatttcgccttcgatttcggccttcggcactagggcggcgaccgagtcgatgacgatgacgtcaagtgcaccggagcgaatcagcatgtcggcgatttcgagggcctgctcgccgttatccggctgggagacgatgagtgagtcggtgtccacgccgagcttgcgggcgtaggccgggtcgagtgcgtgttcggcatcgatgtaggccgccacgccgcccttcttctgggcattggccaccacatgcaatgcgagcgtggtcttaccggacgattcggggccgtagatctccacgatgcggcccttgggcaggccgccgatgccgagcgccatatcgagggccaacgaaccggtgggaatcacctcgacgttctgctcgggctggtcgcccagtcgcattgcggaacctttgccaaagctcttctcaacctgcgccagcgcggtgtccagcgccgccttgcgcttgggatcgagctcgtgcttgtcctcggctgccgggtccttggccggcttggtctcaagtgccatgatcttctccttgtcgaagtcgtgcgcgaatcggatgcctccaccgtatgacggacatgccatgtgaggcaatccaaaccaaccattgtggttccagcttgcccgagctcggccatctgacctccctaagacctactgcggtaaggcttatggcggatgacaagcaccctgtgcacacgtatgcggcttcttgtcactgtgaataactataaccacacacacgaacatttgttcgaatttggcgtgcaacacgccgaaatcgccaatttcacgattcagcgactccgtaatcccgcagtgtcagacggcgggcatgggcggcgcgttatgatcgtggccccaacgcttggagtccggaacctccatttggtcacagagcacattccagaccacgcgtggctcctcccccgcgtccagcgcctcgaccacggtcatattcgccaatttggacatccgttgatcacgcgacagcgaacgaccgtaggtccgaccgaacacctcttcaagtaattcccagaattcccgttcacgcatacacgccagtgtgccaccacccgcaggacagcaaaaacccgcatcgtcacaagcgatacgggttcacagctagacatagattacgggatgcggcttcacaccgccaaccgatcagccctcgactgtgtcgagataatcggccaccatgcgcagcatgcgcgaagtggagactccgagcgcatcggcgatggagctcagcagttcggagctggcttccttctgcccacgttcgacttcggaaagatagcccagcgaaacgcccgccttctcggagacctcacgcaacgtgcggcgatcgcgcgtacgcagttcgcgcagcacgtagccgatagcaccacgcagcgaaacctcgcgaggctcctcctcaaccaccacgggctcggcggcggcagtcggcttgtacgacggcgaatcctcatcccacatacgttcacgaacggcttgacgctgatccttggccttcttggcagcctgcgccttgagcacctgctgctgggcgaacatcaccgcacggcgctgggccggagtcagttcacgcatacgggcgacacccggctgcacagccatcggcttcttggtggccacatccatctgttcgttcactcgggtcatcgtttccatcgccatcgccccttccaaggtcggttcagtgtttccactatgtacaacacgacggtcccgcggttttattccttaaaacttgctgtgaatagactcaagttttgcagaacgtggaatacggtgaggcgacgaacctcttcgcgcatgccatcaagatggagttcgacggctttgagcacttcggcatggtccgcggtgaggcttgcggggatgcgcaggcccacatacaccagtccggccggcttatcaccgtccggaccggggccggccacgccggtggtggaaaggccgatgattcggtcgccgtattccggctggctgtataggcgagcggcaccgatggccatctgccgggcgacttcggggtgtacggcgccttctcgatccaatagggccttgtccacgtgtaggatcgaggccttggcattgatgtcgtaggtgacagcggagcccagcaacacgttggaggcaccgggaatacgcacgaacgcatcggcgagcaggccaccggtcagggattcagcgcaggagattttcgtattgttcgcctcgcagatcttgaggatgccggccgcgagactgtcgcacaattcctgcattggaatatccgtcacttccgcttcggggcgacgaacgtgttgtacaggtacacggcacccgagtagaggcacaggaccaatgccacgtagatgatggcgtaggtcaggaagtagtaagcggtcatccagaacggcgtggcctgtccgttacccaatgaccagaacggcagcagcagcatggacagacccacgcactggaatacggtcttgagcttgccgggccatgcggcggcgatgaccttgccgcccggacgctccatgacgaagaagcgcataacggtgatgccgatttcgcgaatcaggaacaggatggtcacccaccagccgagctcgccgaacgcggagcatacaatcattgcgccgcaagtgagcagcttgtccgcgatcggatccatgagcttgcccatttcggtgacctgattgtatttgcgggccatccaaccgtcgattttatcggtggacgcggcgatgatgaacagtaccgcggcgacccaacgcatgatcaggttgttctcaccccaggccccggcgagaatgtcgagcgtcaggaaaatcaccacgagtacgatgcgcgagtaggtgaccaggttcggcggcgcgttccatccgtcgaacagcgatgatttgggcgatgactgcttgtccattgtgttctcatccatagtgttcacgttacccccatactcctaccttgagtgagtggtggctggatattgactgctattattcgggaatcaggtttcgtgctgatgctgtccgcgcttctctccctccgccccttcgggcacctccctcatcagagggaggtcgatgggtgaattattcgccgagttcgggttgttgcggggcgctggcttcgagcgagctggtttcgcctcggatgaaggcgagcacctgcggcaggtcctgcggctgaacaagcacctcgcgggccttcgagccttcggacggcccgaccacgccgcgcgattcgagcaggtccatgagtcggccggccttggcgaagccgaccctgagcttgcgctgcagcatggaggtggagccgaattggctggtgaccacgagttcggcggcctgcagcagcacgtccatgtcgtcgccgatctcctcgtcaggctccatactgtctttcttctcagcttccttggccatctgttcgatgtcttcgcggtacttcggcttgcgctgggtgcgcacaaactccacggccttgcgaatctcggattcggacacccacgagccctgcacacgaatcggcttggcggaacccatcggcaggaacaacgcatcgccctggccaatcagggtctcggcaccgaccgtgtcgagaatgactcgcgaatcggtggcggacgaggtggcgaacgccagtcgggatggaatgttggccttgatcagaccggtgaccacgtccacggacggacgctgggtggcgagcaccagatgcacaccggcggctcgtgccagctgggtgatgcgctggatggagctttccacatcgttcttggccaccatcataaggtcggccatctcgtcgaccaccacgaggatgtacggatagggggccaccttgcgctgggagccggcgggcgcatgcaccttgccggcgcgcacggcctcgttgaagtccttgacgtggcggaatccgaagaattcgaggtcggagtagcgtgcatccatctccttgaccacccattcgagggcctgtgcggctttcttcggatcggtgatgatcggggtcagcaggtgcgggatgcctgcgtaggcggacagttccacgcgcttggggtccaccatgatcagacgcacctgttcaggcgtggcacgcatgatgatcgaagtgagcatcgagttgataaaactcgacttaccggaaccggtggcacctgccaccagcaggtgcggcatcttggtcaggtcggcggtcacgaagtggccttcgacgtccttgccgatgccggagagcatcgggttcgggtcgcccacggccttgtcggagcgcaatacgtcgcccaagtgcacgatttcgcgatcctcgttcgggatttcgatgccgatagcggacttgccgggaatcggtgaaaggatgcgcacatccgaactggccaccgcgtaggcgatgttgcgctgcaggttggtgactttctccaccttgacgccggggccaagctcgacctcatattgggtgaccgaagggccacgcaggaagccgacgactttggcgtccacgttgaactgttcgaaggtggaagtcagtgcccggatcacgcgatcgttggccggggtgcgcatcgcatggggctgacctttggtcagcaggttcaggtcgggcaactgatacggcctattggcgtcgtcgtctgtaccgttgccggcggcggcattcggctgtccgtccgtattgggcacgccctggccgactccgctgccatccgcatcggcgcctgcgtaggctccggtcgcggctgccgcggccgcggcaccggcggccccggccgctcccatcgccccggctgcccctgcgagcgcgacagtaccggcctgggcggcactgggtgcccacggatcgtctaccgctcccccaccgggcatggcgatggtctggccactggtgatgacgcgggttcgggaagcgtcgccatcatccgcatcggcagcaggcgcagggctggataggtgcggacgaccgtcgtacgaagacgatgcaatggttcgcgcaccggtaatctcgccggtcatcggatcgaccaccggggtttcggcggtggcaccatgctggctggcggcacggtcgaacggatcgtcggcagcatacttgtcaagggttttgtcgtcttcggtcttggatttgcggccgaacagtcgtgcgaacaggctgggccgtgcatcgccggcctgatcgttgtcgttgccgtcgtcgttgccgtcatgcgagggaacaccgtcggcaaaggcgagtgtggtatctcccacacggacctcgttggggaactggctggcgcttccgtcggcctcctggcccatcggcacatacggtttgcgttggattttagctgcgattttgcgcgcatcctccggcaaatcggtgacgtgggtgccggtaatcatcagcaaggagaacaggccgacgaccacgaaaatgatgatggcgaacacgttgg

SEQ ID NO: 1777 - DNA, 12163 bp, Unknown
  MAG_14  MAG No. k141_31299
ccggtcatcctcgaaccgattatgaaggtcgaagctcgtacgccggaagagtacatgggcgatgtcatcggcgatttgaaccagcgtcgtggcaacatccagtccatgaccgacggtgtcggcgtcaaggtcatcgacgccaaggtcccgctgtccgagatgttcggctatatcggcgacctgcgttccaagacccagggccgcgccatgttcaccatggagatggactcctacgacgaggtgccgaagagcgtctccgaggagatcatcaaggcccagcgcggcgagtgacacgcgccacatcatgaagtggccggtgtctccagtcagcggtagtatcgtataccgctgactgggttctggctcttcaaagtggcacataacccagaaacccagtagaataagcgagtccctgtgcgaaagggcgcaggaaactcacgagacgtccaggaggacaaaagtaatggcaaaggaaaagtacgagcgtactaagccgcacgttaacatcggtaccatcggccacgtcgaccacggtaagactaccctgactgccgccatctccaaggtgctgcacgaggagttcccggatgtcaacccggagtacgacttcaaccagatcgactccgctccggaagaggccgcccgcggtatcaccatcaacatcgcccacatcgagtaccagaccgagaagcgtcactacgctcacgtcgactgcccgggccacgccgacttcgtgaagaacatgatcaccggtgctgcccagatggatggcgccatcctcgttgtggccgccaccgacggcccgatggcccagacccgcgagcacgtgctgctcgcccgtcaggtcggcgtcccgaagatcctcgtcgccctcaacaagtgcgacatggtcgacgatgaagagctcatcgagctcgtcgaagaagaggtccgtgacctcctcgacgagaacggcttcgatcgcgactgcccggtcatccacacctccgcctacggcgccctgcacgacgacgctccggaccacgagaagtgggtccagtccgtcaaggacctcatggccgccgtcgatgactacatcccgaccccggttcacgacctggacaagccgttcctgatgccgatcgaggacgtcttcaccatctccggccgtggtactgtcgtcaccggtcgtgtcgagcgtggccagctggccgtcaacaccccggtcgagatcgttggtatccgtccgacccagcagaccaccgtcacctccatcgagaccttccacaagaccatggacgcctgcgaggctggcgacaacaccggtctgctgctgcgtggcctcggccgtgaggatgtcgagcgtggccaggtcgtggccaagccgggctccgtcaccccgcacaccaagttcgagggcgaagtctacgtgctgaccaaggacgaaggcggccgtcactcgccgttcttctccaactaccgtccgcagttctacttccgcaccaccgacgtcaccggcgtcatcgagctgccggaaggcgtcgagatggttcagcccggcgaccacgccaccttcaccgttgagctgattcagcccatcgccatggaggagggcctgaccttcgctgtgcgtgaaggcggccacaccgttggctccggtcgtgtgaccaagatcctcgcctgattttcatcagacaagaatcttcgcttgaactagcgacttaagaaatccccttcgaggaaactcggaggggatttcctataaccgcagcaggatatggatatgtaccacgacttccggcctggatgcgctagtgttgctttccaatagataaacggactgctgcactgcgagggtatgacactgatggcaggccgggaaagaaggtcgatgatgactggttcgcaagccgcacactgtggttccgtatccgcgctttcactgggactgcccgtctccacggcgattcccgaagccaaaggcacactgccgaaagccttgttcgtgggcaaggcaccgatttcaggcaaactcaagcagcgattggtgaacgaaatcgaatccattaccatgctggcgttggtccggtcgattaacactgggcttgcggacggcaaactggttccggaagtgctggtcatcggactgaagcttacggccaaagccactggcataccgaacgaggtcatcgatttgattgccgggcagcgtaaatcgggcatcgtgttcgtgtgcgtacgcgacgtgccgttcgagggcagcacacgtgaggaatgtgcgttcgccgtgcgtcgggcgataccggggcgtgccggccacacgccgatctatcgggtatatgccggcgattggcagccggcgggggaggcccagctggagctggccggctctactattgatgagctgtgggcctcgctgtgctcacagaccattctgggcacgccggagatcgaaaatctggatgcgcgcatcattcgccatactgaaattgctcggctcgaatccgaagtggacaagctcacccgcgaccatcagcgcgtcaagaatcctgttcagcgcaatgaaatctatgccaagctccacaagaccaaaacacagctcgcaaaactgcgcgaagcatagtgatatgaaaaccattggggtcccgctggcgggagctggctcgcaaagcgagactgagggtggtccaggtccgtggcctagggctacgcccaagctaattgaaatattcgtgcatcatacagcgtacagttaaaccatgttccctctgctcgaaaccctggtcgccgtatacgaggtgggccagttcacgctggctgccgacgaactgaaggtgtcgcagtcgacggtgtcgtcgcgtatcgcccaattggagcagatggtcggcgcgccgctgttcgtgcgcaatgcgaaaagcgacgtgacgcccacacaggccgggcggatgctgtaccagaccgccatcggcatcgacggattatggcgggatacgcgtgagcagatcgcccgcgtgcaggaggcgcgtgagccgctggccgtttcgttctcgcacacgaccgcggcgattctgctgccgaaggcgttgccggtgatggctcggaacatggacagtttcgacttcgccgtacacgtgatgaactcggatgcgattctcgaacgggtcagcatgaaggccgtgcagctcggcgtggtggaaaagccgatcgtgaacgattcggtggaccgcgtcaccctgtgcgaggaccggctggtgttggcgggggagcccgacggcgtgtggatggtgcgcgagcacggttccggcgtgcggtattacacggatttgtatttcaagaccgctcaggttgtgcctgcacgcacgatggaagtgtccagtaatgcggcgattgtggcggcgctgtccgccgggttcgggcagtcgttgatttcggaagccgccgtgccggcgggcgtgccggtgcagcgggagcttggcgatgagtttgtgcggcggttctatgcgctggtgccgagatccggtctgacgcacgatcagcgggagttggcggagatgattattgctgcgctgcgcgggtagtcagatagtcgactgaggggaggtcgcgaacgttgtttctctctctccgtccgcctgcggcggccacctccctcatcagagggagatcaattaggtatcgacaaaatcgatgatatgtattggttgcaatgatttgaccgatgtaaatgcttgagcttcaatagacaccgtgagagagttctgtacaaaatggtggaagcgcattaccaccgttgacatgttgttcattggcgttctgactctgctggcctcgctgttcgcctcctggctcaagcagttccccggattcagcctgttcggcgcgcttatcatcgcgctgctcatcggtatgatcatccagttcccgatccgcagtgcctacgtcggttccaatgatggccgcaaggcaggcgtcaaggacgccgctggcctgatttccaacaagctgctgcgcctcggcatcatcctgctcggtttcaagctcaacctcgccgtgctgttcacgcagggcatcaagtgtctgccgatcgcagctgtggtcgtcacgctgaccatcatcgtgtgctatgccatcgcccgcaagctcggtgtcgacccgatgctcgccatcctgaccgccggtggcaccggcatctgcggtgcggccgccgtcatgggcctagccggttccatcaaggtgcctgaggacaagcaggacgagaaggacaacgacgtgaccatggccgtggccatcgtagccattatgggtactgtgttcgcgttgctggagatcgcgctcggcccgctggccggcatgaccaaggaccagctgggcatcaccgccggtgcttccctgcacgaaatcgcccacgcggtcgccgccggcgacgctttcggcgcggtggacatcgccaccctcatgaagctttcccgcgtgctcatgctcgtgttcgcggccatcatcatcgctatctggtgggagaagaagcactccgaggtggagaacaccggcaagaagaccgtggccttcccgtggttcatgctcggcttcatcggcgcttcgatcatcggcaccttcgtgccgctcatcgcctccatcaccccgcagctcgtggactttgcgtacatcgtgctcggcatggccatggccgcgctcggcatcaacgtgaacttcaaggccatcgcttccaagggcaagaagccgatgctcgccagcttcctgacatcgattctgctcatgtgcttcgccgcaggtgttgcgatgctgttcttctgataagcgctccaaatacaaataggcgaaggcgaacgacagtgagcaattggaatgtgtcacctaaaaatcacgtacttgcacaacggataaccccagccgaactggcaggccatcgcaatgaacttcaccacatacgggctcaggtccgtcgcgcccggcatccagccgatcagcagtgtgctgaacgtgaagttccagatccacagcagcacgaaaagcatcacggaacgggtgaagttgcttgacgatttgaacgtcacgttgcggttcatcacgaagttgtaggtcgccgaacacaccacggcgataccgttggagatctgcgagggcacgccgatcaagtgcaggatggcgaacgtcgcatactccacaatggtctgcgtggcggaaacacccatatacttgcccaacacggcgagtccattttgcttcggggttgccgtgcccacggtattttccgcagtgttcgtcgtggccgaggcattcgtgacgtccgcgccctgattgtgcttcacatccgctccattgttcgccatgcccatatacctcccggatgtacctgtgacgttcgacctcgcgatgataccgctgaccgcgtcgggaatcgtcgtggcggtcagacgagaaaaccgcaggccgcagcaacgaccggcacacccagcgacagcaccagataggccgttgccgtggggtagcggcgtttgtggaagagcgtcaccatttcgttgatcgcggtcgagaacgtggagaatccgccgaggaaaccggtggccagcaccagccgccacggttcatcaagtgtcccgcccagtgccagcgccgcaaccagaccggtcaggaatccggcgatgagattgatggtgaatgtggacagcgggaatgcgcgttgccaatacgttttgatggtcgcgtcaagcagatagcggcaggaggcgcctacgccgccgcacaggcagaccaagattggtaggaatacggtcatcacgccttacctcccttgctggtcgtagcggcattcgtatcagcggacgcttcggcggatgcgttcgaggagccggccagatgcgttcctgcccacacgccggcagacgcacaaaccagacccagcgcgaacgtcaccagtagataggcaatgccggccgccacctgaccgtcgcgaatcgcggtgaagccttccaatgccaacgtcgacatcgtagacaaaccgccgcatacgcccatgccgagcccacggctggtgagctccttggcacgcgtgtcgaaccgggaagagccggccaaataggcggtcagacccgcatagcagaagcaggccagcatgttggccacaaacgtgccggtatggaagctgccggctgcgggaatctgtgcgaacgcatagcgaatcgcggtgccgatggcaccgccgcagaagacgaccaacacaatatcaagatggatatcggggagtttgtgcgccggaggagtggccgtgcgcgtgcccggccgggcatctgcggatggggattgcgagcccataatagcctttcctgaaaccgctgaatcctactgaagacacaacgattccatgcaatgtcaaatcgtgtgtaggaactatcagcagtgtgcggttcgaaacaagttcaggcgggtcccatcgccggttctccagattactcatggcgacgaatcgaacagtgagcgtatctcggatattggcctatcgcagtgaattgctcggttgttgccatacctcatgggtatggcgaaacatggtttatggctattggttaatgcaaggcgattattgtttaatagaacacgaggataacgggccttaagcgctcgatgccggaaaacaaggagttatgaacgtatgtctgaaaccatgaaagctgcgattttcgtggagcctggcaagatgaccgtggaagaagtgccgaaggcgatgcttgaacaggatgacgacatcgtgatccgcgtggtgcgcacgtgcgtgtgcggctctgatttgtggttcttccgtgggctgagcggacaggccgcacacagccaggtgggtcacgagtccatcggtgtggtcgaagaggttggcgcggcggtcgaatccgtcaagcccggcgatttcgtggtcgtgccattcccgtacagctgcggcaagtgcccggtgtgcaaggccggcttcgaatccgtgtgcccgcacggcggctacttctccgcttgtcaggccgaatacctgcgtgtgcccgaggcggacggcaccgtggtcaaggtgcccggttcaccggaagactacgatgacgcgacgctcgcttcgttgctgaccgtttccgatgtgatgtccaccggttatcacgcggcggtttctgccgaggtcaagcccggtgacaccgccgtggtcatgggcgatggcgcagttggcctgtgcggtgtgattgccgccaaaatgcgcggtgccacgcgcgttattgccatgagccgtcacgaggatcgcgcggcgctcgcccgcgaatttggtgcgactgatatcgtgcccgagcgcagccaagaagctattgacaaggtgctaggaatgaccggtggctatggtgcggacgcagttctcgaatgcgtgggctccaagcagtccttcgacacggcgattggcctgattcgccgcggtggcgtgattggtcgtgtgggcctgccgcacgacgtggagatcagcgccgaaggcacgttctacggcaacatcggcatcaagggcggcccggctcccgtgcgccactatgacctcgatgacggtctgctggatgcggtgctcaagggcgaaatcaaccccggtcgcgtgttcaccgccgagtacgacctcgaccatatccaggacgcctacgaggcgatggaccagcgcaaggtcatcaaggcgctgatccggttctagggtcaggtacgcagcgaacggttctcaccaagaaccgtgtgagccattcgcacaaaatcgcacaatcgaacagggcgccggtgtgatgggggggggattgggggtgagccggttcggcttgcgtccttataccgttgttttcgtgtagaatcggctacctctatacttctgttttcgtgtaaaatagcatatgcccatactgttgttttcgtgtaatgaggtgattgctcatgttgaagcgcaagatgctggataagctgatcgcatggaaacaaaaagcgggtgggcgtgaggctcttctcatcgaaggcgctcgccgcgtgggcaaaagtaccattgtcgaggaattcggccgcactcagtacaagtcatatattctcatcgatttcacacgtttgccgcgcgacgttcgcgacatcttcgaaaaccagcgtgatgactttgacacatttttcatgctgttgtctgcgtattaccgcaagcgactgtacgagcgtgaatcgttgattattttcgacgaggtacagcggtatccggcggcgagggagctcatcaaatatctggttgcggatggccggtatgactatgtggaaactggttcgctgatctccatcaagaggaatgtggcgaatatcgtcatcccctccgaggaacggaaaatggatatggggccgctcgattttgaggagttctgctgggccatgggggaggagctgcttgctgaaacgattcgcaaatcgttcgagcgtctggtcccgttgcctgatgctctgcataaacgggggatgaggctgtggcgcgaatatctgctggtgggcggtatgccgcaggcggttgccgattatgtcgagcagcgcgattttggcgaggtggatttgatcaagcgtggcatcctgcagctgtacagtgatgatatcggcaagttcgccaatggcgatgccggccgcgtgcggggcattttcgctcagattccagggcagctgtccaagcatgagaaacgattcactctggcatcggtcgataagggggctcgatctcgtgaatacgattcggcgttcttctggttggaagacgcccgcttggtgaatttgtgccgtaattcgactgaccctttggtggggctgggattgtacgaagataacgattcattcaaatgctatatggcggataccggtttgctggtgtcgcaggcgtttgccgatcgagagacaacgccggatgatgtgtaccgggatattctgttcgataaactctcgctcaacgaagggatgctggtggagaatgcggtggctcagcaattccgggcgaatgggcgcaaactgtatttcttctcgcgctcggatagggcggatgccacgaaaaccatggaaatagacttcctcatcgttcgggaatacgataatgccgcgatgaagcctcgcatcagcccgattgaagtgaaatccacgaaacgatacggcgtatcttcgctcgacaaattccgcaaaaggtatgcccaacgattgggcaaggaatacgttctgcatccccgccaactcgaagtggatggagaacgcatcaagctgccgttgtatatggcccactgtctgtgatttgtgctgattgatgcatgtttgggctgcaaggttcaggcagtcgaagagtgtccgttccgcataggacatccgtgaatatggctggactcacactggctcgattgcagggaaaggagttggcatgggatattccatcggtcaggtgtcgcgaaagactgggctgtccgaacatacattgcgctactatgacggccaaggtcttttgcccggtatcgcttgaactggtttcggacggagatgcttcgatgacggcgatcttgaattgcttgatctcattgaatgtctgaaatccacgggcatgagtctcgcagagatcaaggattttgttgatatgactaagcaaggtgatgccacgctcgaatcacgacttgctgtttttcgcaatcagcgacatgtggtgaaacgtcaaatcgtcgaattgcgacgccggtacatcaaacttgacggggtcattacatccggtgcctcttgcacctcgtcgatgaaaatcaatgtaccgccgggagtgagcgttgaaggtgagaacaaggtaagtcggctgatgaactcctgcgcgtcattcgccgatgcgagcgcgcgggcctcctgcttgttctcgtacaggttgatttcaaggtaatgagcgtattcgtgtttggcgaactcgcgtactgcgtagctcttgccgatttggcgggcaccggtcagcagcagtgctttgccggtgccgatcagcttccattccaacagatcgtccgagatcttgcgctcaagcatggcagttcctttccgaatcccttatgggagtagcattttctgccttgtatgtgcagaatgccgcatttcaaaatggggttttggcgcaaaataccgcatttcaaagtagggtttggtgcaagatgtcgtgcaaatggtgaatcgggcgtgtttgtaggggcggctggatgactgtgcggctggactgttgtgcggccgcatgcttatgcggccacaagtcgtgcgggctgttcgcaaactatgcgcggtcggccggcattcgcctgcgcttgaggtgttcgataagcagctcacactttttgacatcctcggcggtcgaggccggtaggtcgtcggaggaggtgtcgatgatgcgctgcaggtagccgtgtagggtttgtatctcggtttcattgaggcagtccagcatggaggaggtctggtcgggcgctttgcccagcagatcggcggccttgcggccctggttggtgaggctgaccatcatgacgcggctgtcccgcctggatggacggcggctgatgtgaccgctggcctccagtttcttcaacagttcggccatggcctggcggctcatgccgaacattgcggccaagtccttctggctggtctggtcggattccctgagcgtggccaagacgcggccttggccgcggcgcgggtcgaaagcatgttcgccgcgcggcgatttggcgccgggggagacgagccgtctgtgtatcgcgcgatacgccatgatgcggccaatgctgatgaaactgctgagaacatcgttcttgatatcgccgtcggcggtgttgtggcttgtgccgttctccgccgattgactcgtggccattgcgttgtcgaccgcgtcgtttccggttacggcggcgttgttgctggtgctgctcatgttcggaatccttgcgtcagtgctgcatgttgtcgccggtggattcgccgcgatagcgcatcatcatcgagcgctgcatctcctgcgcgttcggtggggtccaggtcagcgcgttcgcgccggccacgatggtttcggccatggactcgtcggtcgaaccgccgctggcgagcagcgggatggaggggtgacgctgcctgatctgctggaccacgtcaggtgtcctgcggccggccgccacgttgatgatagaggcgccggcctcgattttctcgtccaattcgtcatcgcaggtcaggaccgtggcgatgaccgggatgttcgtgatgcgcgccacgtcgtacaccgtggagggtggcgccggcgcgttgagcactacgcccgccgcaccctgcatctccgccatcatggcgagttggatgacgcgcgggccggtggtggtgccaccgcccacgccgacgaacagcggggcctgggccacggtgagtagggcctgggtgatgactggttcgccggtgaacggatatacggcgagaatggcgtcggcattggtgttgcggatgatggccgcgtccgtggtgaacgcgaacgagtggagttggcggccctggacggtgatgccggaagtgcagctgatgatgtcgggaacacgggccgcggaggagctgatgcggttttcgatggggttcggtccgtctacttgacgggattccgggtcgtattcggtgaggtcgttgctcatgtcatgtgtgatgttcatgccggtctcctttaataaggaagcgagcgaagcgtcgctggtcgtgtgtctttttcatcctcttcagtaattatgtcaagtacctgacagatatgagtatacgactccatcaaagattgtcaagtaccttacgtattgctgttgtgtcacatttttcgacaatgccaacatgcgtatgttgtttgatgcggatctgaatgtggaacggctgattcccgcactgtcgatcaagtccggaactaggatcactcccgaggatacgctcgtcattttcgatgaggtacaggaggtgccgagggcgatgacttcgctgaagatgttcaatgaagccgccccggagtatgacgtcttggccactggatcggcgcttggcatcgccatgcatcttgggttttcattcccggttggcaaggtcggtagactcaagctgtatcctatgtcttttgttgaattcctgtatgcgtgcaaac

SEQ ID NO: 1778 - DNA, 11970 bp, Unknown
  MAG_14  MAG No. k141_31666
ccattcgtcttggaccacgcgacgaatctcggcgaaggtgggcagcgggaagtccggctggtagaggcggcggacctcggccacgcgctcggtgatgcggatgagcgtgtcggtcatgccgtcgaggtcgccgtcgtgctccatctggctgtatttgccgatgtagccttccatgagttccatgtgttcgcgcacgatcttgagctgggcatcgttgaggtccacgacttcgggtgaatcggtctcgggccagccgatgagcacggcgtccgcgtattcgagcgacgcacgctgggcggcggaggcgatgccgtcctcaatctgcacgaggaacacatagcggacgatgctgagccgttcggccgcgatcttcaggccgagcttgggatcgttgaggtcgatgtcgggccgcagttcacttgccttgtttgccgtgtcagccgtagtgttcatgttgccgtcctcgttcatgcgcgcacctggcctgttccgtaaccgatccacttggtggtggtcatctcccgcaatcccatgggaccgcgtgcgtgcatcttctgcgtagaaatgccaagctcagcaccaaagccaaacacgccgccatcggtgaagcgagtggaggcgttgaccatgaccacggccgagtcgatgcgcttggcgaattcctcgatggccgcataatcctcggcgatgatggattcggtgtggcccgtggaatgcgtgttgatgtggtcgatggccgcgcccagatccggcaccaccttgatgcccatcttgagggccagatattcagtgtcccaatcctcctcggtggcgcggttgaggtcaaggccctcgatcgccgcgccggagatgatgtcatacgacgtggtgtcggcctgcagtacaacgttcgcctcggccagagcggcggcgatctgcggcaggaattcggcggcgacatccttatgaaccaatagcttctcggcggcattgcacacacccacgcgctgggttttggcgttgatgatgatcaggatggccttggcgagatcaccggacttgtcgatgtagatatgcacgttgccggcaccggtttcgatgaccggcactttggagttgcgcacgacggcttggatcagacccgctcctcctcgcggcacgagcacgtcgatatggcctcgcgcctccatcatggcggtggctccggcgcgtccgtactggtcgacggattgcaccagtgcggattcgaaaccgtgtgcttcaagcaccggggcgatgacgcccagcgtggcagcattggtgcgttcggcggcgtgaccgcctcgcagcaacgcggcattgccagatttaaggcacaggctggccacgtccacagtgacgttcggccgggcctcataaatcatgccgatgacgcccatcggtacgcgcgtctgggtaaggcgcagaccgttgggcagattgtatccgcgcacgatttcgccgaccggatcaggcaaggtggccacatgacgcacgccttgggcggcggcggccacgcgcggcacgtcgaacagcaggcggtcaagcttgcccgcatccatgccgttttccttggattcgagcatgtccagcgcgttggcggcttcgatgtccgcggcgtgcccgtccaacgcatccgcaatggcgagcagcagttcgtttttggcttcggtatttgcctgtgcaagacgctcctgcgcgcgtgcggcctgatcggcctggcggcacaccgcgtcgaacacctcaggactcaattcatcgctcataacagtcaagcgtaactcacaacgcggctgattgcttactccgacccgcttgttatgggatgtctgacgttttgaatcgcaaacagaaccggctcccctccgtctcaggcgggaagccggtgacgtgatgcgctccggtcagcgaatcatcactaaccggtgcaccacggtggattagcgaatcagcaaatcagtggatctggtccaggtcggggtagagcgggaagtcttcggcgagcttgtcgacgcgagccttcagcgcggtcacgtcggcggacggtccggcggcgagcgcggtgccgatgatgtcggccacctcctcgtattccttcggcccgaagccgcgggtggccagggcggacgtgccgattctcaggcccgaggccaccgaggccgggcgcgggtcgaagggcacggtgttgcggttgatggtgatgccgcaggcggcgagcagatcctcgccctgctggccgtccatctcgctgttgcgcaggtcgaccatcaccaggtgcacgtcagtgccgccggtcagcacgctgatgccgttggccttgacgtcatcggccagtagtcgttcggcaaggatcttggcgccgtcgagcgtgcgctgcatacggtccttgaattcgggggtgccggccaccttgaagctcacggccttgcccgcgatcacatgcatgagcggaccgccctgctggccggggaacacggaggagttgagcttcttggcgtattcctgcttggcgaggatgaagccggagcgcgggccgccgaaggtcttgtgcgcggtggaagagactacgtcggcgtacggcacaggactcgggtgcaggcccgcggctacgagtccggcgaagtgggccatgtcgacccagaatttggcgccgacctcgtcggcgatctccttcatggccttgaagtcctcgatgcgcgggtaggcggaccaaccgccgatgatcatggccgggtgggtttcgagcgcacgctggcggatgatttccgggtcgatgcggaaggtctcggggttcacgccataagcctcggcatggtagaagcggccggagaagttgattttcatgccgtgggtcaggtggccgccgtggtcgagggccaggccgagcacggtgtcgccgggcttgacgagcgcctggtagacggcggcgttggcctgggcgccggagtgcggctggacgttggcgtattcggcgccgaacagggccttggcgcgttcgcgggcgatggtttcgacttggtccacgtattcgcagccgccatagtagcggcggccggggtagccttcggcgtatttgttggtcagcacggagccctggcattgcagtaccgctcgcggcacgaagttctcagaggcgatcatctcaaggccattgcgctggcggcccagttcggagtccagcagttcggcgatctcaggatcggtttcgcagatcggcgcgttgaaagcatcggtcgctttctgcgcaaggggtgaagcggtcatgggtgctcctttttggtatgggcgacaattgattcgccgttgccgccttactgtatggccggtttgtagccggcctgtttcatgatatggccggtccccgttcgatggcaatggtgattttcgccggtttgaccggtcggctacgcgagacggacggcccttctgcccacggcccacgctaaactggtgtggattcatcatccctttcaggcagaaggattcatcgtgacaaccaccttccattccacccgcagcaccaccgattcgctgaccgccaagcaggcgatccgtaagggcattgccgatgatggcggactgttcgtttcggactcgttgggcgagaccaaggtggacgtggcctccctgccgggcaagtcgtaccagcagatcgccgccgaggtgctgggcgcgctgctgccggacttcacggccgaggagctgggccagtgcatcgccgactcctacggcgaacagtggtccgatgagcgcatcaccccactcaagcccctgggtgacgattacgtgctcgaactgttcaacggtccgacttccgcgttcaaggacgtggcgctgcagatcctgccgcgcttcatggcgcacaccacgccggccgatggcgacgcggacgagaagatcatgatcctcaccgccacctccggcgacaccggcaaggccgcgctggccggcttcgcggacgccccgggcaccgcgatcaccgtcttctacccggaaggcaaggtctcccaggtccaggaactgcagatgaccacgcaggccggctccaacgtgcaggtggccgccgtggaaggcaacttcgacgacgcccagtccgcggtcaagcgcatcttcggcgaccgtgccctggccgagcgtctcgccggcaattcgcacgtggtgctttcctccgccaactccatcaacgtgggccgtctggtgccgcaggtcgtctactacttctccgcttacgcccagctgctcgccgaccaggtgatcaacgtcggcgatgaggtcgagttcgtggtcccgaccggcaacttcggcgatatcctcgccggctactatgccaagctgctcggtctgccggtcaagcacctcgtggtggcttccgacaagaacaacgtgctgttcgacttcctgaccaccggtacctacaaccgccagcgcccgttcttccagaccatctccccctcgatggacatcctcatctcctccaacctggagcgcatgctgtactacttgtccgagggcgacacccgtctgatctccatgctgatgaacgacctcaacaagtggggcacgtacgagatcccggaagaactgctggccaagattcgtcagatcttcggcaccggttgggccgatgaggatcaggtacgcgagtccatcaagcactgctgggacgagaaccactacgtgatcgacccgcacaccgcctgcggctactacctgcttgagcagatgccgcgcgacccgctgaccccgcgcgtgctgctctccaccgccagcccctacaagttcccgcgtgtggtgaacgaggctctgggcttcgacgccaccggcaccgacttcgagtgcatggacgtgctggcccacgagaccggcaccaccgccccggccgccctgcgtggtcttgagaccgccgacgtgcggttcaaggacgtcgtggccatcgacggcatggaggactacgtggagaaggccgcccaggcgctgtaaaacataccagcacattggctcccctcagagcggggagccattttttacatcagaattgcgtttacatcagtatcgcggcgactggcagtcctatggcgattgccaacagcacgatagtgccgatgatcacgctggggcgtgcgaggttgacggtccagccgacgccgaaacgtttaggaaccatgatggccggatcgtcacggttgatgtagatgatgccgccaatccagtgcaggtcatcgtcatacggcatggcattatcgtccgaaatgtcaccgccgtcactgtgccgaacaccggcatagacgcgcgccccgttctgcccgtaatacacgccgatcatcagcgcgccgaccagagccgccacggcgatgaacatgccgatgatgccgattagattgatatccagcacgccaatggtgacaagctgaacgcctaggcccaatccaccggctgccagcagtccgatgaccagcacgtagatgctccagacccgcgagaacacaccataggcatacccggtggcggcggggtggtcgggatcaatcgggtgcttggcgtagatgatcgcgacatggctggccaccatcaccgctgccagcaccacctgcgcgagcacggcgtaccaaatcaccatcggactcttctcggcccagctgttcacattgccggcgatatccgcatgaatcggcacccgctccggcatccggtcatagcccagcaacccgacagcaatggtgacagcgagacaaacgacttgcagcaattcccacttcaagctcatcgggtcgggattgtcccgctcacctatcaatgctgcacggcgggcactggacgcctcccatccctgatcgactttgatggatagtactttgcggcgaaacatctgctgcagcacgaaaccacatatcgcaatcgccaccgctgcgatggacacagtccagaacgccgcgtcgactccgcagagttgccaaacggccagcgagaccagtatggcgcatacgccaagcgccaccgtaattcccgaaaacgcgactttaaatccgcgaatgcgcgtattgacatgggcggcggccggcactgtgacaccgaacacctcatgccggtcggtaacccatggaacccctgccaggccggcggtcactatcaccggcaacagtaaaaacgcacacaacgcgatgttcatcgacacgactgtattattcatcgttatctcccctgatttccttttgttgcaccgtcagtaacgctctgcgaggagcgcacgccgtatgcccgttcgcattgccgtttggtggcatcgaggaatgcggccgaatcaccgccgcgcgccctgtaggccaaggcaaggcgatagagttcctcgcccatccgctcatcctgtgcttcggcagttcggttcggtgcttctcccccgccgtcatgctcggcgacggttgcaccggcaccacgacgcataacgatgtatccctcgtcacgcaacagcgcataggccttgttcaccgtgtgcaggttgatgccaaggtccacggccagcgagcgcacggacggtaacgagtcacctggcgacagctcatcgcccgcgatggctgcgatgaactgccggtgcagctgctcgtaaatcggcacgtcactgcgctgatcgatttccacaatcacggtcaattccacccctctcaagaactgttctatttgttctacatcaaatataacagttttgccgtatgagtcaagatatgcgaatctcggttgaacatccggcaatgggccaacggcgtgttgcttgaattttctaggaaggcgggaatcgccatgctgccggcgaatgggaaaatccatgtggcttgtcagattctgttcctgcaactgaatagtcccatgagggagtagacagcattgcggcgaagggctcggcccaaaccgcaataaagcgtgccgagcgccaaagccgccaacaccggtatgacgccgctgcaggagaagctcgcgaagctggacgaacttcatgggcggcaccgccgaacagcagtcgaccattctgttcacgctgttcgtggtgttccagccgttcaacgccttcaacagccgcgagctgggcaacgccagcctgttcgccaatctgctacgcaataaggtgatgatcggcgtgttcgcgctgatgttcgcacttcaggtgctggtggtgcaattcggcggcgcgatgttccgcaccgtgccgctgccgatcgacatgtggctgaagatcatcgcggtcggacagatgcgcggttagagttctttggctcggtagatgcggatggctataagcatggagccaaaatatgcgagcagacacaacacggcgagaacaagcgccgtatgccaccagatcgtcaggaaatcggcaatattcagcaaaagccattgccagtcaacaggcaatcgggccagcagcgcaatgacggcatacaagccaaccaggaccacgccagaggccaccatcatcttgcggaaggtgaaccggtatgcacaggccagcagcaccgacccaagaatgatagccaaagcgaagatgaaagcacctgctgccaaggtaccgatccaccccatatctgctatatcgccaaagacaatgaagacaccgccgcatatcaccacgtccaaagcccagagcaggccaaccaccaacagaaaaaggtaccgacctacaacttgtgcagtgcgtgaaacaggaatcagccctcgcatggcactgtgccctgcagattcctcggatgacgcaggccccaatgcactcatacatgccatcgccgatgccaaacctccgagtccgcccatcagaccactggcaacgtgttcatcgacgtgggtcgatatcatcaccagcgataccacgatagacagcaccgggaaaaccagcagaaataccatattcgctacgctaaacagacctgtcccaacacaatcgaatcgacattgctttactacggatttccagctcatcgtcaccattcccttgaagcaaatatgcgagaggcaattacatacgagattccatatgccacaaccgtcgttgccaataccgcaataaccagccacaatcgttgcgcgatgatggcattcgcggcatgggccaatcctttggtcaccgaagcaggcaaaatagatagcagtatgaatccagccaatacaacgacataaatcaccatcatcgtgacttgaagaccgcctagtttggtccacagataacccgtgggcacgataagcgcgaccatcagcgcggtgcagaaacctcccaacggagccgcccacagattgcccgcgaatgaccaatccggattgaccagcacttgcaacccgtcaatcagaacaatcatcgctatcgacaatacggaaatcaccaatccaaccacatatcgcgcggccacctgactcttcctcgaagccggaataatgccacgaagtcgatatccgttctgtaagtcagcaaccgccatggttagcacccacatggcgcaggtgaataccgtcatgatgacacccatgcgatagccgaagccatcaccataagcttcaccttgaaagatgacggagaacaacggtgccaacaacaacgagaacacagtccgttcgccgacgcacaggtaggccatatcgacgcgcaatgcagtggtcaatgcatgttgccgagaccgcgacaccctcagtattgcctccatggccgctcacctcccgctcaagtcacgattggaatcatgggcattggtcagtcgaatgatgtcatcaatggaagccgattcaacgacaagccccgaaaccaccgacgcaacagcatcaagcctgtctgaccggaccagcgcatcgaatccggtggcatacgtatgtgagcccagcaccacgtccgcaggcagttgtgccagttcgtctggaccgcccttaatcaggcggaacgattcctcaaactcgtctttcggaccggtgtagtagagacggccatcggtgatgtaggtaatgaagtcagcagcacgttcgaggtcggcagtgatatgggtgctgaacagtaccgaatgttcgccatcctcaatgtaggcatgcaggatatccatgagttcgtcgcgggcaagcacatcgagtccgctggtcggctcgtcgagaatcagcagcttggcatcatgactcaatgcgatggccagcatcagcttcatctgcatgccgcgggaaagatccttgatatgtttcttgccgttctgtgcgtcaccaagaccgaaagtatccagatacttgcgatagcatccaccgtcccatgatggatacagtggcgcgacgatacgttcaatgttcttgacttgccactgttcatgcatgtagctgaagtcgaacaccacgccgagttgttctttgacgggctcctcgttggcgatgttgtcgaggccgagcacgtgaatcgaaccggcgtcgcggtggatcatgttgaggatgagtttgatgagggtggatttgccggcgccgttcgggccgatcagtcccatgatgtagcccttgggcaggtcgaaggtcacgtcgtccagcgtgaagccggaatcatagtgtttggtgacgtcggtgacctgcaacgccatcgcgtcggattcggatatggcggtcatggccatggtcctttcttgaggttatttcttgcggtattcctcttcgagcatgcggtccaatgcgtccagcggaatgccggcggctttggcgccccggcttgcctcggccaggctttcgcgaatctgggttttgagctgacgttgcatcagttcgttgcccttgtccatcacgaaagtgcctttgccttggatgttctgcaccacgccctcatcggccagttcgttgtacgccctggtgacggtgagtacggagatgcgcagttccttggcgagctttctcaaggaaggcaaggcctcgcccgccttcaactcgccgctgagcaccgccgaacggatttgggttttgatttgctcgtagatgggttcaccggacacggatgagatgatcagtttcacctatgcccctttcgattgtggttgactagcaccccagctgtttagctgttatacaacacagtataactgttctgcttaactgtcaaggtgtgttacataacagttgaacagtgaacaaacacctcgccaacatacagtgtcgaaacatgggccgtgcctacaatggcctcggaaaggggcacccatgcccaacaacgcccccgccgacagcccgccagcgggggtgtaacttttttatcacagcacgcgcggagcgtcgtggaagtcgaagaggacgccgtcggccaggtggcagatttcgggccaatcggaggcggaggagtcgtcgtgcatggcccagaccttcatgccgaccgatttggccgacttcatgccgaccagcaggtcttcgaacaccgtgcagtcgaccggcgcggcgcctaggcgcttggcggcaagcaggtagacgtcgggctggtccttgccgacgtcgttcgcgtcatcgacggagacgatatcgttgaacagatcgaacatgccgacgtggcgtagcgccggctcacgcagatgcgggggcagcgaggtggcgacacccagtttgacaccggaggctttcagatcgcgcagatagtcaagcgcgccgggtttggcttcgaccgtggtggaataggcgacgctggccatgtcgtcccattcctgcatgagctcttcgggcgtgtctgtaaggccgaagcgtgcgatggtgtattcggcgatctggcggaattgcatggcggagactttggtcatgtagtcgggcggcacttcgattccgcgcttgttcaggaagtcgatgtcgacttggtcccagactcccatggagtctaggagggtgccgtcgaggtcgaatatggcggctttggtcatttgctaatccccttcttcttcaaccaccctcagtcgcctgcggcgccagctcccgccagcgggagcgtaagccgagaatcggataggagttctcgggcgtggtctagtgaggcttcggattcgctgccggagagcatgcgggcgatttcgtggacgcgggtttcgccgttgacttcggcgatggtggtgaccacgcccaaatcgtcgtcatcggcatccggcggctccttggtgaccacgaactgcgcgtccgcccacgaggcgacctgcgccaagtgggtgacgacgatgacctgcgcgctgcgggccagccgtgccagacgtttgcccagttcgaccgcggccttgccacccacgccggcgtcaacctcgtcgaagatgaaggtctggtcggcaccgccgcgcgtgtcggcggccaccagctccaaggccagcatcagtcggctcagttcaccgcccgaagcgcttttgcccatcggcaactgcggcgacccctcgaacggcgtaaacaggaacgcgatatcgtcgcgaccatacgggccgagcggatcatcggccttgtctcgcggcgtgacgcgcacttccaaggaggcgcccagcatggcgagcgagccgagttcttcagtgacgcgcgcgcccaagtcggcagcggcagccacgcgcgcggcgctcagcacgtcggcggcggcgagggccgcatcgtacagcgcctgccgttcggattcgagttcggcgaccttttccggcgaggcgtccagatcctccaaatcgaacgccgccttgtcccgccaagcgagcacgtcggccaaggtggggccccaccgacgggtgaggtcgccaagctcgtggatacggccgttgatctggtccagatcctccacgctgccttcgtcgcccagctcctggctcagggcgaacaccacgtcgcccaaatcggcattgatggattcaagccgatcggcctgctcggcgaacgtgccgccgacgcgaatcgcgcgcaacgaggtcaccgcatgattgatgagttccacggccgaagcgccgtcggcggcgtccacatccacctgcgaggcatccagcgcgctca

SEQ ID NO: 1779 - DNA, 4878 bp, Unknown
  MAG_14  MAG No. k141_32201
cacgatcaagtacctggtggccctgcacgacggtgcggcgaccttcccgggcaagcgcaacggcgaagacgttgacctgcgcgtggacgtcgacgatatcgaccacttcggcaaccgtcgcatccgccaagtcggcgagctgatccagaaccagctgcgcaccggtctgagccgtatggagcgcgtggtgcgcgagcgcatgaccactcaggacgccgaggccatcaccccgcagtccctgatcaacatccgcccggtgaacgccaccatcaaggagttcttcggcacctcccagctctcccagttcatggaccagaacaacccgctgtccggtgtgacgaacaagcgtcgtctttccgcactgggccccggcggtctgtcccgcgaccgcgcctccatggaggtgcgcgacgtgcacccgtcccacttcggccgtatgtgcccgatcgagtctcctgaaggcccgaacatcggtctgatcggctccctggcaaccttcggccgcgtcaacccgttcggcttcatcgagaccccgtaccgcaaggtcgtcaacggccacgtgaccgacgaggtcgagtacatgaccgctgaccgtgatctcgaccacgtcatcgcccaggccaaccaggaacttgacgagaacggcaacttcgtctccaagtccgcccttgcccgagtcggcgaggaagaggcagtcgatgtgccggtgagctccgtggattacatggacgtctccccgcgtcagatggtctccctcggtgcctccctgattccgttcctggagcatgatgagggccaccgtgcactgatgggtaccaacatgcagcgtcaggcagtgccgctgatcgaatccgagcgcccgctggtgggtaccggttccgaatggcgcgccgccaacgattccggcgacgtcatcaaggccgacaaagacggtgtggtcacctacgtgtccgccgacctgatccgtgtgatgaacgacgacggcaccaccagctcctacaagctggctaagttccagcgttccaaccagaccacctgctacaaccagcgcccgatcatccatgatggcgagcgtgtggaggccggctcggtgctggccgatggtcctgccatccagaagggcgatctggccctgggcaagaacctgctcatcgccttcatgccgtggaacggctacaactacgaggatgctgtgatcatctcccagcgcctcgtgcaggacgacaccctctcctccatccacatcgaggagtacgagatcgacgcccgcgaaaccaagctgggcgccgaagagatcacccgcgacctgccgaacgtcggcgaggacgccgtggccaacctcgacgagcgcggcatcatccgcatcggcgccgaggtcgaggccggcgacatcctggtcggtaaggtcaccccgaagggtgagaccgagctgaccccggaggagcgcctgctgcgcgccatcttcggcgagaagtcccgcgaggtgcgcgacacctccctgcgcgtgccccacggcgagaccggtaccgtcatcggcgtcaaggagatcacccgcgaggatgccgaggaggacggcgacgagctgcccaacggcgtcaaccagatgatccgcgtctacatcgcccagcaccgtaagatcacggtgggcgacaagctctccggccgccacggcaacaagggctgcatctcccgcatcctgccggaagaggacatgccgttcctggctgacggtactccggtcgacatcatgttgaacccgctgggtgtgccttcccgaatgaacctcggtcaggtgctcgaactgcacctcggctggatcgcccactccggttgggacatctctttggatccgaatctggaagccgagtggaagaagctgattccgtccggtgccgagaaggccgagccgaacaccccggtcgccaccccggtgttcgacggtgtcaagcctgaagtcctgaagggtctgctgtccactacgctgccgaaccgcgacggcgaccgtctggtcggccccgacggcaaggccaccctgttcgatggtcgtaccggtgagccgtacaccaagccgatttccgttggctacatgtacatgctgaagctgcaccacctggtcgacgacaagattcacgcccgctccaccggcccgtactccatgatcacccagcagccgctcggtggtaaggcccagttcggtggccagcgcttcggcgagatggaggtgtgggcccttgaggcctacggtgccgcctacacgctgcacgagatgatgaccaccaagtccgatgacgtcgacggccgcgtgcgcgtctacggtgccatcgtcaagggcgataacctgccgccggcaggtatccctgagtcgttcaaggtgctcctgaaggaaatgcagtccctgtccctgaacgtcgaagtgctcaacgccgaaggcgtggccatcgacatgaaggatgaggatgacgatccggccagctccgctgacgacctcggcttcaacattggcgcccgccccgacgcggccgccaaggaagaccagaaggccgaagagcccgaataccagtgatccctcgggctgcatgcggtcaatacgccgcgtgtagccccgccaacgtgaaatagataacgtacagagacctttccggtttgcactacccctcagtcagccttggctgacagctcccctgacaaggggagcttgggaaggtctcaagaacagaaacggattaacaagtgctggacgtcaacgcatttgacaagattcgcatcggccttgccaccgccgatgacatccgtggttggagccacggtgaggacaagaagcctgaaaccatcaactaccgtacgctgaagcctgagaaggacggtctgttcggcgaacagatcttcggcccgacccgtgactgggagtgcgcctgcggcaagtacaagcgcgtgcgcttcaagggcatcgtctgcgagcgatgcggcgtcgaagtgacccgcagccgcgtgcgccgtgagcgcatgggccacatcgagctcgccgccccggtgacgcacatctggttcttcaaaggtgtgccttcccgcctcggctacctgctgaacgtcaccccgaaggatctggagcgcgtgatctacttcgcctcctacatggtcaccgaggtgaacgaggacgagcgccacaacgatctgcccggcctgcaggacgagttcgattccgagatcaagcgccttgagcagcgccgtgactccgacatcgaagctcgcgccaagaaggtcgaagaggatctcgccgcccttgaggagaccggcgaggccaagggcccggcccgcaccaagctgcgtaacggtgccgagcgcgatatggccgccatccgcacccgctacaacgaccagatcgcccgtgtggacgccgtcttcgacaagttcaagaagctcaagcccggcgacatggtcgacgacgtggacctgtggcgcgagatgcaggaccgctacggcgattacttcgacggctgcatgggcgccgaagccatcaagaagcgcctgcagtccctcgacctggagaccatctccaaggaactgcgcgaggagatcaaggacgcttccgagcagcgtaagaccaaggccctgaagcgtctcaaggtcgtcaacgccttcctgaccaccggcaacaagccggaggccatggtgctcgacgtgatcccggtcatcccgccggacctgcgcccgatggtccagctcgacggtggccgtttcgccacctccgacctcaacgacctgtaccgccgtgtgatcaaccgtaacaaccgtctgaagcgactgatcgagctcggcgcccctgaaatcatgctcaacaacgagaagcgcatgctccaggaagccgtcgactccctgttcgacaacggccgtcgtggtcgcccggtcaccggtgcctccaaccgtccgctgaagtccctgtccgacatgctcaagggtaagcagggtcgtttccgtcagaacctgctcggtaagcgagtcgactactccggccgttccgtgatcgtggtcggcccgtccctgcgcatgcaccagtgcggtctgccgaagccgatggccctcgagctgttcaagccgttcgtcatcaagcgcctcgtggacctgaactacgcgcagaacatgaagtccgccaagcgtctcgtggaccgcggcgacgccgaagtgtggggcgtgctcgaggaggtcatctccgagcacccggtgctgctcaaccgtgcacctacgctgcaccgtctgggtattcaggcattcgagccgatcctggtggaaggcaaggccatccacctgccgccgctggcctgcgccgccttcaacgccgacttcgatggtgaccagatggcagtccacctgcccctgtccgccgaggcccaggccgaggcccgctcgctgatgatggcttccgacaacatcctgaagccggctgacggtcacaccgtgaccatgccgtcccaggacatgatcctcggtctgtactacctgtccaccgtgctggaaggcgccaagggccagggccgcgtgttctcctcgctggaagaggccgaaatggccctcgaccgccacgagatcgacatgcaggccaaggtgctcatccgcctgcctgagaccttcgtgctgccgaagaactgggagcccggcgaggtcaaggtgctcgacccgcgcgaaggtgaggacgaggtcgtcaaggaagagcgcttccacgacggcaccgtgctgttcgccacctcctacggccgcatcctgttcaacgagactctgccgaccgactacccgttcgtcaacgagcaggtggccaagggccgtctgtccaagatcgtcgacgacatcgccatgcgttactccacccagcaggtggccgccacg

SEQ ID NO: 1780 - DNA, 4071 bp, Unknown
  MAG_14  MAG No. k141_32491
accgatctgaagcttgattggcttggtgctgccgacagcattgtggcattggcggtttctccggaagggtgccgattggcgttggcagtcaggggcgaggacacgaacggcgtgatgatgaccggtgtggcgcgcaacggtgataaaacactgagcggtctgagcaaagcggccacccaagtgagtgtgctcaggcacgtcaccatgctcacgttctacaatgatctgaatctggtgtacgccaccacacctcctgagggaaacagcgaacaacaagaggcatggcgtcaaatggcaccaggcccggccaatgcgcagcgtttacccaatggaatcataacgtcgatggcatcggggcagatcagcctgtctcgtcgcctggccattgtggacgatttgggtattgtgcgctccgtttccggctcactcgacggttcctggaccatcgccgatagccaggtcactgccctcggtgcgcagtagatggtataagaaaaacggtgttcataataacttttcttgtgttgtgatgcggcggctttgtcgctcggctgacgagcggcattgccgccgtgcaaccacctcttattatggcttaatgacaaggcaaaacggcgctgtgaagccgttttttgaactactgttatcaaactgttataaacctgttatcaaactgttatcgcatgcgattgaacatttggcctgtgagcgtcacactagagattgtcgatgacgaacagtcaccaaacaggatggaagatcatccaaaaaataaacactgctcgaggaggagtatttatgaagaattggaagaaggccattgccctcgttgcttctgctgctgcgcttgtcagcgttgccgcatgcggttccagcaacgcaggtggcagctcggactccggcaagaagacggttggcttcgttgctgtgggccctgagggcggcttccgtaccgccaacgagaaggacattcagcaggcattcgaggatgccggctttgacctgacctactctccgacccagaacaacgatcagcagaagcagattcaggcgttcaacaagttcgttaacgacgaagtcgatgccatcatcctgtcctccaccgaggattccggttgggatgactccctgaagaaggccgctgaggctgagattccggtcttcaccgttgaccgtaacgtggacgtcaaggacgccgaggccaagaaggccatcgttgctcacatcggaccgtccaacgtctggtgcggcgagcaggctgccgagttcgtgaacaagaacttcccggatggcgccaacggcttcatcctcgaaggccctgccggcctgtccgtggtgaaggatcgtggcactggttgggacaacaaggttgcctccaacgtcaaggttcttgagtcccagtccgctaactggtccactgatgaggccaagaccgtgaccgctggtctgctcgacaagtacaagtccgacaacccgcagttcatcttcgctcagaacgacgagatgggcctcggtgccgctcaggctgttgacgccgccggcctcaagggcaaggtcaagatcatcaccatcgacggtaccaagaacgctctgcaggctcttgttgatggcgacctctcctacgtgatcgagtacaacccgatcttcggtaaggaaaccgctcaggccgtcaaggactatctggatggcaagaccgttgagaaggacatcgagatcgagtccaagaccttcgacgccgcctccgccaaggaagccctggacaacaacacccgcgcctactgataagtctgctgcgactcattgataactggaccaaataattgatgtgatggtgtgagaaggatgttccttccacaccatcactcatgtgtggctcaaatatcacaaaacgataacatttcattctcgtttaaggcaaagacatgacagataaaaaccccatcgtcgtaatgaaaggcattacgattgaattcccgggcgtcaaggccttggatggtgttgatttgactctctacccgggtgaagttcacgccctgatgggtgagaacggtgcaggcaagtccaccatgattaaggctctgaccggtgtgtacaagatcaacgccggctccattatggtggacggcaagcctcagcagttcaacggcaccctcgacgcacaaaacgccggtatcgccaccgtgtatcaggaagtgaacctgtgcaccaacctttccgtcggtgagaacgtgatgctgggccacgaaaagcgcggccccttcggcatcgactggaagaagacccacgaggccgccaagaagtatttggcacagatgggcctcgaatccattgacccgcacactccgctgagctccatctccatcgctatgcagcagctggtcgccatcgcccgcgctatggttatcaacgccaaggtgctgattctcgatgagccgacctcttcgctggatgccaacgaggtcagggacctgttcgcgatcatgcgcaaggtgcgtgactcgggcgtggccatcctcttcgtctcccacttcctcgatcagatttatgagattaccgatcgtctgaccattctgcgtaacggccagttcatcaaggaggtcatgaccaaggacacaccgcgcgacgaactcatcggcatgatgattggtaagtccgccgccgagctgtcccagattggtgccaagaaggctcgccgtgaaatcacccctggcgagaagccgatcgtcgatgtcaagggcctcggcaagaagggcaccatcaacccggttgatgttgacatctacaagggtgaggtcgttggcttcgctggcctgctgggctccggtcgtaccgagcttggtcgactcctgtatggtgccgacaagccggattcgggtacctacacgctcaacggcaagaaggtcaacatctccgatccgtacacggctttgaagaacaaaatcgcgtactccaccgaaaaccgtcgtgatgagggcatcatcggcgacctgaccgtccgccagaacatccttatcgccctgcaggcaacgcgcggtatgttcaagccgattcccaagaaggaagcggacgccatcgttgacaagtacatgaaggaactcaacgttcgtcccgccgacccggatcgcccggtcaagaatctctccggcggcaaccagcagaaggtgctcattggccgttggctggccacgcaccccgagctgctgattctggacgagccgacccgtggtatcgatatcggtgccaaggctgaaattcagcaggtcgtgcttgacctggcttctcagggcatgggcgttgtcttcatctcctccgagcttgaagaggtcgtgcgtctgtccgacgacatcgaggttctcaaggaccgccacaagatcgcagaaatcgaaaacgacgacaccgtctctcaggcgaccatcgtcgaaaccatcgctaacaccaacgtaaacaccggaaaggaggcatgagatggctgaaaaggcaaaagccgagggcaacaactttgtcaagaagctgctgagcagcaacctgacctggtcgatcgtcgcattcattcttctggtcatcatctgcaccatcttccagcatgacttcctggctctgagctggaacagcaacaccggtggtctggccggcccgctgatcaccatgctccaggaatctgcccgatacctgatgattgcaaccggtatgaccttggttatctccaccgccggtatcgacctttcggtcggttccgttatggcagtggcaggtgccgccgccatgcagaccctgtccaatggcatgaacgtgtggctctccatcctcatcgccttggctgttggtctggccattggctgcgtcaacggcgctctggtttccttcctgggcctacagccgttcatcaccaccctgattatgatgctcgccggccgtggtatggccaaggtcatcacctccggtgagaacaccgacgcctccgcagttgccggcaacgaaccgctgaagtggttcgccaacggcttcattctgggcattcccgccaacttcgtcatcgccgttatcattgtgattctcgttggcctgctgtgc

SEQ ID NO: 1781 - DNA, 10676 bp, Unknown
  MAG_14  MAG No. k141_32506
accgacggtctgctgcacatctcccagatccgcaacctggccaacggcgagcgtattgacgccgtcgaagacgtgctcaaggaaggcgacaccgttgaggtgatcgttcagggtgtcgatgatcgcggcaagatctccctggccatccctggtttcgaggatcaggagaacaacgcccgaccgagccgtggcgatcgcgatgaccgccgtggcggccgtggccgtggtgaccgtgacgatcgccgtggcagccgtggccgtcgctccgatcgcgatgaccgtgacttcgacgatcgtgacgaccgtccgcgtcgccgtcgctccgatgacttcgaggatgattacgacgaccgtccgcgtcgccgtcgctccgatgaccgtgacttcgatcgcgatgatcgcgatgatgatcgtccgcgtcgccgtcgttctgccgaccgtgacttcgacgatcgcgatgaccgtgatgctcgcgactcccgagatgatgatcgtccgcgtcgccgtcgctcttccgatcgcgatgaccgtggcgatcgtgatgaccgccgtggcggtttccgtggcggccgtggccgtggctcggaccgcaacccgcgctacgccaccgacgacaactacgacgactaccgcgccgaccgcgaagagcgcactgagcgcccgcgtcgccgcgtccgtcgcgactttgatccgttcgaggactaaagccctctcacggatcggtcgcggcatagccgccccccccctcacctacgggaagcccgcagggcttcccgcttaacggttcggcattcgaggactgatcgttctctagcttctctcgggtgagaagagcttaatcgcaaaccaaaaggcttctataccgtttcattcggtatagaagcctattggtttttcggcttcttcgcgctacatatttcgatgttgaatagggcactcgtgctgctgccatgtacattcagttgtcagttgacaactattctcatgcatcaagaatggcggaaaacagccattaagatgattggagccacgctaaaaagcgttgacaactgacaacagtttgtacacggcaccgcatggcacctatcctgttgctcacgaccggatctattctctcgtctgttgttatgcccaacagcaaaatccgcttgccgtgccgcgccatgtccgagtcatggccagccgttgattgaatggcggatgatcatcgaaggtactcatgggcgttgatcactgtggcaacaacaaaggccgggcccttgtgagagcccggcctttatgccgtatggcggcggattaatccttaaaggctaatccgttgtcaatcagcgttacagaatcgccatgcacacgaagtccagaatgaacagcgcggccacaatccagatgatcgggtgaacctccttggccttgcccttgcaggtcttcacgatgcagtacatgatgaagccgccggcgatgccgtaggagatggagtaggagaaggccatgaacacggctgcgaagaacgccgggatggcttcggcgatgtcgtcccacttgacttccttcagggaagcggccatcatgcagccgacgatcaccagcacgccggcggttgcggcggacggcacggcggagacgaccggggccaggaacgcggacagggcgaagcagatcgccacaaccacggaggtcaggccggtgcggccgcctgcggcgatgccggcggaagactcgacgtaggtggtggtgttcgaggtgccgcagatagcgccaatggaggtggcgatggagtcggcgaacagggccttgtccatcttggaggagaagccgtggccgttctccagagccttctcatcctcggcggagaagatgccggtgcggcggccggtgccgatgaaagtgcccagggtgtcgaacgtatcggacatggagaaggcgaagatggtcacgatgaccagaggcagcttggagacgtcggagaacagcgccgggaagccctcagcggagaagatcgcgccgaaggtctgcggcagctgggagaaggtttcgctgatggactgcgagttggaccaggtggtaacgccgaacgggatgccgatcacggtggtgatggcgatggccagcagcatgccgcccttaaccttcatcacggtgaacacaatggccagtacgaggccgatcaggaagacccacagcaccttgtcgttgaagtcggccagactcggggtcgccgccacggcgcctcccttggccgcggctttcgggtcgccgggggtgaacttgatcagtccgacgttcagcatgcccacataggccacgaacaggccgatgccgccgccgatggcgtgttgcagggactccgggatggccatgatgatcatcttgcggatcttggtgacggtgatgaggatgttgatcaggccgcacaggaacaccatgcacatggtctgctgccagctgaagccgaggccgaagcacacggtgtaggtgaagaacgcgttgaggcccatgccggcggcctgggcgtacggcacgttggcgaacaggcccatgaccagggtgccgatgatggccgcgatgatggtggccaggaacacgccgccccacggcatacccgtctgcgacaggatctgcgggttgacgacgatgatgtaggccatcgcgaagaacgtggtcaggccggccagaatctcagtcgagacggtcgtgccgttttccttcaaatggaagaacttctccatttactctctacttccttggttttatgcggggctgcgcaccgcgcgcataatgctgcggctggccccggcgagaattgcgactcgccctgatcggcctgcccaacgcgcgtcaggtgttgcgcacccaatcagaaccgtggccgattatagcttgtggaggtaacgtgaacgggtccgggagtagactgactgccagaataattcggaacaactcagggacacgcagggcacacccgtggaaggaaggcgcgcgatgaaaccggccgtcgaagtcagcatcacctcttggaagaagaatgtcgtcaagcccggtcaggagtacggccgcgtactgctgatgcctggcaccggctacaactgcgaccgtccgctgctctactggtcggcccaggctctggtcgaggccggctggcgaatcgaccgcatgaacgtacgcaacgcttccgacgacctgtccacggtgattccggtcctcaatcaggcgattgacggctggatggccgccgcgcgcgagtccggcgcgggtaaagccggtgattccggggatggcgttgccgccgatgattctgctaccgtgctggccgatggcgcagctggctcgccgaaccgtgattccgacaccccgtccggccctcgcctgttgctgatcggcaagtcgctgacgacgatgacctacccacatgtggcctcacactacggtctgccgttcgtgctgctgaccccggtgctgcatcacgccgacttcgatccatccgcccgggtgattccggtgccggctgtcggcgatgatatcgtcgccgaatccgaggctccgagcgtggccgaagcaagggcgatcatccgcgcagaactggccgaccagtcgcacgccgccagctcccgatactccggcccggcaccgctgatctgcgccggcaccgccgacccgttctacgatcgagcccgcgccaacgcgctcaccccgcacgtgcacgaatacccggatgccaaccattcgatcgaggtgcccggccactggcgtcgctcgctcgactatctgaaggaagtcaccgcgtccgtagcccagtacgccgccacgttgtaatgccttgcgacacgcccgaattctgcaatgtcgctgaccatccgtaatctaatcatccgtaaaccacagaccgttggttgaagtgcgcgcgagtgcatttccgaagtttggttcgccaagccagcgcaggttgagagatataagcccgtcaagggccggcgaaggtcgcttcgcgagattatattgctctgcctgtgcgcagggcttttttgttgcccggccgaaagttccgaactccaagtcaacggccgacttaggaaggaacgccatgaagaggcccgaaaaggaagcggtagtcgctcagcttacggaagaattccgtaacgctgacgccgtctacctgaccgagtaccgcgggcttaccgttccgcagatttccgatctgcgtgaaaagctaggccgcgatacttcctacaccgtggcaaagaacacgctggcacgcatcgccgccaaggaagcgggcatcgagggtctcgacgagattctctccggcccgaccgccatcaccttcgtgaagggcgacttcatcgaggctgcgaaggtcatccgtgacttcgccaaggacaacaaggctcttgtcatcaagggtgccgccgctgacggcactgtctacgatgccgagggcgccaagaagctggcagacctcaagtcccgcccgcagctgcttgccgaattcgccggcgacatcaaggcatcgatggccaaggccgcgtacctgttcaacgccctgcctaccaaggctgtgcgtacgatcgacgccctgcgcgaaaagcaggagaaggctgcctgatttacgccctcacggcatgaatcagtcgcttcgataatttaaacaataaggtttattaggcagcggatctaccacttcgtccgccgccaagattgaaaggaagccataatggctaagtacaccaacgatgagctgctggaagccttcggcgagatgaccctggtcgagctctccgagttcgtgaaggccttcgaggagaagttcgacgtcgaggctgccgctccggttgccgctgttgccgctgttgctggcgctgctgctccggctgaggaagagaaggatgagttcgacgtcatcctctccgccgtcggcgacaagaagatccaggtcatcaaggctgtccgcgccatcacctccctcggcctggccgaggccaaggctctcgtcgacggcgctccgaaggccgtcctcgagaaggccaagaaggaagatgccgagaaggccaaggctcagctggaagaggctggtgcctccgtcgagctcaagtgatttgtgcggcataagccgcaatcacagcttttcgaggaaccccgcacctgtgtttcaggctgcggggtttccgcatactgagtagactagttgacgagggcgaggcggagaacgcgatccggcgtggaatcacaaagctggcaatgagcgaaagttgtcaattctgtgcccagtaatccgccaaaagccggtaaaagatgacacaatggcacgtagtgtggtcaaatagtgtgtccaggaaggcggtcacggtgagcgagtggacggtgaagatcaacggtgtcgaccggatcagcgtcaagccgggggagtgcgtggaaatcggccgtaagccgttacgcccccttgccgatgatggcaacacccgccttgacgtcgccgatcagaccaaatcgatgtccaaacggcacgccatgttcacggtaaaaagcaatggtacggcttcggtccgcgatcttggatcgaccaatggatcgtatgtggtgcgggaaaatggtgatttgttgcgcttgccggccaatgtcgagttcctgttgccgacgtctcccatgcgcatgcagttcggtgatgtgcctgcggacttcattcgtatcgacgatccagtggcaaagccactcgaccttaaggtgcctgatttgtttggctatgcggttcacgaagcaccgcaggagccggatgcggcggatatgtctgtcgacgatattcttgatttgcgggccggcgagccgaccgccatcttcagcgcggataatgttcgacgcaaggtcgacgagcttgaacttggctcgctgaatatcacgcagccagtgacgaaaaacgatgagccggccataccccgtgacctgttcgcggatgcgttggcccagcatgccgagcaggagaccgaacgcaaaaaccagcaggccatggactccgtggtactgccgaagcagcagaccgaacctgagtcgacgactgtaacgcccgcatccaagcacagcaggatctccggtattgtcccggtagatgccatcgcccatgccgttgttaagcacgctcccagcacaagcgagccggcagtggcgtcggcggcggttgttgaatccgatgtggtggctggcgcaagcaagtcagccgaaaacgttcagtccgctccgaataccgacgattctcagccggtggacgctgttgcacagcattctgaaggcactcagtccgaagccgcccagtctgaaaacactcagtctgagaccgcccagccgacaaccacccagcctgaaaccgctcaaccggcaaccgacgcacccgaggatcagcagctggcgaccgaaaccgaaaccgcccagcagtcggtctccgaagcgtatgaagcgtctgatatctactccacgggcgtacacactccggtcttcgagcccggctcggtgttcgagcgtgtggccaagggcgagctgaaagcacaggagccggcagtcgaagtcgatggcctgacctctgacgaggcaaaaaccacgcaagatttcaacgttcagttcgaagtcgcccgtcatcccgaattactggcgttcctcgccatgaatccgtacctgtacgacgacatgtattcttggctcgccgcccgtggcgaggccgatattgacgaagccctgtctcacaacaagggctatcaggaataccgcgaagcggttggaaagtgagtcgagagatgacccagagccagactcagaaccagaatctcacggaaggtctgaatcgcatccgtcgctggcgtgaccaataccgcagtatgcagccgccatcgccgctcgaggatgtgaatcaactggccgcgaagctggagatgacccatgcccatccctccggcatcgcccagctgttcgcttccggccatgttcggttggattcgttgttccgtgacacgggtgtgcttaaggccgccgaacgccatatcgggcgcgtactggatgaccaggccgccaagcgcaggatttcgggcgtggcggagttgtcgctcgtggtcggtgtggccacgtggaggggcaacgcgctgccggtgctgttgtacccggtgagcgtcacgatcgaggatgatggcttgtcgaccaccattcgattcaccggtcgcgtgaccctgaacgccgcgttcgtcaatgcattgcgtgagcagggggtgttcttggatgaggattccctgtttgacggtgccagctatgacagtggcactcccgaaacttccgcgatgttcgcccgtatttcgtccgaagcatcggagcgtatctccggcttcgccatcgagcgccagattgtgctcggatgcttcatggacccctcgtcgcagatgatcagcgaaagccgacagttcatcgaccagctggagaatggccccaccggcaatgtgctgttggacgcgcttgccggcgacaaatccgcccgcaccgcgctcaaagatgccaatattccgcaatacagtcctttcgacgtagacccgcatgccgagtacgaagtcggcgatgtggacaatacggtgcgatatgccgcgtcacttgctgccaatggccatagcatcgtggtcgacggcaccttcccgaagggcaccgcggagcaggctgtggccatcgcatcgcgctgcctgatgaatggtcgttccgtgctgtacgtgcccggcgtggccgagcagaagcgtctgttcatccagacggcctccgccaatgagatgaaggcgcaggtactggatgtatccgatgaacacgccaacgccgcgcttgataagcagctgattgccgcagtcggattccagcccggagtcgccacccagcgattcgaccagctggccgacgaactcgtgggcgtgcgctcgcgcttgacccgctatctgggcgacctgcacgggggcaacgataagtggaatgtgtccgcatacgagaccattcagaacctggcccgtatctccgtgctcccgacgcaccccgccacccacgttcgacttgacgagtcaagtgccctgagcgtcgccaacgatattgacacatggatcagcaagatggaacgtgccggcgagctcggcgaatacaccatcggcccggaagacaccgcatggtacaaggcgtccatcaccactgaagaacaagcggtaaccgcttaccagcgcgtggacgatttgctgcgtcgcttcctgcccgccacccgtgagcaggtggcacgcaccgtgcagacctgcggattcccggttcctcccaccactcgcgagtgggagcgtcaggttacggttttgaagaatctgcgacgagtgcttgacgtgttccagccagagattttcgagcgagacatcagctccatgatcgaggccaccaagccgaagagccagcgcaaggccgaaggcacgtcgatgggattctgggagcgccgccgccacgtcaaggaagccaaggatctgctgcgcgtcggcgcgcaggtcgaggacttgcacgaagcgttgaaggtagtcgccaagcaaggggagcagtggcatcagttcgtgcctcacggcggttggccggtgctgcccagcaagctcgacgagatcatctccacccaagaggcgctggtcagcaatatgaccgcgctggataccgtgctttccaccacacccgccggcggcaatctggaaaccgccgatttcgagaaggtggaagcacgcctgaaagcactgctggatgatcgcaaggcactggacaccttgccggagcgttgcctgctggagcaggaattcgcttctgccggtctgaacgagttggtcgccgatctcaacgctcgccgggtgggcgtggagcaggtgcgtggcgaagtgcagctggcatggtggaccaccgtgtttgaggacattgtgcgttcttccgccatcatctccaaccaggatggtgccgcgctgcagaccgcatccgaccgcttcgcacaggtcgatgtggagcacgtgcgctccatcggaccgatggtgtcgcaggaatccatgcgccgcctgtgcgacatgctgttctcccgcactcaggaagccaaccagatgcacaccgtgctggcagggcgcgccagtgtgtcgctgagcaggattcgccgtgatcatccggagattctggccgcggccaagccgattctggtggccgcaccgggtacgctcgccgcactcaccgagccgggtgtgctggctgatgtggcgattctcgatgcgtgcgcgcacattcccgctatcgagttgctgtccatcatcggccgcgtgcagcaggtggtggtgatcgcccactgcgcgacggtaaccagcgaaagcgtcaagcagctgatcgacacgttgcctcatatcgaggtggatgctgccccgtctcgccgtgcgccgcgcctgtccgcattccttgaatccgagggatatggtcctgttcgctatgatgtggccaccgagccggctgccggtgaggtgcggttccaccgtgtggaagcgagcggtgtgccggttatgtcttctggtctggtggaatccagtcagtcggagattgatgaagtggtgcgtctgattacacaacgtgccgccggttttgctgtggttccttccagctatcgacttgtggtcgtgatgttgaccgacgcattccgcacacgcttgggtgccgaattgaagtcgttggcaggcaaatccaaggcgatgggccgattcctgcgccatgtgcggctggtttccttgcgtgacgtggccggaggtcgtgccactgacgtgattctgtcgatgtgctatgcgaaaaccacgcacggacgtctgcttcagcagttcggtccgctcgaaagcacaggcggtcgcggactgttgctggatgccctggcattggcggaccacagcttggatattgtgtcggcctttggttccgaagatttggatgaagaacgactgcaccagtccggtcctcggttcctgaagaccatgttgacgtgggccgaacagcttgacgaccgtccggtgcttccgttgcgtgatgcggcaggcggcaacgtgctgttcgacgatatcgccgacaggttgcgcgcgcgaggactgaacgctgctgttgattatggattcgacaagggcgtgaagattccgctcgtggtgggattgaaggacaagccgtttgccttggccgtgcagaccgatgacgcgaactttatgtccgtgcaatccacgcgcaggcgtcatcgtttgtcggcacaggatctcatttccttgggctggaatgtgatgaccgtctggagtgtcgccgccttcgtgaaccccgataaggaagtcgaccgtatcgtcagccgtatcggcgagatctaccgcgaggttgaataatcatggcggaatactcggctacacggcgcacaccgcgcaagcacaagcgcgtggtgatgaaaggcactgagcagtttgacgctgacggcgtcaaactcgagcccggagacatgcagaccgaccaacaacggcaatccgacgacgacaaacgcatcctcggcgaactgcctccacactgggctgttttcaacgagcgcgagtaggagttgaggcgcactctgtgcgctctgatgttgtgttttccgcagccgtacggctgcggaaaacacaacatcggcc

SEQ ID NO: 1782 - DNA, 15942 bp, Unknown
  MAG_14  MAG No. k141_32582
caagcccgctccaaagtcatatcgggcgattcacatatgaagaacaactgtctacagtatagacaagggccttggaacgcgggggcttcactctgaagtcaagtatttgatacaatttggtgcaaaaagatagtaaatagcaataaggagtggctatgagcatgcagattgccacgcgagttgatgacgagcaggctgcgttgtttaaggagacgacccgacagctgggtaccaccccggccgatgccctgcgtatgttcatcagcgcgttcaatgattaccgtgggttcccctatgaggtgcgtttgccacgaaatgacgtggagccgtttgcgtccgagcgggacgctactgagtatgccagtcgtctcgccttgaggatgtccgatgaaacgaggtgagatttggacgttgcaggccgatggctacgccagcaagccacggccggttgtcatcgtgcagagcgatgccgtcgatcggttcgattccgtcatcacttgtctgctgacctcatacgattcctccgacatcgacacgcgggtccgattggaaccaagtccggagaacggcctgaacaaagtgagttacgtgatgacggacaagatcgtcaccgtcgaccgcaaactgctgggataccaagtcggcgtggttgatgatgcagccatggcgaatatcggccgtcagctcatgcgggttctaggtttgctgtgacgtttgggatggctggcgggcgtgcgtctacttgtgacatcgtttatgcacccttgaggccgtatgatgatggcgtcgaattcaagctctccccaacgtctaagaaatggcttccttcatattacggtcatacgaccaacaccatatgaaggaagccatcatgaatggtctaacggcaatcagcttctcatacgtgattgccagtcattcaccgaatcagccgcggttgtcgaacatctgcagcagcatcttgctgggttcgacggcatagacggtgtgcggcagacgggcgctcaggtagacgatgccgccggccgtaagctcgacttcacggccttcgccgccgacgcgcagcttgccttccagcacctggatgatcacgggcatggccgcggtgtgctcgctcagtgcctggtccttgtcgaagccgaacagcacggcgcgcaggccgtcctcgcgcagcaccgtacgggagacagtggcctcctcctgaatatcgatcaacgaggccaagtcttcgatgaatccaagatgcggctcggtcgaaatggcgtggccttcggcgtcgtgggcgtcgtgcttgcaggcgcagtgcttggcctcacccgcttcagcggccgcgacttcgccatgcttgcagtggcactccttcttcgcgcccggctccgcggccgcgccctcggcgtgctcgtgcttgcaggcgcagtggtgttcgccgttggcggcagccgcctcggctgccgcggcggcttccctacgctgcttgcacttgcaatgctgctcgtcgcgccctgccttgcatacggtctgctgctcgttctcatcggtcatgatgttctcctattcgtcgcgcgtacctcacatacgcgtcatcgcttttgcttgttttccattatccggccatcgtgggccggcacaccgctgttacgcttcgggcttgcgcacctcatccttgacggattcgtccaggttgtccggctgcaggccgagttcgtgaatcgagtaggtgccgccggcgcgcagtagtcggaaggcctcgccgataatcgcctgcttgccacgctcggtctgcatggtaagcatggcttcgccgatcaccacgtcggcgctgttggattccagaccggtgtcggcggcgtcgcgctgcacgcagcttgccggaatcgtggccttctcactggtgagtttggagatgatgtccacgacctgctggtcgcggtccacgccacggtagctcttggggtcgcggtcggactgcggcaggggcagctcgcggttggcggcgggtttggtggcagtggactgaaatgcctgagaaggctgcgatgtagtggtcatgtgtcgtgatgctatagtccacagcccgcccgcacaagggttttcgctagaaatcagccgaatgtgagaatgctcacccgagtaggcgcctgagcatgcggctcagggacgattcaggggatgctcagggttcccgtcaccgattccccacatatcgcccgcgttcgcctaatagaatggaatccagcattcgattcggtatccggcgcaatgccggcaaacgtgaggaacttacgatgagggtcatcggcaatattctgtggatcattctgggcggactggcaatcgccatcagctggacactgatcggactgtttctgtgcatcaccattatcggtattccactaggagttcaggcgttcaaaatggcgggccttaccttgacgccgttcggcaaaaccgtgcaatacggtggcggcgttggctccacgctggccaatatcctctgggtggtgctggtcggctggtggatggcactcggctatctgggtgcaggcgtgctcaactgcatcaccatcatcggcatcccgttcggcctccagtcgttcaaaatggccaagctcgcgctctggccgttcggcgcacagatctacagtctgtaacaattgtttctgcagtaggtccggtgcagcgcattatcatcgtgcgttgcaccggactttttatatacaacgggcatttcacacaccgcgtgatttgacggatttggacgtaagaccttatggtgcgcgaaccatgctcaacacatcgcattcagcagcaacggcgtgaacgaacacgccatctgatcagtacacctctcattggcgcatagctgaatcattgccggtgatatcgagcgactcattcgcaccatgcctcataaacgcacctgtacgagcatgtgttcttggcatcgtcgcaactcaatgcaccgcggcaaaacccattgcataccatcacatattcagaaagaacaacagatcatgaagtatttcactactgacacgcatttcgggcactacatatgtcactcacacgcagtcatgcgcacaactatatttttgtattatccatgattttatagttgtttattgactcatttccttctctatcttatactttctataatcaaggatactctttgggaagcgagtctctctcatggatatgaagtatagaagtttggcaaggctgttccatgccgacaggtcagtcgattccttcaataaccatgcagcactcgcacggcagcggcttgaggcagattccacattcaggaccggggtcatcacgccattgggcgagctgttctccgccacgccacgcgagacgaccctgctcacggaaaatatacttctcgccgaaaggcgcatatcacggctatggaacctgattcccggcgtcatgcgctgggactacatacggcattccatcagtgaggaactgttcgccaccaacgagatggaaggcgtgcgcagcacccgcaaggaaacccaggacgccgtggacgcggccgacaaggcaaggagggacggcgacgactccaaggcgcggttcagcgaatttgccaagctgtacctgaacctcacggacaaggactccgcgttgccggcgggcatcgccgacatccgcgacatctatgacaaggtcgtgctcgacgaaatcgatgagagcgatcagccggacggcgacctgttccggaaaggcgatgtggaaatacaggggccgcacggcctcgcgatccataacggagtcaaaggcgaaggcaacatcggcgcactcctcaccgatatgatccatctcgcgacctccgacgagattccccggctgcagtcggccatcatgtcgcacttcctgttcgaatacgtccacccgttctacgacggcaacggcagaaccggccggtatctcctggccctgtacctgaaccatgacctgactatgcccaccgtgctatccctgtcccgcaccatcgcggagaacaagaacgcctactacaaagcattcatggaggcggaggacaagctgaactgcggcgaactcacgctcttcgtgaacaccatcctcggattcatccaacaagcccaggatgagctgattgacgaactcagtatcaaggtcgatcagctcgacaaaggtcggatactctgtacacagcttgaaaagaggcatggcctatcgcgcaatgccgtctcggtgctctatggcgtgattcaggaagagctgttcgactcgtccaaatccatgtcgttggacgaagtggcccatcacatcggactatccaaacagagcgcaaggaaatacgtggaagagctcttggccgcggggcgggtcgtacagaccggaaaacgcccgctgaaaatacaggtggcgaaatcattgaggaatgttctcgccacaggagccgacgagaacgcggaagcctaagaaaagtagacgcaaacatctcatctcaacgaggttcataaaggttcgtaacatgaagaaaggtctgggcaaccaacactgctcggacctttccacaacactcccgtcagtcgctttccgcgacggctcccctcaggaaggggagccgaggaaaactacttgctgacgttaaatttgaactccacaatatctccgtcggccatgacgtagtcgcggccctcctgacggagcttgccttcctccttgatcttggccatggagccgtcggcggccacgaaatcgtcgtaggagacgatgtcagccttgatgaagcccttttcgaagtcggtgtgaatcacgccggcggcctgcggggcggtccagcccttgtggatctgccaagcgcgcacttccttgacgcctgcagtcaggaaggtctgcagtccgaggatgtcgaagcccacgcgggccagttggtcgagaccggactcgctcaagccagcgtcggccagcatttcgcgggcgtccgcctcgtcgagctcggtcaggtctgcctcgaactgagcgttgaggaacacggccggagccggggccacggatgcggcgagctttgcctgcaggtccttgttggccagctcgttgtcgtccacgttgaacacgtagatgaacggcttggcggtcatcagatgcaggtcgtagacggaatccttgtcgaagcggccttcgcgtgcggccttgtcgagcgtctcgccggcttcaaggatggtctttgcctgcttgactgcgtccatgtaggccggctcgatcttcttgcccctcagatccttctccagcttgggcagcgcgttttcgatggtctgcaggtcggcgaggatcagctcggtgttgatggtgtcgatgtcgtcggccggatccaccttgccgttgacgtggacgatgtcgtcgtcctcgaaggcgcgcacgacctcgcagatcgcgtccgcctcgcggatgttggccaggaacttgttgcccaggccttcgccttcggaggcgcccttgacgatgccggcgatgtccacgaaggtcaccgtggcgggcacgaccttttcggtgtggaccagcttggccagcacgggcaaacgcttgtccggcaatggtacgatgccggtgttcggctcgatggtggcgaacgggtagttatccgccagcacgttgttgcgggtcagtgcgttgaacatggtggacttgccgacgttgggcagtccgacgattccgatagtaagagacatgattccagtctagggagaagctggacacattgaacgtgcatgtggtgaaccggccatatgcaaaggcctccgagcatacggctcgaaggccttgactgtgatatgcgaatatacgcgaactctgattggcagtcagccgacgatggcgtctacggcgtcgatgaccgagccgcggaacccgtccttttcaagctgggcgacgcccttgatggtggtaccaccgggcgagcagacggcgtccttcatggcaccgggatgggtttcagtggccatgtagagcgcgccgacaccttcgaccatcttggcggcgagccggtaggcggtggctcgctgcagaccgtactgcacgccggcgtcgcccaaggcctcgatgtacatgtcagtgaaggcgggcgcacagccagccaccaccatggcgatgttcatatgcgcggtgtccacgcgctcgatgaggctgatggggccgaatagctgctcgaaggtttcggtttcgtcgtcggtcagggtgttgacggattcggtgacgagcacgcccttgcccacggccatcggagtgttcggaatggtgcactggatatggatgtccggggagtcgacggattcgccgtcttcggtggtgaacaggtcctggtactgcttgagattccagccggcggcgatggagacgacgatcttgcccggcttggcaagttcgtcggccagcggcttgacgacggcggcgatctggtagggcttgatggcgatgatgaccacgtcggcggccgtcaccacttccagcgcattgtgcaacggacgcacgccaagttcggcggtggtcttctcaagcttgtcgtagtgggcggcgcaggcgaccatctggccgccggcgaccacgcccgcgtcaacgaagccttgggcgatggcctgggccatgttgccatatccgataaaaccgatggtgaggttctgagtcatacgttttcctttcgtgcatgtatacagagctccctcatcagagggagcttgcttccttgagtcagaacagttcttcgaggtcgccccggttaagggcttcgtcatagagatgcttgaagacgagcgggccgtgcagaccatcatgctcgaattcgttggtggtccagtagtggctgttacccacgcggctcaaggtgtcgagctgcaggccggaatcgacatacatgtcgtcgaaatagacggcggcctgcaacggcacctcattgcgggccagctgttcttcgtcatagatcacgccgaagtgcgtgtcttccatgagcaggtccatggccggcctgaacggacgtaacgcagactcctgttcgaacatccacgggaacatggcctcgccggtgaaattgagcggacgcgcaacggcatcgaattcggacctgcagtcgcgcacgcgctgggcagcccaacgaatgggctcgtcaagctcgccgttggcgtagatgaattcctgcagcggccagtacagtgggcgcgacgacgtggcgttcatcactttggtcaaaaattcgtcagacaacggcgagtcggcagaagcggaaccatcgccatcaaggaaggcgtcgtcaagaatccaatggacacgctcgaagctcggcttcatgccaaagtcggatcccaagcactggaagcgttcgacggtgagcgggtcgccgttcggcatcagcgggaagccgtggacggccatgccggcgatcacgccaagtcgatgctccacatcggtaccagccatcggattcagtacggaatcggtgagtttgccaacgaattcggcgacttccgcagtagtcggcagcttgtcggcgatggcggccacgcgctccttgtcctgtgggtagcgctcgtagaactgagtcgtcttgcgcaccatgcgcgggaaggtatgctcgtacacttcagcggcgtcggccggcacgtgcgggatgccgccggtggtgaagctggcgattacgccggccgggaacagggacagtgtggtcagggtcaggaagccgccgtagctttggcccatcgtcacccacttgcggccaccgaattcggtcaggcgcagatgttcgaagtcacgcacgatggaatcggcaaggaacttcttcaggtagtcggcttgggctcgtgcgccggccgcggcatcatcgtcgtgcgcggcggcgatgcgggccatggcgtgcgtgtccacgcgcgaggagcggccggtgccgcgctggtcgggcaggatcacccggaagtgcctgatggcctcctcgatccatccgtcggaggtcgggctgttgaggcgcgggccggcaccgccgggaccgccttgcaggaaaatcagcaggggcaggtcgtcatgcacgtgttcgggcgcggtgaccacgcgatagaacagtttgatggtttcgccgtcgaacgcttggcctggctcatggccggtccagtcgagcggaacatcgatggaatggtcctctatggccagtccgggcacgtagtatttgctcagcattgtcatggttcaagactctagtccataaatcctcctgaagagtgataccggttcgtcgccggacacgctagccttgcgcgttatggagattatggcgcgcgtgagggcatggtgcgcacgggagtcgacccgcacactgctatgggacacgttgctcgccgcagcgctgatcgccggctgcgtgccgttcatcggcgtcaccagccctgattcgacgggcggcatattgtttcccgcaactcaggcgtcgatgacgctgtggtcgctgccggtcttcgtgccgctgatgctgcgcaggtattgcccggagccggcggcctggctgttcgtggcgctgaccatcacgcatcttgtgttcggcccggcgatcatgtatttcgatttctacgccctgatcatggtgtattcggtgattctgtacggcaatccccgacattcctggcggttcatcgtcacggcgttcgtcatgggactggtcgcggcgatggtctggtcggtgtctttcaacgtgggtccgctgttcgacggaccttcctccggttcgcgcgtcatccgcgacggctggctgtccgatgccatcacgatgcccacatgcccggcggtcaccggcgtcgtgggggcaagcggcgccgtcaactgcggggccaagatgctcgctgacttcggcatggaggcggcgttcatcgaatcgagcgtgctgagcgtcatcatcatggccttgtggcagcgagcgcgcaacgccacgctggcggccatgcgagagcgcaacgcttccattgtggcgaaagaggccgaggagacgcgcatcgcggcgctggccgaacgcgcacgcatcgcccgtgatatgcatgatgtggtggcacatacgctctccacgattattgtgcagtcggatggcggccggtatgcgggtgcgcatgatctggccatcgccaagcacacgatgggtacgattcgccatgaggccgaacgcgcgcagcatgatatgcagcgtctgttcaatgtgttcggtgcgagtggcagtaccggatatgccgacatcgattcgctgtttgacggtcatctggtggtgtcccggcatatgaccggcaaagcgcaacctgaccggctgtccgccgacgcggaaaccgccgtgttccgtcttgtgcaggaagcactgaccaatacgcgcaaacatgcgggcgagggtgctaaagccaccatcgatgaaatctggtcaaacgatgtgctgtcgattaccgtatccgataacggccgtggcgcgacgtctgcagcagacggtcataagcccggatacggattggttggtatgcacgaacgcattgagtcgttgggtggcagcgtgcaggccggcccagggccgaatggtggctttattgtggcggctacgattccgctctccccagccgccccacagtctggcaccgatacggaggatccggtgctaaccgttatctcgcgtatacgaggattgatggatcgggcgcgccccaaagtactcgaccaaggagatacgcgtgagtcgaactgggtgggtcgatttgcgcagtggaccgagcggcactatcttctgatggacgttatcgccactatcgtgctgattgcgctatttgattccgccacgtatggcgatttgcaaatgatcggcaatgccccgtattcgccgaaccgcgtgccgactataacgctgacgattattatgctctcgcctttggcgttccgtcgccgcttcccagagggcagcgcgctggcgatggcggtgctgtctgctgtgcaactgttgttcttgccatcgattttgaccatcaatatgtttgcgatggtatccgtgtattcggcggtattgtatggacgagagtccgcttggcgctgggtgagcgtggcgctggcagccgattcgtggcttgcgggcatcaaggtgatggctgggtggaatggatacagtcagctgttccatctgtttttgcccgatggtagttccatgctctcaaaatggaggctggttttgtccggcttgctgccgggcgcgggaatcatgttggtcggttttgcctgcattgcgatggctcgatggagccgttcgcgtggcgcaaacgctctggtgctgttgcgacgcgaggaggcgctgcgagccgagcaggagcggcaaaaggtgctggcggccaacttggagcgcaaccgtattagtgcggcgatgcaaaccgaagtactgaccacgctggaatcggtgattgcgcaggctgacgagggactggtgatgctcaacgccgaacctgcgcctgatagtatgcagattgaagcggcttttgccgcgattggtgctcgggggcgcgccgcattggctcatatgcgtcagctgttgagagtgttgcgtgaaaccgggttcagcgacgaggcccatgagggtgtgcagccggatatgcagttgcgaccggcggcttcgttggatagtcagatgcaacacgcgggaacgttaccccggtgagagacttgcccaataagaactcagggaacaatcagggtgtttatggagcggcgctccgataggaaacggatacagtggagagcatgaacgagagcagaagcattcgcgtgattattgcggacgaccaggagctggtacgtgccggttttgccatggtcattggttcgcaaccggatatggaggtggtcgggcaggcgtccgacggcgcccaagccgtggcgttggcggaatccctgcatcccgacgtggtgctgatggatgtgcgcatgcccggcatggatggcattgaggccacgagccgtattacctcactctccgccgcgccggacaacgcggccgattcggccagcccggccgccgacgcgaccgtctcggccgaatcggctgacgaccggccgacgcgcgtaatcattctgacgacgttcgatttggacgagtatgtgatggcggccatcaatgccggcgcctcgggcttcctgctcaaggacaccgaaccggaaacgttgctcaattcgattcgtactgtattccaaggcaatgcgattatcgcgccttccgccaccaagcgactcatcgaaaagatgatgcaggacggttacgcgcagcatggttcgctgaccggcgatgtcgcgcgctccggtgccgtgtacggttccgccgtcggcgtctctggcggtgcggccggcaacggtgccggctcgatgaccggcatcccctcccctgccggggccgcttccgacggttccaatacgtcacgcccagcatacaccgatcccgaactggatctgcttaccgaccgtgaacgcgaggtgctggtggagatcgcccatggtctgagcaatcaggagatcgcggacaagctctttatctcccttcccaccgtcaaaacccacgtggcgcatatcctcgccaaaatcaacgcccgtgaccgcgtacaggctgtagtcttcgcgtacgataacgggctggtgtaacaaaaaagctccctctgatgagggagcttattgctctacgcttcggccaaggcttcaactggtggcgttttgacggcccggcgggcgggtgccacgctggccagcagagcggcgagcgcggcgacgccgagcaccacaccgttggtggcccattcgaacgggaacacggtgtcgccgtacaaactaaacaccatgtaggatccgagccagccgaacagggtacccaataccactcccaccacgccggagacgagcgaaagcagcaacgcctccaccgccagcgagcgccgcagttggccgcgcgtcatgccgatggcacgcaaggtggcggattcgcgtgtgcgttcgatcaccgacagactcagcgtgttcgctacgccgaccaaggcgatgagcacagccaccgcaatcaaaccgaccaacaatgccatcatgccgttgatcatggtctcccattgcgtacgttcggccaccggaccggtcacggtaacgccagcactggcggagaacacattctgcacgttggtgaatacgtcgttcagcgcaacacccgcgccctcggcgtcaatacgcataagcatgatatgcccgtcggccttgattccaccgttggtgaagtggctggcgtccacgaaggcgaccgcggcgtagttggaggcaatgcggcgatagtccaccttccgcggtttgagcgtcagcgtctgtgtgccgccggattgtccattgccgttttcggcgctgccgttcgcatcattaccggacggaccattggcggcatcggcttgtgcttcggccgctccagccgtgaacgtaacgctcttgtccagcggaatatccttgcctgtagcggcggaatacttgggcatcagtacggaatcgccatcaatggtcacaccggacaaatcggagcgcaccaccttgcgcagcgcgtcgacgccatccacgcccacgacaagcacactcaggctcttgccgtcggcatccttcatggtcatcatgcgggtcggcgcgtagatactgctctgaacgcccttgactttggctgcctcgccggcctgtttgccagtcatatcggcgccagcggcaatcatgtcgacgctgtagcgcgtggtcagcgcctcgttcatggtttgcttggcgctggcggcaccggtggcgatggtggagaccagggtcacgccgataagcagtgcggcaccggtggcggccacgcggcgcgggttcttctgaatgttcgcatgtgccactttggcggacggaccggccagtgcaaccagcgcgcccacgccgcgcatgagcaccggtagccagaacgtggcggaaagcaccagtccaaggaagatcaatgcacatccgatgatggcggcgagcagcaccagcgaatactgcttgtcggccattgaatcacgtccggcgattttctcggacatctgccatacagagaatgcgcacagtgccacgccgcccacaatcagcagcatggaaatcacggcgcggaccacaccggcccgtcgcgtgtcggtcagttcgatgggtcgcaacgcttccagcggggtgacggcggtagcggaacgcgcggagcctagcgaggcaatcaccgtcataatgatgccgaatgccataggcaccgtgaacaccggaccggatagtaccagtcgcatggtcatgccggtggctttcatcaggcccgactggcatagtgcggccatgagtccgatgcccaggcccactcccagtgcggaggcgatcagtcccagcacaccggcttcaaacagcacggagacatacagctggcttttgttcgcgccgatggtgcgcagcagggcgagtgtgcggcggcgctgtgccacgagcacttggaaggtgttggcgatgacgagtgccgcgaccagcatggcgagcatgccgaagctcagcaggaagatggtggtgatgctggtttcgcccgagctcatgcttttgacggattcctcgacgagcgcggcacgggattgcacgctgaaatgcttagggagcagtgtgctgacctgttttacggtggatgccgcggccgtgtcgctggcatcgtcgatgtcgagatagacgaggtagacaggcaggttgccgaaatcgttgctgccggccattgcggtgatgacgttgtcggaaagcacggaagcgccaccgtagtaggcgtaggcaccgttcgggtcgtcggtgaggccgaccacgcgcacggtcatgccggagtcggcggccgtgtcggtgccgtcggatggggcggacgcgccggacgcggcatcggaatcaccgtcgtgcgagctcgtgccatcggcgttctgggccgactcatcaccagcgtcaccggtattaccggccgaatcgccggtcttgcccgcatactgcgccgcctgcgagttgacggtcacacggtcccctaccttgacgccgagctggtcggctacggacttggtcagggcgatctcgttgctgtccgccggctggtctccttgcgtgatggtgaccggcagcagcgtgcgctttgtggcggtggtgatgacgtagctgctggcatgcttgttgccacgggttacggtcacggaacccgcgtagccggcacgtgcgtccttgacgcctttggtggcgcggatgcggtcaagctggaagtcgttaaccgtgcgcgtgtagatgtagtcctggtccttatcggtcaggtccttgccgctatccgggctgatcacgtagttcgcgccgccgagctgggcggtattctgggcggcaagcgcatcgttcatcgcgttgccgaacaggaaggtagcggcgatgaacgcagtgccgatcaggatggcgatgcctgccggaatcagcatcctggcgcttttcttcataagtttcagagtgatggaaaacatgggggtatcctgtctctcgctttccggctcagcgagtgtgctgtgcggcggcgcgggcatggcgtatggtgccggttctcccggctgggggcaatggagcgtcggtgatgggcaggttgggcacatcctctacgccggcaagacgggcgagcgtgtcggcgcgtgtgctggtgacggcagtgcgcgtggcgcgttcgcgttcggccataagcagctcgttcatcgtttcggcagtaggattcgattcatcggccacgatctgtccgtcggcgaatacgatggcacggtcggcgtaggaggcggccaccgcatcgtgcgtgaccatgacgatggtttggccaagctcgttgaccgaacgcttcaggaagccgagcacttcggcgctggaaacggagtcgaggttgccggtcggctcgtcagcgaacaccagcttcggcttggtaatcagcgcgcgggcgatggccacgcgctgctgctggccaccggacagctcgttcggtcggtggttcaggcgctgcttgagtcccaaggtttctacgagcaggtcgaaccaggcacggtcgggcttatcaccggccaaagtcagcggcatgaggatgttctgctctgcggtgaacatgggcaacaggttgaagctttggaagatgaagccgatcttgtggcgacgtagcaaggtgagctgcttgtcgtccatgcgggtcaggtctgccccgccgaaaagaatatgcccggatgtggcggagtcgaggccggcgagcgtgtgcataagcgtggatttgccggagccggacgggcccatgatggcggtgaatttgccgcgttcgaaactcacgttcacgccacgcagggcgtgaaccatattgctgccggtgccgtagttcttgaccaagtcgacggcctgaatagcgatgccgcgcgatgcggacgggttctgcacgttcataatgcctctccatatttggccggaccttatgcccggatgacgattccaacttatgaagaaataacggcgcgccccatcgtgcgccagactgaattgggctaggggccacgcgccggccctcatccttgaggattatgtcgtctcaggtctcacactattcatgcctctgcgcaaacagtgtgaggcatacagacgcaagaaagcccgcactgcatgacgtcagtgcgagctttctactccttgggtcaagcgatcaggcggaaggcaccccatgcggctcgatgattcgcgatgcaccccattagcatcgcgccccttctcatcgggccgtcaaccctcctgtcgacctcacttggccaagccggaagcgcgaagggcttcgaagccgcccttcaggtcatcgaggatatcctcgatgttctcggtgccgatggacaggcggatggtgccctg

SEQ ID NO: 1783 - DNA, 5856 bp, Unknown
  MAG_14  MAG No. k141_32631
agagtaccctcaaacgagaccggagcggcaagcagaagcgtgtcgaaacgcttctggtcgaatccttctccgatacagctgcccgtagccactacagtcaggctctcattattcggcaccaaggatatatcatgcattttttggttattcgctgtttgcggtggggcgggcatgggttagtgtttcgggttcgattccctgtcagaaaaaataatcgagtgcgggattacggccggtaaggctcctgctgtggatgcggatgcgcgtcagccttacggtgatgctttcccaaaacgcggattgtacgaggtgtgggacggcacgcggattcggccgttttccgcccgccgtcccacagcgctcgctatgaacggttgtgcataatcatggagctgcagcgagaatcggcgttattccgcggtttctacagtcgtcggtgtgggacgctacggacgttaaacagttgacttgtctgccatcccgcgcccttgagggacggcgcggacgacaaacgattgactcgtctgccgtcccacagatattgggatgtgtgcggctgcctgctgcctatagcgggtgtcggtcacccccaccgatcgccccccaccggtcaccaccctgcttggcggaaatacgcaactcgactttctgtaggcatcatggcggcatggcgacggcggacagtcgaagagatccccatgatgcctcaacagccatcgcccacacacatcacagctatcaaccgcaaatatcaagaggccgaaaatctatgagacaagcaaccccggaaagcctcagaccctacaaatggctttattgcaagggtatatgccggttcaaactccactaatagaacaaatagaacagccggcttaggtacggcgcggcaaatggcgcaaaccggccgcgatagtagtagcgtggtgcataccagtacaaccatgcgaggagaacagccatgatcaatgaggaatacaaggccatgcttggcggcaagtccgtgattcgcgggctgagcgagtacgccacgagccgcggtgccgaaatcggctaccagaacgtgttcgattacagccttggcaatccctcggtgccggctccgaaatccttcaccgacgccatggtcgacctctacgaaaacggcgatccggcggccatccacggctactccccctcgctcggcatcccgtccgtcaaggacgcgatcgccgaaaacctcaacgaacgtttcggcatggcatacaccggcaaccatatcttcccgaccacgggcgcggcgggcgcgctgtcccacgcgatgcgcgcggtgaccaagccgggcgacgagatcatcaccttcgccccctacttccccgaataccagccgtacgtcaagggcatcggcgccaagctgaccatcgtgccggccgacaccgagaacttccagatcaacttcgaggcgttcgaggccgcgctcaacccgaacgtgcaggccgcgctcatcaacaccccgaacaacccgtccggcgcggtgtattcggcggacacgctcaagcgtctggccgcgatcctgaccgccaagcaggccgagtacggccacgacatcttcctgatcagcgacgaaccttaccgcgaaatcgtgttcgacggagccacccagccctacccggccagcttctatgcgaactcgctgacctgctactcgtggtcgaagtcgctgagcctgccgggcgaacgcatcggctacgtcgcggtgaaccccgcagccaccgacgccgacctgctcgtgccgatgatgggccaaatctcgcgcggcaccggccacaactgcccgccgagctcgatccagctgggcgtagccaaagtcatcgaccagaccgccgacctcaacgtctacgagacgaacatgaacctgctctacgatgcgctcaccggcatcggcttcgacgtggtgcgccccggcggcacgttctacatcttccccaaggcgttggaggacgacgccgtggcgttctgcatgaaggccaaggaatacgacctgatcctcgtgccgtccgacagcttcggcgtgcccggatacttccgcatggcctactgcatcgacaccgagaaagtcaagcgttcgatccccgtgctcgaaaagttcgcccacgaggtgtacggcctgtaaacacgggccgcaagtaacaaacacaagaaaggggttgccatggaatacaccgaagacgccgatcatcgcgaactgctgctgcacagcgcctatgactccgatacggtccgggccatggagcgacccctgctggacaaaggcgtgccgctgatgcgcatggccgcccaggccgcggcccacatggcggccggcatgctggacgacgaggatctggcgctggaggacacgtcgatcgtgctgctggccggggccggagacaatggtggcgatggtctgttcgcggccgccgcgctggcccaggagggcgcgaacgtcactgccatcgccgtgggccggtcgctgcatgaggccggattcgccgcgctcgtgcgcgccggcggcaaggtgctggtgcttgacccggcagccgatattcccggctgcgcgtccgggttttcctccggtgaggccggtgagcgattgcagaccgccatcgccgtggccaggaaatcgcatctgatcatcgacgcgatgaccggcatcggcattcaaggctcgctacgcggcattcccgccgcgctcgcctccgcccttggtctcgacggcgagtctcccgatgagcccgccctgccgaaccgtgagtcgtcaggcgattttccgctggtacttgctgtggatacgccatccggcgtcggtgtgaacgatggttctctgcccggcccgtacattccggccacggtcacggtcacgttcggcgcgatgaagccgtgcgcggtgctgccgcccgccacgttcgcctgcggccgtatcgagttgttcgatttcggattcgatatcgacgacaaggatccggacgtcgaggtggtggataattcgttcgcgtccgacgcggtccgtctcccccggttcgaggattccaaatattcccggggcgtggttggtctggtgaccggctcgcagcgctaccccggtgccgccgtgctcaccaccagcgccgccgcccgcgcgaacaccggcatggtccggtatctgggcccggagcgcgcgcagaacatggtgctcaccgcactgccggaagccgtgatcggcaagggacatgtgcagtcctgggtcgtggggtccggcgtgcccgaggctagcgtcgagggcgccgacggcgatatgcagcgggacaccatcgccgcattgctcaagcattacgcgctcggcagcgaggatgagaacaaggacgcctacgacatgccgccaatcgtggtggatgccggcgcactcgacctgctgccggagcgtgtgcccggccaggtggtgatcacaccacatgccggcgaaatggcgaaactgctcaaccggttcgaaaccaccgccagcaccgcggagcatgccgattcgcacgagccgtacaccgccgacgacgtgcggctgaacccgttggccagcgcgaagcgcgcccacgagctcaccggtgccaccgtattgctgaagggcgcggtgaccatcgtggtggatgaggaccatgtctatgcgtcgggcagtgcgccggcctggctgggcaccgccggcgcgggcgacgtactggccggtctgaccggcgccctactcgcccagcaggatgacgtggccaccacgggcgagaccgtggcctcggccgcctacctgcatggcctggcggcggcgatcgcctccgaatccgagcagcagggctggcaggagccggaactgatcggccgcgagcatcgccagcgcttcatgacgctcggccacccaatcgtggccggcgacgtgatccacgccatccccgaagccatcgccgacgtcatcgcataaccttgttgacctccctctgacgagggaggtgtctcggcaaagccgagacggagggagagaaacataagcctcaaactccacataccccgacctatacacaaaccccgtacactaaatcgcagaccccacccaacgacccaaacacacaaggaaccatcatggccaactcccccatcaccgacgtgattttcgacttctgcggcgtgctgctggactggaacacccgcgcatgccttgaaggccgattccccgatgaaatcgtggaacgcatctgcgccgacgacgacccctgcggcttcttccactacgaggaccgcatggacgccggcgaggatttcgcggacatctacccggatgtggtacgcgaacaaggccaggaactcgccgacatcttcaagttctacatcggccactacgcggacgcgctgccccgcacgctgccgggcatggtcgaactgctggcggatttgaaggcccacggctacggcgtatggggtctgaccaactggtcgcatgagaccttccacctggccttcgagaagtacccgcgcctcgaacagctgctgcagggcaccgtggtctccggcgtggagaagatgcacaagccgaacgccgacatctacgagctggtcctgacccgcttcggtctcacggccgagcgctgcgtgttcttcgacgacaccgccaagaacatcgtcggcgccaacgaggtcggcatccacagcatcctcttcgagaacgcgtcgcaggcgcgcgaatcgctcgccgaactcggcgtacgcctgtaagtcgccaaatattgcgtcgcggcagttgaagtctatggacccgtccttgacgacggtgaccggccgtttggcgaccggcatgtcgcactgttcggtgagcacttcaacgacgcggcacgcggcaccatgcgcagaatcatcatgaaggcgttctggatgttcatcacgtcggtgccgagcctggtcatcaggctcggcgtggagaagcggtcgatgctggagaaggagaaggtctggatggcatcgtactggtcctgcctcaggttaccaatgtggcgcatatcccgttacacagcgtccgcgatatgcgaggcgtctcatattgtgtcgccatagtggattgatgaggttataaacccgtgtggcgaccatccctagcgatataaatagactttatgacactgctgcagctgaaatacatcgtcaagatcgtcgagtgcggctcgatgaacgaggcctcccatgccctgtacgtctcccagccggccctgagctcgtcggtcaaggaattggagaacgagctgggcatcgagattttcacccgctcctcgcagggcatcgccctgaccgtggacggcgcggaattcctgacctacgcccgtcaggtgcttgatcaggccgatctgctcgaagagcgttacaagcacgccaagccgcgcaagcagctgtgccaggtctccacccagcactacatgttcgccgtcgaggcgttcgtggagatgatcaactccatcaagtccgacgaatacgagttcaccatccgcgagacccgtacgcgcgacatcatcaaccaggtcgccaacatgcagtccgaaatcggcatcatctacctgtccgatttcaacaaggatgtgatcggcaagctcctgcgcgagaagcacctcgaattccatccgctcttccgcgcccccctgcacgtgttcatctcacgggacaacccattggccgccaaaaagatcatcaccatggaggatctgaagccctatccgttcatccagtacgagcagggcgaggaaggctcgttctacttctatgaggaagcggtctggccggagtactcccccaagcaaatcaacgtgaccgaccgcgccacaatcctgaacttcatcatcggcc

SEQ ID NO: 1784 - DNA, 4058 bp, Unknown
  MAG_14  MAG No. k141_32673
catcctgtcggtcgcgttatgccaagcgcacctcgacggcgaagccggacaggccgagtgcccggtgtgcgcctatgaccggcgcaaccaagccacccacgccatcggtctggaccaggccgagcacgccgaggaatcccacgaggaggccaagtcatgaccggcatgacggaagccatgccccgttcgccggaggcgtggaagagcatgggatgctgcgtggatttcccgcagccgtgggccgacctgatgtggggtctggagttcgaggacacgcatcccttggcccgcgtgttccggcaggcgggcgcatcggtatgcgagcatgactgcccggtgagggccgaatgcctagcctacgccggtgccgccggcttggaatggggcttgtacggcggccgctcgtgcaccgaccgccgtcagatcgcccgcctggcggaggccgacggcgtgccctgccgcgaccgcacggtgccctgggcccgccgctggggcctgttcgccgactggatccaagcccatcccgaggtcttcgacacggcccgggacaaggccagcatggaacgcgggcaacgccgatggcgcgccgcaggccgcgcccagcccggagacgggccacatgaccgtcaaaccatcatgcaagcagacaatcaaacaatccgacaaccaagcaatcaaacaatcaaccatgccgacgatccggcgaatggtcccgaatccaaggaggaagcatcatgcgagtagcgttggcgaacgcaaagggcggggtggccaaaaccaccagctgcatctatctggccgccgtgctggcccggcgcggcatcgaggtggcagtctacgacgcggacccgcagtccagcgccagcctatgggcggccgccgccgaacaggcgggagacccgctaccattcgacgtgctgccggccaacatggccaccctcgcccacctgggcggcgccccggccacaaaggaatggtcgatcatcgacgcccctccgcaaggcccgctgctcgacaagacgctggccgtggccgatttcgtcatcctacccacctcggactcgccgatggacctccagcaggcatgggacacgctcgaccgcgcccgacatgccaccagggcggccctgctgccggtgcgcgtcgaggcgaacaccaacgcctgggcccagaccctagccacgttggagcaaaccgacaccgcgcgcttcgacaccttcatcgccaaacgacaaccgatcaagacctcgctcggcatgaaccccaaacaactgtacgaataccgggaactggccgacgaactgacgcgcatcgccaaggaggaactggcatgaaaggcaactaccagccactgccccgacccgtgcccttcgacaaagtcctcgaccaacaggccgaagacaaacaacccaccgggaagaacaacgccggcgaaccgctggtcatgctctccctgcgcctgcccgtccggctgaagaaccgcctcaaaatcgccgccgccgaacacggcacgccatgcaacagatcctgcgccacgccatcgaacacgaactcgaccgactcgccagcaacgactgaataagggacaccgtacatgccgagatgcgaggattgaggaattgatagttgctatggtaaaatccaactaaatttgatggaacacctgacatgccaaggtggttccgaagcaggaaggccttagagcattggtgatttgagcagtggcggattgcatgaggagagattccgcgtgttctgcgcattatcgcgcgtatctgccattgtaccaatcgcaatgcctgattcgatgaagttctcgttagcatagcgactttcggtgccgtcacgaggactgctttctgaatgcagcttggcaataaatggcacagtccgccacttttcgatagtcacagtttgattaatgcgccttatcgaaagaggcttccatgagtcagatattgacactaaccgatatttcctactgctatccgggcgcgccggaaccattgttcgaacatctgtccgcgacattcgcggccggctgggccgcagtgctgggagacaatggcattggcaagaccacactggccaaactcgcctgcggcatgctttcccccgattcggggacagtctcgccgaacccgtgcaagatggcagtcgcctactgtccgcaacgtactgatgaaacgcctacgaatctggatgatttcgcggcggattggacgggcgagaccatcgccatccgcgacgcgctgaacatcggcgacgattgggcataccgatacgagactctctctggaggcgaagccaagcggctgcaaatcgcttgtgcgctggccggcgatcccgacgtgctggtgttggacgagccaaccaatcatgtggacggcaggacgcgccaagccatcacgcaggcgatgcgtcggttcgatggcataggcatcgtgatctcccatgatgtcgaactgatcgacgcgacgtgttcgcgctgcgtgatgctggagcgccgacatgcgcgtgggcgtaacatcacggcggcgaacacctatcagggtggatatacccaggccgcgcagcagatgcgcgacaatcaacgtgccgatacggccgccatacagtccactcgaaaggagctgcaacgcatgcagcgcatcaagcgggagcgggcgcagcgtgcgcgcgaactggatatgcggaagaatcagggaatgcgcatcgatatcaaggacatcgacgctcgcaaagccctgaaaaatctgaaaccggctatcggcaccactgtcgcacagacaagcgcgcaattcgacgggcgtatcgccgccgccaccgacagacttgctcacctcagcgaagcggccaaacgctacgacggcaccatctggatgaacgtcatgccgagctcacgcagggaattgacgcgcatccccaacgaccacgccatcgcggaccaacccgatatgctgagcatcggcccgcgcgaccgcatcggcatcagcggtccaaatggcagcggtaaaaccgcattgatacgacgattgatcgaagcgctggagcgtgatgaagcgcagcggcattcggagagaatgccatatctctatattccccaaaattccagcgacatggataccgccaacgcaatgaaccgcttgcatgctttgacggacgagcaacgcgccattgtgctcagcgcctacgcccaacttaacgccgaccccgacagactgctcgccggcggcaatccctcgccaggcgaactacgcaaacttctgttgtgcctcggcatgattgaacagccacagctcatcatcatggatgagccgaccaaccacctcgacctgcactccaaacaggcacttgctaatacgctatcctcctatgcgggcacattggtcgcagtcagccatgacgaatggtttctgaatgccgtcacatcgattcgatggcgatgcgcgtcatgacgctatctatgagtttacgttccttcgtaagacttggatatcggcaagacgcattccttttcgtatgaagctgtatcgatggcaatgaccgagcaagaggacaccagtatgacacgaccgattatgccgcgagcacatggcaaaaaacttcacatggaggcgaacatggctcatgttcctccggccatcgcaatcacggcgatgcgaccggaggaatatccgttgctcgtcgagttcctgtatcaggcgatccatgtgccgccgggaaccccggcaccggacaggagcgttgtcgagctgccggaattgcggcgatatatcgagggattcggacggcctggcgacgcctgcatggttgcccgcgccgagccaccgaacggttcgcaggccgtgggtgccgcatgggcccggatcttcccgaacaactccgcaggctacggcaccatcgatacggcaacaccggaagtctccatatccttgcttcccgactggcggaaccgaggcatagggcaccgcctgatgacggcgttactggaccgactgcgaaccgatggtcacgccgcagccagcctctcggtccagcgcaccaacgccaacgcc

SEQ ID NO: 1785 - DNA, 10846 bp, Unknown
  MAG_14  MAG No. k141_32917
agtggcgcaccgtggacttcagggaggtgcgctacgacgagggcgaccatttcggctgcccggtgatgaacttctccgacgcggacgtgccgtacacgagggctatcgagttcaagaacttcaatccggagcgccgggaccggcagaatccggacaagaccgtggtgtgggaggagtacagccgtttcgccgagcgcggcgacgaaccgtactacccggtgaacaccgatgcggacaaggccctgtacgcgcggtacgaggccaaggccgcggccgagccgaacaccgtgttcggcggccgcttgggcacctacaagtactatgacatgcaccaggtgatcgacaccgccctgaccgcctacgaggaacaggtcgcgccgctgctgaagaagtagaccgtcgtttcaccagaggattaacgatttagcttgaaaccgactgaatattgctgaggcaatagccggtttcaggcttctgtgttttttgggaagccaaatttcctggggtacttaaggctcgccacgaggagtacagttgtctgtaacgcacaatgtggcgcgtaagacgaggggcgtatctcgcaagtggggtgcgatgcagttgaaggagtgcatgtcatgactgatccgaatgccaatccgaacggccaggtgccggggcagcaagctgacgccaatccgactgagccgttaaatgcgatgacgggggaagcaggaaccgccgccaacaatgctccaacccaagcactcgcagcgggcgaacagcccactcaggcgttcactcctgttgagcagcctacgcaggcgtttacacctgccgagcagtccacccagcctcttgcgccggtcaatcagccggtaccgcctacgcaggctttgccaccagtgactcctgccgctgcgcccgcgcccgcaccgacagcgcccgcgcctgcgcccgcaccagcagcacccaattcgccctatccggggacggctccggcaggcggatcggttcctccggtctacggcagcgtcagtgctcggtatccgggcggcggggccgtgcctccgcaaacgccctataacccgtatatgcaaggcggccaaccgaacggccagccgggatggtctggttcttacggcagtgtgccgcctgaagcgaaccagaagtacaacggcctggctattgccggttttatctgctcgttccttgtctcactccccggtctgatcctgagcatcgtgggcctcaaccagattaagaaacagggcggcaagggcaagggcttggccatcgccggcatcatcatcagtgcggcgggcatggtgatacaggtaatactggtcatcgcgctgatcgtcggcggtgtctcgtacaccagcaaggctatagatgaggcgaaaaccgattccttctatagtcagtcctcttcgggcaacggtgatagcagcgataagagcaaagctcaagataatcttgacgatgcgctggacgacacgttggacgaaacccatgacgatctaaccgacggcgattatgggctgtacgattcgattcaggatttcgtcgactattcggaattcaaggactccattgaatccgaagcggatacgtttgcagataccggcatcaccttcaactaccgtgtcgacggtgacaccttggtgtacgagtacgtgctcgacgacagctacgcctcgctaggcgataccgtcgcttcctcactggatgctatggacagcacctatcaatccaccgcgaatctgctgggctcgatgtgcaagacctccagcggcaaggcatcattgcgcgtcatcatgcacacgcaaagcggccagtcgctgtacgacaaaacctggaccgaaaagtagcaatcccagcgaacgtgcgttttggtcgattgaaggccggtctgcttgctccttggacggatgcttctgcggaaggaaccgccaaggagtaggcttacaggcatgagactcgcacgtttttctttgaatgattcgccgcgctacgccttcgtgcagaaggacgaaacggacggcaaggactacctcatcgaacttgacggtcatccgctggccggcgaccaggtcaagcctaccggcaaccggtacccggtcgacggcgacggcatccgcctgctctccccggtcatcccctccaaggtttacggtctggccaagaactacgaggcccacgcccagttcatgcacgaggccggccactccgaaatcgcccacgcgccggaagacatggtgatcttcaccaagccgtccacctcggtaatcggccccgacgatccgatcgtgtacccggcctgctccaaggacatgaacttcgagccggaagtggccgtggtgatgggccgtatcgccaagaacgtgtccgttgaaaacgcgatggattacgtgctcggcttcacctgcgtgaacgacgtgacgttgcgcgacctgcagggcatcgaccccacgtggacgcgcgccaagggcttcgatacttcctgcccgcttggcccgtggattgtgatgcgtgacgacctcgactggaaggacgccaagatttccttcacgctgaacggcgaggatgtgccgatggcgtctggcaccaccgcgaacctgattcacggcatccccgagcagattgccgcgatttcgtcgttctccacgctgctgcctggtgacgtcatcatgaccggcaccccgaacgcctccggccacctcgacccaggcgacgagaccatcgtgcacgtcgagggcatcggcgatctgcgcaacgtaatcgttcgggcgtgattcgactgacgaacgcatggcccggtcattttcctatttgggggatgtccgggccttcgtgctttgtttcatatatttcatctatatatgcatctgtctaatgtacagatgattttttcgcgaaatctaagtgttgcaccaagctatatgttacacttatttcagttatgaaatgaggtatgtgcattatgactgcagtaatagaacgtgaacagcttacagaacgcgatttggatcaggcgaaggcgtgccgagagctggtgcaaaaaggctctgtactcgctgcaattttggatggcattattgacgataatgtactggtggttcgcaaggacgaagaattatcccctgctcaagctgctgagattcttggcgtgagtcggccctatgtgactcgtttgctgaagtcaggactgctcgaatctcatatggtgggcagtcatcatcggattacggtacttgctttgcggacgtacatggctaatcgtgatgcgggacgtaaggaatacgcccacgcaatcaattctcgggcaaaggatattgccgatgcggttgacgaagtcgctccggtgtctgagacaagtcgaaatcgtatgcgtgatttagttgcagagcatcgccgtgaagcgatcaaagcgagtagtgccgcagtttctcccgcagagtgaggattgtctcaggcgaatcgtagtgaatctattgtctgtgcgatttacccggtatgcgtcaagtcatgactattgctcaggcgtgtaattacgtctcagatactccttgacttccagtatgtcttggcaatcggggcatgcaggaagtcctgagtattcatctctggttggcacgaaccatttcccgcacagagaacggatgagggtgccttcaacatatgcgtcggtcagagtctctttgggtacgcgatgtagcatagattctggctcggtgtcgcctatcgtcttgtataacgattcggaatcatcgaggaagttcgggcttgtgatgcgcttgatgtcgtctggttccagcagcacgaatgctgacatagttgcgcgtctttgctgaccgtcgctgtatgtcttcaacgacgtttctgctggctgattggggtctttgggctggcagatggcgttaaagcatctcaagaggatgcggtgaagtcgggcgtatggagaactgttgtcctgttcctcgaccggaaaatcaagggtcaattcaacgaattgattgacagttgctgagtcgtcatcgtcatcttgctgaatctgaatactggcctttatgggggctcctgaaatctgataggggatatccagcgctgagagggcttcggactgggaagttgtttggcccgcataaattcctgcacgaattttgttaagcatctcctgaacgactcgtcgctcaaaatccagaaaatgctgacgttcttcttctcgtttccgaaccagataatcttcttcgctgggcatatagttgctggcgttggaagccttaatgattgatttgcaattgcctgaatggaaatccccatgcgatccgcaatagaccatccacgggtcgccatattggtcaagaatgacgatgcctcgccagccggtttgcttgttccttatttcatagactgggcgctttgccacagcgctaaattccgaatgcttggtggcagcgattttgtcaccagcgaaagcctgacgagccatattgagtagtgtgacgtcgaatgcggtgaaatcaagaccttcgaacggtgttactgcttccgtccgcatgttctgttcaatgagttgttgagggttctctgagttgaagagattattgtcaatcatgctcaacagaacttgaattgtagggcgaactggtctcatgatgattaaccatagtcggtgatgcagcttagtcagtgattgatatcacatagaagaagtattgctctttttggctcccctcgtgtctgggcccgtaattcccccttacgctcccggcagaagtgcgtgcagggcggtcatcaccaccaagctgatgatggccgtcactgtcagcgagaagccggcgagcttggcgttgccggttagcgaatcggtgaacttggttgagaagatcgtgataggggcgaacgagcccaacacgatgatctcgcgaatcctcatgtcgaatggcagtaggaaccaggcggccacggcgataatcgcgccgaataccatgcgccagacaatcaccttgcccaactccaccttgtccttgcgattgttcggaatctccatcatcagtccgatcatggccatcgcgcagaaggcgttcgcattggcgaacggggtgatgagcgtaacgatgggctgtgggatcgtgatgtgcaggaacatgaacaccagcatcagcatgtagatgtcgaaggaaatcgagcttaggaagtccctggcaatattgcgcagacgcaggatgagcggtagcgacttgaaattgtcatccatatgcagcagcgtgcgtgtgatggtcagtgacccggccgtggccacggtggcgttgccgatatcgagcatgatgatcggcagaccggcggacgggcccatgaacgtctgaaccacaggcaggcagaacgcgcccaggttcaggcccgaggcgttgagcatctggaaggcgcggtagttcttctcgtcgccgcgagaaccgaaatacacgatgaacagcggaatcgcgcaggcgaagaagccgaacaacacgatccacagcatgcgcatgtcgtgcttgttcgtggcgaacgacaggataatcgcacaaggaagcgtcagattgaataccagaccctgcacgattttgtaatcacgctcgccgaaaatgtggacatgtttgagtatgtagacaccgatgataacgagcagcagcgaaccggcctgaaaaatcatgttcttctcttatcccacaagcacccgccgcagcaccggcggcggtcaggcgcataacaaaccagccgtgagtataggagcgttcgcgcggcgctggcgcggggcggtgcatattgtggacagtcccgtaacgttgatatgccatgctggcgagatgaatatatccaataccaagtggagctcggcacgatagagaggtaggaaaacatggcagagcagacggtcaccgtaggcgttggggcattgagcatcgaggacgttatcgccgtagcgcgcggcggtgccaaagtggcgatttcggacgaatcgaagcatgagatggcgctaagtcgcgcggttatcgatcatttggccgacgacaccgtgccgcattacggtatctccaccggattcggcgcgctcgcctccacttccatccccaaggaacagcgcgcgcagctgcagaaaagtctgatccgctcgcatgccgccggtgccggaccggaagtggagcgtgaggtggtgcgcggcctgctggtgctgcgcctgagcaccctgtgcaccggacgcaccggtgtgcgcccggaaaccgcgcaggtctacgccgatatgctgaacgccggcatcaccccggtggtctacgaatacggttcgctcggatgctccggtgatttggcgccgctcgccgcctgcgctttggtggcgatgggcgaaggcgaggcccgcaacgctgacggccgcaagatcggcggcgacgaagcgctgcgtgcggccggcatcacgcccgtcgatttgaaagagaaggaaggcttggcgctggtcaacggcaccgacggcatgctcggcatgttgtgtatggccatcaccgatctgcgcctgctactcaagacggcggacatcgccgccgcgatgagcgtggaaggcatgctcggcaacgaccgcgtgttcgccgccgacttgcaggcgctgcgtccgcatcgcggccaaggcgattccgccgcgaacatcgtccgcatgctcaagggctctggtctgatcgaagccggccgcccgggctccaccgtgcgtgtgcaggacgcctactcgctgcgctgcaccccgcaggtgcacggcgccgcccgcgacaccgtggaatacgcggcctccgtggcgggcgtggaactcgcctccgccatcgacaacccgtgcgtcacgctggacggccgtgtggagtccaacggcaacttccatggcgcgccgctggcctatgtgctcgatttcctggcgattccgactgccgacgtagcctctatctccgagcgtcgtaccgaccgcttccttgacgtggcgcgcaaccgcggcctgccggcgttcctggctggtgacccgggcgtggactccggtttcatgatcgcccagtacaccgccgccggcatcgtctccgaaatgaagcgcaacgccgtgcccgcctcggtcgattcgattccgagctccgccatgcaggaagatcacgtgtcgatgggctgggccgccgcccgcaagctgcgccggtcgattccggcctttgcgcgcgtgctggccgtggaactgctgtgctcctgccgctccttcgacttccgcaagccgtaccgtccgggtgcggcgggcgccgccgtataccgcgtggtgcgccagtacgccaacgaaatcggccccgacgtacgcgatacctggaccaccccgcaaatcgaaggcgtagccaacgccatcctctccggcgaaatcctatccgccgccgaagctgccgtcggcctcctgaaatagatgtgagctccctcatcagagggggctactgttcaccctccccaccaaaatccaaaacttgagtcacctgcactcaagttttgggaatagaatgggttctaggtcggttgaccatatcagataacgacaagttgtggtctgcggtggcgcttgcggggctttcgaagcccgcgagccgctccgcgcgggccgcatgatatggaggaatacgatatggaacagaagttcaccactatggcccaggaggccgtcggcgacgcgattcagagtgcgtccgccgcaggaaacgcgcaggttgagaccctgcacgtcatggatgcgttgctgcgtcaggaaaacggcgtggtgcgctccctcatcgaggccgcgggcggagacccacaggccatcggcgccgccgtgcgtaacgctttggtcgcactgccgagcgcatccggctccagcacttcgcagccgcaagccagccgccagctgaccgccgccatcgcccaggctgagaaggaaatgcagcagatgggcgacgaatacgtctccaccgagcacctgcttatcggcatcgcggccagcaagccgaaccagtcggccgaaatcctggagaagaatggcgtcaccgcagcctccctgcgcaaggccgtacccggcgtgcgtggcggcgcgaaggtcaccagcccggacgcggaaggctcgtacaaggccctggagaagtactccaccgacctgacggccgccgccaaggaaggcaagctcgatccggtgatcggccgtgatcaggaaatccgccgcgtgattcagatcctctcccgtcgtaccaagaacaacccggtgctgatcggcgagcccggcgtcggcaagaccgccgtcgtggaaggcctggcccagcgtatcgtggcgggcgacgtgcccaccaccctgcaaggcaagaagctcatttcccttgacctaggctccatggtggccggctcgaagtaccgtggcgagttcgaggagcgcctgaagagcgtcctcaacgaaatcaagaacgcggacggccagatcatcaccttcatcgacgagattcacaccatcgtcggcgcgggtgcggccgaaggctcgatggacgccggcaatatgctgaagcctatgctggcccgtggcgagctgcgcctgatcggcgcgaccacgctggacgagtaccgcgagaacatcgaaaaggatccggcactggaacgccgtttccaacaggtgttcgtgggcgagccgagcgtggaagacaccatcgccatcctgcgtggcctgaagcagcgttacgaggcgcaccacaaggtgacaatcggcgatgacgcgctggttgccgccgcgaccctctcgaaccgttatattccgggccgtcagctgccggacaaggccatcgacctggtcgatgaggcggctgcccacctgcgtatggagctcgactcctcgcctgaggagatcgatgaactgcagcgcaaggtgacccgtcttgaaatggaggagatgcagctcaagaaggctgaggatcctgcatccaaggagcgtctgggcaagctgcaagccgaactcgcggacacccgtgagaagctcagcggcctcaaggcgcgttgggatgcggagcaggccggccacaacaaggtcggtgacctgcgtgccaagctcgatgacctgcgtgtgcaggcggacaagttcacccgtgagggaaatctggctgaggcctcgaagattctgtacggagagattccggctattcagaaggaactcgccgccgcggaaagcgcggatgccgaatctgccgatgccggcgcggccaacccggccgatgagccgatggtcccggaccgtgtggacgccgactcggtggccgagatcgtctccgactggaccggcattcccgttggccgcctgatgcagggcgagaacgagaagctgctgcatatggaggactacctgggcaagcgtgtgatcggccagaaggaagccatcgccgccgtgtccgacgcggtgcgccgttcgcgtgccggcatctccgacccgaaccgtccgaccggatcgttcctgttcctcggtcccaccggtgtgggcaagaccgaactggccaaggcgctcgccgacttcctgttcgacgacgagaaggccatggtccgcatcgacatgtccgaatacatggagaaggcttcagtctcgcgcctgatcggtgcggctccgggctacgtgggctacgagcagggcggccagctgaccgaggccgtgcgccgccgcccgtattccgtggtgctgttcgacgaggtcgagaaggccaatccggagatcttcgacgtgctgctgcaggtgctcgacgatggccgcctgaccgatggccagggcaggaccgtggacttcaagaacacgatcctgatcatgacctccaacctcggctcgcagttcctcgtgaacgaggacatggacgccgacgccaagaagaaggccgtgatggacgccgtccacatgaacttcaagccggagttcctgaaccgtctggatgacatcgtcatgttccacccgctcacgcgcgaggagcttggcggcatcgtggatatccaggtcaagggcgtggcccagcgcctgaccgaccgtcgcatcacgctggacgtcaccgattcggctcgcgaatggctggccaacaccggttacgacccggcttatggcgctcgtccgctgcgccgcctggtacagaccgaagtgggcgaccagctggcccgcatgctgctggccggcaaggtccacgatggcgacaccgggctcgtcgaccagaccggcggcgaacatctggagctctccgcctgggcgagcgaccaaatcgtctccgacgatccggatgtgagcgtggacaacgtcaccgaagataagtgacaatcactggctcccctctctgagtgaagctgactgaggggagttcgggccggcgagcttcactgtatcggctctcctctgaggagaagagccttttcgttaccatggtgctgagttttcgcagaaggagagacgctggtgaccggacgattggcgccgacgccgtcggggcgcatgcatatcggcaacgtgtacgccatgttgggtgcatggctttcggcccgttcgcgtggcgaacgcatgatgatgcgcatcgaagacgtggacgggccccgcgtggtcgccggcgccgaccggctcatgatggacgacctgcattggctcggcctcgactgggatggtgagccgatgttccagtcccagcgcaccgaacgatacgagtatgcgctggaatgcctgcgctcgcagggcgtgctgtatccctgcttctgttcgcgcgccgacattcgcgccgcctcggcccccaacgagggcgacggcttcatggtgtaccccggcacgtgccgccgcctgctgcacgaccatccc

SEQ ID NO: 1786 - DNA, 7950 bp, Unknown
  MAG_14  MAG No. k141_33140
ccagtccttgttgaacttggcgtagtcgtccttgtggctcggatcggccttctggtaggcggcggtgatggcgtccgcggtgttggagcgcaccttggcggagaaccagacgtgcgggttgtcgccttccttgatgccggcggtttcggcggcggtgaccagcgtggccttggtggactgcgcggccttggtggcccacgggtcgtagtcggctccgttgaccacggcaaccttggcggtgccaaacttggcgacatcctggctggtgggttcgtaatcatgtgcttcgacgttggtcttggtcatgatgttggtgacttcgacgttgctaccgccgaggtccttggccacggaaccccactggttgatggaggcgacgacctcgatcttgccggaagacgcggcgctgctggaatcggacttgctgccggcggcattgctggaaccgcaggcggccatcgagaacagggtcgccgcggcggccgcgatggcgagcgcgcgcttggcgttggacatgatggacatgattggattttcctctctaattcggctgtttggccgggcgatgctgctgtgctgcatcatcgcccggcccccaacacgacagaataacatgtattgagaattattatcatttgcatttacgtcggcgtgttgcacgcgcacacccgcgctgccggcggaaatcccgcgccccgacgatgacaacgcgggatcccgccgttttcggcagacgaaacggcagtatccccgcgtccgaacgatacccgcgcgggggttctgccatttaaggcctcggaaacgacagaaatcccgcgccaccttcgttcggacgcgggggttctgccgtttgccgcacatgtcacaacggcatcgcggcacagaccgacgcctgcaccaggtcgacgagccccacggtgtgggcatcctcacagaccagcgcatcacgcaaggcgattgcacggatgatgtcgcggcaggcgcactccccgtctgtatccaaatggcgtgccaggcaaccggcaccaatgaccggcaattcgagcacgcacgaggcctcacggatcaggcgggagaccactacgccggtcgaacgctcgtcatagacgccgttctcctcgcccatgccgtacaggcacaaacggtcgtcgtcaaagaatcgctcttcgaattcgtcaaggcctacggcattggccaccgcacccacgaacatcgactcaccccactcgttgagacggaaggaatcggccagatactgcgcgaccggcgtggcctcaaggcccacaggcagcgagaccagaaacgcgccggcccgcccttgcagcgatccgagcgtccgttcaaggtcatgtttgaccgtgcagctcatgcagcacccctcgagcccgaacgaatcggactcgccgaacaccaccccgcttgcctggggcttcgcgacgttgcgcacgatatcgagaccggattccacggcttcgttcgggcgcacggcataagcaatcgagcatacggacgggaaggaatcgaccaacgagaacgccacggagtccaggctcaggcggtcggcgccggtgagcagcaccacgggcgtgcgcccctccgcgtttccctgtgattgcaatgccggatgaatcatgacagcctttcttatttgataatggttatcattatgatatagttgcaggcatgtccaaaacatgtcaaattctgggaacacgcgccggggtcggcaaccgcgtctcccactcgcacaggaaaacacgccgaaccttcgccccgaacctgcagtccaagcggtactgggtgccgtccttgcagcggcacgtcacgcttaccgtgagcgccaagggcatcaagaccatcgaccgcatcggcatcgaggcggcgatcgcccgcatccgccgcgatcagaacgtcaactgaaccggccacggcatcacccccatgctcgggcagtcagtaggcccgccactgtgccggcgcgtaaccgcgcaacaaaccgcgctaacgagctgcatcacccacatggcaccgcgacgtacgcgacataacagcgtgacacccacacatagaaagcaccactcatggcaagcaaatcctccgcaatccgcccggtcatcaccctgaagtccacggccggcaccggattcacctacaccaccaccaagaatcgtcgtaatacgccggaccgtcttgagctcaccaagttcgatccggtagtccgcaaacgggtgctcttccgagagacccgctaatccatctgttcgttcattggacaccagtcgcgaggcgaggaagaggcttaagcacccgccgaaatcgtttccttgttggcattccggcggtttcctctatcaccatttcatgaactcatcttccgaaccttgcggcatgcgcccaatgaacgaatgcactcgtcccagctccggccggcgcgattcccgcgccccggagccttatcaaggagccggacatggccaaaaccagtaagatcaaccgacaattgcagcgcgaacgcatggtcgccaagtatgccgaacgccgcgccgaacacaagcgcgacagcgtcaaccctcatctgaccaccgaagaacgcgccgaggcgatgcgcaagctgcaggccctcccccgcgacgccagccccacccgtctgcgcaaccgcgattccatcgacggccgcccgcgcgcctacaaccgcaagttcggcctgtcacgtatcaatctgcgtgagaaggcacacaagggcaaactgcccggcgtggtgaaatccagctggtgatcgggccggcacaaccggccgtcaggccgtctcaggccatctcaattcaccggattccacccgtgcgtccgacgccattctcatccatatcaccacacaacaccacacaaccaaaggtccataaccatgcaagagggcatccaccccgaatacggccccgtggtcttctatgaccgctccgccgacaagtacttcctcaccaagtccacactggtggccaaggccgtaaacctgccgaccatcgactgggaggacggcaacacctacccgctcgtcaatgtggaggtgtccagctacagccacccgttctacaccggcaagaatgtggtgatcgacgccgccggtcaggtgcagaagttcaacgctcgttacgggcgcaagtgattcgccgcacattccgcaaagaccgtaagacaagaagaaaggaacggacatgaaggtcaaggcatcggtccgctcattggcccgcaaggatggctcctatgtcgtccgccggcgcggccatctgtatgtaatcaacaagaagaacccccactggaaggcgaggcaaggctgatggcactgcccaagtacaaggcgtcccgagcaaacacgcattcgcgccgagccaactggaaggccaaggtgcctcagctggccacggtcagaacgcctgaaggcgaagtggttcaggttccgcagaatctggccgcagccgtacgaaaggggtatatgaagccataaccaacatcgtggattccgcaatccatcaagtctcgtaacaacaactcgacggtccgctccacaggccggcggcgtacgttctttctcccatttccttccgtatgccgtcacctgccggggcgaaccgccgttttatgaggccaccgcatccgatctggccaagctcgccaaggcagacatcgtggtgctcaacggcgccggctacgacggctgggcggaaaaggcgcagcttgacaagaaacgccagaccatcgtgaacgtgagcggcctcatgggcgtcaccgccaccgacgagcacgagcattcccacgaccacgccgagggcgaagaaggccgccatcaccaccatggtgctacgaacccgcacctgtggttcagcccggaagccgtgctgaaggccgccgaagccatcaacgccgtctacgcggacaaggccggggccggttctgccaccgccgccaccgtgcaacgtcacttcaacgacaggaagaaaccctcaaggaaatggacaactggcccacgtattacccggcatccatgagcaaggaggaagtggccaccgagatgctggcccaccgattcgccatcggcccaggcaaccatgtgcaaagttccccgcatatcgatgtgtaccatcggcatgcggggaactcgcatattatctcgaccactatcatgcgtacggtgctaatatgacggcgatatggcaggtgatattcgcatgaaagaacctcgcacgcagcgcacggaacaggtgaacaccgcgcaacaggaccattcggcgaactatctgtttctgattatcggcacgccgctggtggcgttcctgattgcggcttccgcgatgctcgagtcgcgtgggtttccggttccgctggtgcgtatcggcaccggtgccgcggggcttatcctgcaggcgattccgttcatgctgctgggcgcgatgatgtcggccgtggtcagcacgttcgtcagcaccgattctctggcccgccacataccgaaatcgttggccggcggactggccgcggcattggcggccggcctgtgcctaccggtgtgcgattgcatggtggtgcccacgttcgcgaatctgatgcgcaaacgcctgccgctgccgtgtgcggtgacgtttctgtgcgcggtgccggtgatgaacccgatggcgatatggtccacatggttcgcattcaccgacaaaccatggatggtggcggcccgcatggggttgggcatggtagtggcgatagtcgcgggggtgtcgttcgcggtgtggccgctccgctcccctgcggtgcgtgagaggccgctgacgattgggcggtcgttgatttgcgaggattgtgcaggggcgacgggtgattcgcctgagagccactcccagtcggctttgccgacagcccccgccggcgggggcacggggcgtggattggagcggttcacgcatttcattcggcatacgcatgacgactttatgcggatgatgccgattctgctgttcggcacgatcatcgcctccatcatgcgcaccgcattgtcgtcgttgaccaacggttcaagcacgctcgatgacgctggtgccatcgtactgattctggcggcgatgggactggcgttcctgtgttcgctgtgctctacgtccgatgcggtgatcgccgccagcatgattggcgcgctgccggtctccgccatgcttgccttcctggtcttcggcccgatgctcgacctcaagaacacgctgatgctggccacggaatgccggccacggttcatcatccggttcatcgcgaccgtggcggcggcctgcttcctcgccgcgattgccgcccatctggtgatgggagcgtagccatgaagcgcaaagtcacactccccgaccgcgtggaggcgctgtgtttcgcggcgctgggcgcggccatcgcctatgcggcggtgggcggatcatacaccacgctgaccacgccgcgctcgctgccgtatctcatcatcggtgcggtactgctgttcgtgctggcgaccgcagcatggctcggactgttccacgccacggagcgttcggttttacggttcctgatcgccttgattattccggcgctgctgatcgtcgtgccgttccagcccagcagcggcagcggcggcttcgacgagtacgccggcggccgcgctatcgccattccccgcagctcgcacaagcctgatggcacctcgcagctgcacggactcgacacggcgaacaagaccctgaccatcagcgacgacgaattcggctcatggttcgagcagatcgaccataatccgcagcgttacgtcggttaccatgtgcaggtcaccgggtttgtgagcaagtcgcgtacgttcggcgcggacgagttcgagctgtcccgccagttcatgtcctgctgcattctcgacatgaccccattcgggttcatagccagctccggcaaggccggcaccccgcacaatcacgactgggtcaccgtcgacgccgtcatcaagcagggcgcctacggctccgccggccacgagcgccaaggcctgatactgcaggtccggtcggccagcaaagccgcagccgccccgaccggctacttctactggcagtaaatgacgcgtctcccgaaatggaaagcactgcgctgcgccatgactcgccccatatcggcagaaatcccgcgttacaacgaaaggtacgcgggggctctgcctttatagggctcaaaactggcagaaatcccgcgcaggcctcgttgaaacgcgggatttctgccagttgattcaaatcatgtgacaacatgccgggcatctgatttgctttaataacgataatgaatatcatttgttaacagaaaggggcagaacgtcatgagcatcgagcaaaccgcgaccactcggcgcgtgacgcgaccccgactcctcatcacccagctcctggcgaaactatcccgattcgccacggcccaggaaatcaccgacatcctgcgcgagcgcggcacgcgcatcggcacggccaccgcctaccgcaatgtgcagatgatggcctcccaaggcgagctcgacgtaatccacgtcaacggcgaggccctctaccgcgagtgctcggaccagcatcaccaccatcacatcgtatgccacgaatgcgggcggaccatcgaaatcgagattcccggacttgagcagtggatcgacaaagccaccaagcagttgaagtaccagaccatcgcccacgaactggagattttcgacctgtgccccaagtgtgcggcgaagcatgccatcgaaccgcctctcagcgtcggcacctcaccaaaggatggaccactgacgacgccagacgatactggccgtcggcgctcgaacaaataatggcgcagtcccgacgctactggccttcagcatcggtgcccttccaatccttggcgcaatagcgacgatataagctccactcgcatcgttagattgccaacgcctggcgcagcaccgacgccagacacgctcatcgtcgtcgttccaccaatatttggattggtaccgccaccacctataccaggcgtcgacactcggccaacaatcggcccgttaccgacacaaaactgcatgaggtctcattgctcttaatagcagcaatgggcctgataatcactttcaccaactttcgccgctgccgtctgccgccctacagtcgcagacgaacaaacgctgaaaggaacaacaatgactatcaagaccatcgatgagcatgcttacgagatcgttaccgaagagggcaccttcgccgtctgcaaggacacgctggccaagttcgacgccaccaagcacgagcacggcgtggccgcctgtggccgctgcggctgctgcttcaccggcgactgctgcgacgacaccggctgcgagcacaaccacaccgaagagtgcgggggcaaggcttgcctgcacgcttgccacgagaaccgcgaaggccacgagtgcgccttctgccaccttgccttcgacaccaacgagaagtgccacgatgagatcctggccgacctcaaggaactcaaggccgagctggctgtctgagttttaggtttccgatttctcctgcggattgactcctctcagggaggggagccagattccgacacgaaccaccgcgcttaccgtatgatgtctacgggcgcggtggttttgtttttctcgatgatggcgcagatttgctcgggcgcctccttgcagccgcgccggacccatagccagataatcgacgagacggcggagaccagaatttccagcgcataggcgcgcggaatgccgccgtagctcagctcggcacccacacgggccgcctgcccaagcagcatctgcttcaacacatccttgacccggtcatacatctgcatatcgttgcccgaacgggacagtgcgtcgaagaacgcatactcacgcttgacaaagcgcaacgcctcggc

SEQ ID NO: 1787 - DNA, 6664 bp, Unknown
  MAG_14  MAG No. k141_33217
tgcgcagatgctgatccgcaatggtgccaaacatgtggtgatgattggcggtccgcgagatcaattcttcgatttggctgcgcgcggagaagtcgaggaaggatcgttcgatttgggaaagaccacgttcccgacggtgcgctattacctcacgttggaacaggaattgacctccgcaggcgtgaaatacgagtatgttgaagctggcgaagtgatggattttgccggctatcatcgtgcggtcagcaatgcgctcgacaaggtggcgaccgacggcgtcgatgccgtggtcagttccgacattggtgcgtcgttctgcgtgcgcgaagcgttgagccgcggaattcccattcctgacgagctgcagatcgtcgcctacgatggtacgtatttgaccgatttggccggcatgaagctgaccgcggtcgcgcaggatttcttggcgatcgcacagtcggcggccgaccatatcgtgcaggctattgccaatgaggaagtggccgcggctaacgcttcacgcaggaacatccccaagccgttcgagccgaacgtgcttattcccatgacgctggtgccaggcgataccacacgttgatgctgcgcgttggaacgctgagtggggatcggacaggctgggttgtgtagaacaccgcatcaaaccggttcgacacgcgcattttgcggtattactagacatcaacgtccctttcgaggtaatatcaaaccggttcgatacgtataagtatgtaaaagcacgcatacactgcgtacacattgcacctgcatccatgaaccaagggaggtcccatgaaaaacaaagtgcagctcatcgcttacgccgatcgtctcggcgatggcactcttagctcgatgaccgacatcctgcgcacccgcttcgacggcgtgtatgacggcgtgcatatcctgccgttcttcactccattcgacggcgcggatgcaggcttcgaccccatcgaccacaccaaggtcgacccgcgcctcggcggctgggacgatgtcgccgaactttccaagacccacggcatcatggtcgatgccatcgtcaaccacatgagctgggaatccaagcagttccaagacgtgcttgaaaaaggtgaggaatccgagtattacccgatgtttctgaccatgagctccgtcttcccgaacggcgccaccgaagaggaactggccggcatctaccgcccgcgcccgggcctgccgttcacccactacaagttcgccggcaagacccgcctggtctgggtcagcttcactccgcagcaggttgatattgacaccgattccgacaagggctgggaatacctcatgtccatcttcgatcagatggccgcatcccacgtcagctacatccgtctcgacgccgtgggctacggcgccaaggaggccggcaccagctgcttcatgacccccaagacctttaagctcatctcacgcctacgcgaggaaggcgtcaagcgaggcctcgaaattctcattgaggtgcatagctactacaagaagcaggttgaaatcgcctccaaggtggaccgcgtctacgacttcgccctgcctccgctgctcctgcactcgctgttcaccggtcacgtggaacccgtggtccactggaccgaaatccgcccgaacaacgccgtcaccgtgctcgatacgcacgacggcatcggcgtgatcgacatcggctccgatcagctcgaccgcagcctcaagggcctcgtgcccgacgaggacgtcgataatctggtcaacaccatccacgccaacacccacggcgaatcccaggccgccaccggtgccgccgccagcaacctcgacctctatcaggtcaacagcacgtactactccgcgctcggctgcaacgaccagcactatctggccgcccgcgcggtccagttcttcctgcccggagtgccgcaggtctactacgtgggcgcgctcgccggccgcaacgacatggaactgctgcgcaagaccaacaacggccgtgacatcaatcgccattactactccaccgccgaaatcgacgaaaacctcgagcgcccggtggtgaaggccctgaacgccctggccaagttccgcaacgaactgcctgcattcaatggcgagttcagctacgaagccgacggcgacacatccatcaccttccgctggatcgctgccgacggcaagaccaaggccgccctcatcttcgagcccggccgcggactcggcacggataacaccactccggtcgccagcctcgcctggaccgatgccgccggtgaccacgagactgatgatctgctgagcaacccgccgattgccgatatcgactaaccgttggcccataaacgccactccgctgtgcgcgctccaagtagtgcgtccggcgtaagctgggtccatggaaaacaaaccgcccgcagtgcactgaagctagtgcgctcgggcggttttgcatgtggcggggttgcgggtcatgctcagtcggagctggccggtacctcccgccggtgatgagagcaaagaaagagcagcaacatgttggaaccgtacgtgcgcccgggtattgacgaccgcccggatctcgacaaggcattgagtcccgaagacaaggatgccgtggcccgactggccatcaaagatcgtcggcgtcctcccgaggcatccgccgatcagcccgaggcccaggccgtgcgtctggcggccgccggttcgtcggctgctgccgctgccgcggccagcgtggatgcccctgcgcctgatctgtcgtctgcatatctcgatatgcgcgatccgatggtcgccgccaatggtcagcgacccaccgctgttcagatttcccgtcttaattggggctttttcgtggcttcgattctggtcggcgcgccttgggcggcgttgaacaccatcgccatgcccaacgccgtggcgcgtttgttcgactacgacaccgcttctgccatatcggtcaccatcaatccgtccaccggccgtccgctgcccgtcgccactgacttggtggtgcctctggccgtgctggtggtcgttggcgtggtggcctccatgttcgcgatgcccttggtctccgcgctgtccgaccgcacacgtattcctctgggccgccgtaccccgtggatggtggcgggtggcgtgctgtgcgcgctgatcacgctggttctggggcggaacacaggcctcgtagggctgtgtttcttctgggcgctcatgcagtttgcctatgcgatgatttccgtgccgttggccagcgccatcagcgaacgggttccggacaaattccgtccgcgcattgagcgctggcacggtatcggcgtgatgcttggccaagcgcttggtgtatgcatgggtgcgctcggcgtgatgttcgactccttcacgccgtttgcctacaccgccgtgctgtttgcggtttccggcatcctgaccgtgatcatgctgcccaaggagccttccagccaggagcagccacatcaacgattcgagtcgagccaggtgtttgaccagctgcgtccgccggcacatgcgcctgcattcgcccgtgtgttcgccgctcgcgtgtgcatgatgacgggcgttggactgaccggggtctttctgtggtatctcgtgcgcttttgggtgtatggcaaggctgtggtgttcacttccgcgccattgaccattcccgcgggcctcctcatcgccggcatggccgcggcaacgctcatcggtgctgcgctcgcgtcctgggccgctgggccgatctccgagaagatcgaggaacggaacatcgccaccactgcagtggtggcggcatcctgcctgctgtatgccatcggcgtggcggtggcatgggggctcggcgtctggtccaccggcacggcacgcgaaaacggcatgctgctcttcgcgctgatctccggattcgccttcggcgtctacgatgcgttaggcctcgaactggtaatgaatgccctacccgacccgcgcaacgccggtcatgatctcggcatctatgcactgtccaattcggtcggactggcgctcgccgccatcatcggcgcgctactggtgaacgccttcgagcacagcttcggctattacctgctcttcccgtccgccatcgtcatggtgctgctggccggaatcgtcaccctcaccgccgagtccgcgcaatgacgggccggtccggctccccggccgccggcggcgttcctccccgcggcgggggcgttcgtctcggcgacgtggcgtccacaatgtgaacccttgctggattggcaagacagccaaacctatgtttacattccagttcaggtcgaacggcctgaggaaataccgaaaggaggccacgcgatgactggattcaatgcttctgcgtttgtatccgcacgaattattagcccgtcttcgctggcggactaattcggcactgatgcttgaagccccgtcaacgaaggcagggccaatcaagctgacacaatcggcacggccctgcatgatgcggggctttttttgttgcgctcacaaggcttacggcagaatcccgcagacggaaacggtagcggacagtacacggcaacaacacagcaacagaacaacaacctccctgtgagacgaaataatcgcccgccaatgagagtgaacgagagcaaaacaggagtaacaatgactgcagcagtcgaagagactggcttagggcaggcggcaggtaaagccgctaccttggtacgcgattcggtcaagaccgtgatcgccgcatcgatggtcggtaccgccatcgaattctatgacttctacgcctacggcaccgccgcggcaaactacttcccgcacatcttcttctccgcgaaggacaaccccaccgtcgcactgctgatgagcttgctgaccttcgccatcgccttcatcgcccgcccgctgggctcgctgatcttcggccacttcggtgaccgcatgggccgcaagaccacgctggtcgtcagcctgatgaccatgggtgtcggcaccttcctgattggctgcctgcccacctacgatcaggtcggcgttggcgcagtcgccatcctctgcctgctgcgcttcatccagggcatcggcctgggcggcgaatggtccggtgcggcactggtcgccaccgagaacgcgcctgaagacaagcgcgcactgtacggctccttcccggagctcggtgccccgatcggcttcttcctgtccaacggcacctacttcgtgctcgaatccttcaacaatcaggacgcgatgctggcttggggctggcgtgtgccgttcctgctgtccgccatcctggtgatcgtcggcctcgtggttcgcgttcacatggaggagaccccgatcttccgtatggctcaggagcagaagaaggtcgtcaagtccccgctgaccgaggtcttccgcaagtcttggcgtcaggtgctgcaggccaccttcctcgtggccgtgacctacacgctgttctacacgctcgccacctggtccctcgcttggggcaccaaggagcagggcgaaggcggcggcggccttggcttcaccaaccaggaatacctgctcatgctcatgatctccatctgcgtgttcgccctgttcatcgtgctgtcctgcctgtacgcggacaagatcggccgcaagcgcgtgctgaccttctcctcctgcgcactcgtcgtgttcgccgcgctcttcccgttcctgctggacggacaggtcgtcggccagcacaacttcttcgccaacatggtgttcctgtgcgttggcttcgccctgatgggcgtcgccttcggcccgatcggcgcgttcctgcctgaactgttcgaggcgaacgtgcgctactccgggtccggcatcggctacaacctggccgccatcgtcggtgcggcgttcgtgccgaccatcgccacttggctgagctcccattggggcgttcactccgtgggcctctacctcgccgtgatggccgtgtgctgcctggtgtcggtcctgacctgccgcgagacgaaggacgctgactttaccaagtgaaatcctccataactaaatatcgccaagttcacaacgtgaaaaatctcaattccacgaagtgaacccctgcgaggcttttccggtgcaacaggactaaacctgcatatcggaaaagcccacaaggaaagccaaaactaaaaacagtttctgcagaaccagcagagcacaataacaattaaagatttcacccccataaacaaataaataaaaggagcgccaaaaatggcagcaactatctggtacgagaaggacgccgatctgtccgtgttcgatggcaagaaggtcgccatcttgggctacggctctcagggtcacgctcacgcgctgaacctgcgtgactccggtgtcgacgtggtcgtcggcctgcgtccgacctccaagtctgtcgagttcgccaaggagcagggcctcgaggtcaagccggttggcgaggccgtcgctgaggctgacgttgtgatgatccttctgcctgaccagtaccaggccaaggtctacaaggaagaagttgagccgaacctgaagccgggcgctgccctggccttcgcccacggcttcaacatccactacggctacatcaagccgtccgaggatcacccggtgttcatggttgccccgaagggcccgggccaca

SEQ ID NO: 1788 - DNA, 8638 bp, Unknown
  MAG_14  MAG No. k141_33743
acccgttcgacctgcggctgacgggcgatggttgtgggcgcgtaatccggcagcggaaccttctgctgggcggcgtccacgccgggggcgaccaccgacagattcgcgccaagcgcgtcgagttgggcgaggagcgctgcctggttcgatgcggcgatgccggacaacgccacatatgcggccacgccaagcgcgatgcccagcgatgccagcaccgtgcgggacgcccgcccggcggccccaacccaagccgcatgcatcaaatccgcaattcgcgtgcgtattggtttactcataggagtacgttcactcatatctctcccccagtcagcctttggctgacagcccctcgtcagagggggcttgattcggcttgtcgagttcggtgactaggccgtcttggatgtgcagacgcctggggaaacgtgcggcgatggtctggtcgtgggtgaccatgaccaggcttgcgccggaatcggccgccgtgagcagcaggtcgacgatggtgtggccggtttcgcagtccagcgcgccggtcggctcgtcggcgaagatgatgtccggccgtttggccagggcgcgggcgatggccacacgctgctgttcgccgcccgacaactgggccggccggtgatgcaggcggttccccaatccgacctgttccaacgcctcggcggcccgttgccgacgttcgccgcgcggcagggttgtgtattgcaggcctgtcatcacgttctccaaggcggatacggtggcgatcagatggaactgctggaacacgaagccgatgcgcgcggcccgcaggacgctgcgctgccgctcacccatcgcattcacatccccgccgtcgtatcgcaatattcccgaggtcggcatgtccagcgtgcccagtaacgacagcagcgtgcttttgcccgagccggacggcccgacgatggccacgagctcgctgcgatcgatggccagtgacgtatcatgcaatatctccagcacgctcccgtccttgcctggaaacgccttcgtcacatgctccaacgtcagcaatgccccatgctctgggccagcgggggcaaactcgatgtcgttcatgagaccaccaccttgtctcccgccttgaggccgtcggacttggtgatttgcacttgcgcgtcggacaccagcccgattgacaccggcacacgcaccaacttgccgccgcgtaccgcttcgaccgcatacgcgctgccggcgctggcgatcagtgcggtcaccggcacgatcagcgcctccccggtcgaggcatcggcgttcgggatgatgacttgcacggccgtcggcccgaaagccgccacctgcgactggtccgggaagtcgatgcgcgccgatggctgtgtggcttgcccgttgtcgccggtcttctgcccgccctgatcgaccgaggcgagcgtcgtttcgacggtggtgttgtccggcagcacgacctgcgccttgtctccggctttgaacatcgccgcctgcgtggcggtcaacgtggcctgcgcatgcagggtgacgcccgtatagcttgccgggctgacctgtgattggccgagtttcgcgttcaccgccgtgatgcggattggtgcggccgcggccagggccaccgtattcgggtcgaatgtgccggtgaccgcgtcgccggtcaggccgagcgagcgctgccattgccggatcgcctcgcgggtcagccagttgaaatgcggtccgacctcgccgccgtagaatccgagttcctgcaggttctgctccagttgcgtgacgtccgggccgtcggagacgccatcgccgatcgtccgccagaacgggcggtcgccgtggaacagcggcacgggcgcgccgtccatctcgtacacctgttcgccggtgttgatctgtttgccggccaccggcagttgggtgattgtgccggaagcggccgcgaaatcggaggcgtcatcgtattgcagactcgcgccgagccgggtctcggcgttgagtacgcccttggtcacctcctgcgtgcgcagcgtggacacatccacctgctgcgatcggccagtctgcccggtcgcggtgacgtgcccggccaacgtccacggcctcaccgccacgcacaccgcggccagtccgatcacggcgatcgccgcgataatcatcgtcacgattctgcggtgtttcccgaatctgcgcgcttccgtccgtgtcatgattgctcctttgtccgttatcggatggccgtctcattgctggggcgcggcttcggtggacgcgctgccggaggtgaattcggagaggactttgttgtagtcatagccgaattcctcggtggtgccagcgaaggcataggagatgttcgcgccatcggtcgggcattccttgaggaatcggcgcagttcggattcgcttacggtgccgggaatcgtgattgaggtgggcgtatcggcgtccgggtccttgacccagtcgaagcccttcttacgcgcggcctgggcgtaggcgagcgccgcctgcttgtcttccccggaatactggtgttgcggccccatgtccggaatgggctgggtgaagtcggggttcttggcctcgcagtcggcgtattcccgctgtttggattcgtagggtgagccggcgagcgccttggcgtccttgaacaccacccaggtgctgtcgtcttccatcgacgtgtaggcagcgttcgggtagagttgcgggccgtcgtcggatgcgctgaggctgttgccttgggaggcgaccggcttgccgtcggtgccgatcatgcgcagtgcgaccgcgtttttggtcggggcttgtttgcccgagccggagccggacgacacgccagcagccgtacgcgcgtcgaatcctttgccggtcaggcaggcggcgaatcgcttcgccgtggcgtcggtggtggtcgtcgcatcggaccgatcgtcggcacctgagcctgttccgactgccgccagcggtgacgagcaggcgcccagcatcgaagccagcgagagtgcggacgtaagcattgcgattcgccgtaccaggcgcgtatgagtagtggacattaccgtctccattccgtgagtcgattgtgacgacttccatccaatcgccctcaccgtggagcgtcggtaagcggacggattactttcgccttaccgtagaatcgggaaaatgttgggtgatgccattggttcgggaaggctcggaaggggacatgatgcggattctgatcgtcgaggacgaccgcgaactggccgccgcgttggacgacgcgctgcgctacgaggggtacgcgaccagtctggcaaccaccggcgtcgaagcgttgaagatccttgccggcacgaacgtggacatcatgctgctcgaccgtgatctgccggtattgtccggtgacgcggtgatggccaccgtcgccgcgaaccgcattcccgtggccgtaatcatgctgacggccgccgccgaggtcagcgaccgcgtgagcgggctggacctaggggccgacgattacctgaccaaaccgttcgcctatcccgaactgctggcccgtatccgcgccctgcaacggcgcagcgggaccagcaacgcgaccgcagccgtgctcacgcgcggcgacatcaccctcgattccacacgccggctcgtgttccgcgaccacgggcgcacgctcgtcaaactcacacccaaggagtacggcatattgctggagctcatgcgtgcggaaggcggatacgtgaccgcgcacgaactctacgatgcggtttgggatgagccgaccgccgccgacccgaccgacgtgatcaaaaccaccatctattcgctacggcgcaaactcgccgatcgcgaggccatcgtctcgacacgcggggaaggataccggctgcaatgaaggcgacgaacacggcgaaagcatcaggtcgtatacaggcgcttgccggcaaactgcggcccaaatcattccgcgccaaactgacgttggccatcagtctcgtgttcctcatcgccatgggatcggcgaccctcgtgcagaccattgtggtcaacagcatgttcacgtacgccacgacggtcaccgccaaaaaccctgagatgcaggtcgaaagccagcacagcggttccggcaccggcaaacgcccggattccgacccgcgaatgttttcccggggaagcggcacaggtctgaacgatatcactggaacatccagcgtcggcggcgatatgggcgacggtgactatcaggtggaatggggcaaggacgggtcgtataccatcaacaccccgtatggcgtctccgtgtggaaccaggacaacatcgccaccggattgcgcatcagcgcggccatcatcttcgtgttcttcgggatcaccagcattctgatcatctggctggtcacctcgcgcatgtcccggcaactgacctccatcagcgcgcaggcggcggcattggacccggccaaacttgatacgcgcatcgacgtgaatgggccgccatctcgccgtaggccccagttccggcgtgcgggcagacgcgggaccgaggattgggatcatagcacggacagccgcacggacggtcgagctgccggccaatcctccgaagtcacgcagctcggtgacgccatcaacggcatgctcgaccggattcaggccgcatccgaagcggagcggcggttcgtgtccaatgcctcgcacgagctgcgcacgccgattgccgcggtggagaccaatctggacgcgccgttggcccaggggcggttccccgaagatgtgcgaccgtcggtacagcgcgcactggatgccaatcggcgcggcgcgcaactggtgcaggcgctgctgaccttgtcccgtatccaaagcgggatcatcggcggcaagcaggcgggcgatgtgacacagatgagtcccgcatcaacggcacgcacatccacagatttgtacggatgcgtcggcaactcccttgcggatatcgacgatgccgccaccaagcgtcgcatcaccataaccgtgaacaaggccggcggcgacgcggacatgtttctcatcgccgccgacccggcgttgctggaactggcggtcggcaacctgctgcgcaatgccgtcgtgcacaacacggatgatgggtcgatcgacgtaaccgtcgtatcggatgaggatggaagcggaccccgtctgaccgtcacgaacaccacggatgagatgctgccggacgatctgaacgagctgacccaaccgttccatcgcggcgagaactcgcgtatcagcgccgtgcccggcgtggggctcggcctgtccatcgccagtgcggcatgcgaggcgatgggagccaggctggaactcggccaaccggccgaaggcgagttccgggcgagcattcggttttgatggaacactcaggctccccttcaaagaggggagctctattgtttcgcacgcaaaaatcacagacagactattgccttgcgggaaatcatcgttagattggcgagaggaatattgtcaatgcatacgaaacggaaaacatcgtgaccgcaccgaacacgcccgccgaaacctctgaccagctcaacaagcccgccaaatccggcaaactggaggtctccgacctcatcaccatcggcgtgtttgcggccctgtacttcgtgatggtgtgcatcgccacactggtgagcaccctgttcaccagcggcttcggctccatcttcctgcccgccggacgctcgatccgcgcgcgagactcttccttctgctggtggcgaacctcatgctgttcttccatgtagggctcgccacgcaaatcgtcatggtcgtgctgttcctgttgcccctgctggcggccgcccgatggcgaaccgcgttgaacttcggcgtgacctatgccgtactcaccgcgctgggaatgctcgaccccgatgccctgggactgccgtggctgcatgtggtctccgcgctggccgtgggcgtcacgatgatgctgccctgtttcatcaccgactcgcatggctcaacggcgtggccgaccggtacgtggtattcgacggcggacatatcgtgcaggattacgaggccgatgaattcctgtccctctcccccggctgcgtgaccgccatgggattgcgggcgtttgacttggaaccgtatcggcaccggattgcggccctggcttcaagcccggccgccgaagacagcccgttccgctggctgctggccatcaaccctctgccttcgcgcaaggcgttcgccgagggcgggctgctcagccacctgcatttccagtacgccaacgatctgcacacgctcgtcgccacggatgaggccaccggcgccgagaccttgcgcaatccgcgttggtacgcacaccatgtgcgccaacgagggaaccaccgaggaccgttgcgccatcatccgtgcgttgcaccacttgcagtagatctggcaacatacggcggtatgacggctccccgctagtgaaacagcagcgcttcagtagccgtgcgagtgcagatactcgtcatcgaagccgaaataatggccgatctcgtgcaacacggttttgcggatctgttggcgcagctcggcccgtgttgagcatacgcgttcatgcggtcccttgaacagggtgatggcgtcccggcatcacgccgctgtagcccgtggttcgctttgtgatgggtatgccctcatacagtccgagcagctcaccgcacggattgctcattgtggccagttcgcgctcattgggctcgtccgcaacgacgatgccgacattctccagcacccgcgcaaaccgttcaggcaaatcatccaacacctgttcaatggcccgttcaaactcatcgtcaccgatgtgcatactcaatccttcacctgttgcttggctcccacgataacagacatattccgggttccggcttcttgcgggtgccataacgttgcacggaacgcttccaatcattcattaggtcgattcttcattcattaggtcatgaggctgtgattgtcaccattgggatgacgccattccagtggtgactgtcagagctcaccgacctaatgaatgaagaatcgacctaatgaatgcgtccggtcatatctcattgtgaaaatgacccggtattgcggtattccgcaattgcacttccaacgattctgaagtattcatccagattctgcgtggtagcgaacgttcttcttgtggcgggaaaagtcttatagcccgcgaaggagaggttgttccttttctcgatatctccttcccatcggtttcggtcatagtggtaccgtccgtcgtattccagaatcacatgatcattcggatacaccatgtccacaaccacctctttgttctgcaacgggaggtatatcggagcattcacctccaattcgggtaatccacgttttaccgattcaaggcgaaggatgctttcctgcggcgaatcggtgttctctctgcacaacgagagcgctttgcgaaataatctgatacctgggaatctacctatatcggcgaggaacaacgatatcttgtctttcgttgtctgtttcaaatgctcattacggcaggtggcccaatccaaggcaatgaccatactttccacatcgacgaactgtgcgatctgacacagcgcctgttccactgaaaccacggcgataagatcatcaatcatcgtctggtcaatgccatgaccccaataatggcattgcgtttcggtaagattcgacaatctttcagccccgtccaccgtaacgtgcagtttgttggggtcatagttgggcttgtaattcagcgtggccgtcatgccagcaagctgtagcctggtgccatggctgaagcaaagctcctgtgaagtgcgcatcgatctggcacggcattgttccagtgttttctgggcgaggtctcgcgcctcatcaagtgtgaagaacgtgttgtatgcataggactccatgccatccccccaatggttgtatccgtgaaccgcgttattcacggatacaactcacgatggcataaccaacttctgcgcgcaaccagctcggccgaatcggtggatatgtgtataacctgccagctcagctgttgcggttgatctcgatgtcggtgacggtgaggttggcctcgttgatcaggttgaagaggatgacctcggccagcggaccgggctgcatgaaggtgtgctgcttggcttcggagacgtaatcgtggctatcacggtagaaggcggtgtcgatgccgcccggatagacggcgaccaccttgacgctggtgcccttgtatgcggcctgcaggctcttggtgtagcccttctcgccccacttggtggcgcagtacacgctttcgttcgcgttgccgcgcgtggcggcggtgctcatgatctgggcgattttcacgtcgcgctcgccacaggccttgagggtttccaccgtccacagaatcatgcctttgagccccttgaggcatttgtcaatgtcagcggcttcataggcggtgggcaccttgaacgaaggctggccggcgttgttgatgagcaggtcgatgtggccgagcgcggcgatgctcgccacggattccttgacaaatgcttcgtcggtgatgtcgcctacgaaggcgcggtaggattcggctggccactgcgcgctcagctcggcc

SEQ ID NO: 1789 - DNA, 3801 bp, Unknown
  MAG_14  MAG No. k141_33803
ccgcggctcgggatgatcttcgcgccgaagacttccttatcggaggtgcggtcctgctggcggtcgaagtagacgcccggggaacgcacgagctgggagacgatgactcgctcggtaccgccgatgatgaaggtgccgtgcggggtctgcagcgggaagtcgcccatgaacacggtctgggacttgatctcgccggtgtcgccgttctcgaattcggcgttcacgtacagcggagcggagtaggtgtaatccttctccttgcactcctgcacggtgtggcgcggctcctcgaagtacgggtccgagaaggtcagggacatggtctgtgcaaagttctcgatcggggagatctcgttgaagacctcgtcgagaccggaggtgtgggccacggtgttggtgccgttagcctcatcctcttcgacacgcttcttccagcggtcggaaccgatcagccaatcgaagctgtcggtctgtacgcccagcaggtagggcacatcgatgggttccttgatggaaccgaagttcacgcgatccgacgccttgtgcagatcaatgtcatgctggtcggcgcgtgcgatgatggtggtggtgttcgtcgtagactcagtagccaatggacgttccttatcgctcgctaatatgtggtaattcccctgggagcgccggcatggccaccatatgcctatgcggacgcttcattgtcgacggcatgcccgcaatatgacacacctcatgcaaagtcaaaagaatactgatatgcgaggacatttttagctcccgctgacgagggagctgtcgagcggagcgagactgagggagagacccagcgtccaaacaccaaccgcaggtcctaccccaccgtaaacgtcaccggatcgctcttcaccttcggatgatccttcaaactcagctgcgccacgtacgttcccgcattgaccttggcccaatccgactcatccgtgcattcggtgagcgtggcgttcgcatcggtattccacgtgaccttctgaacgtccttatcacccttggacatcagcagcagacgtgaatccgccggacacacatcggacttgtaaatcgtttcctgaccggaagtaatggtgagcacacggccggaatcggccccgtccaccaaacagttgcctgacccctcgtgcacgatggtcgcggtgaaatcaagcgatcctcctaccggcacggattgggaggccgcggaaagctgcaatgtcacatcactggccgagcaatccttgacgttgctgactttcttcggagccggcgtggcgtcgcgggaaatcgcatacacctcgtcatggtgaatcatcgtgttcacggcaccgataccccggccaaggctgtacacgcagaatacaatcagcgcgattatcagcagcaacaccgtgccggccacgatacgccgacgacgatagatggcctgctgctttttgctgatcctgcgcttgcgcggcttgccggaacggtcgtttcgggcgggcccgccggatggcccattggccccggtgccggctccgcgtgccgttctcgcgcctgatgtgttcctctgcactgccataacccttccagtctacggtcaccacacccatacacgcttggggagcccgccattttcacaatgtcagctgggtaatcgcaggccgccgtccagaatctcgatcaggccgtcatcgtcaaggctggcgatgcaggcggcaagctgaatctggtccttccaaagcttgtcggcatcttccctgggcaacgtgactccagcgggaagctcgcgcagcgcggcgagcaccagaccgcgcacctgacgatcagtgccttggaatcgctgccgcgggcgggtgcgccgctcccccagtccggggcggccggctttgagaaatgcacaatcatccgcaatcgggcaggtgtcgcataacggcgatttggccgtgcagatcaccgcccccagttccattaccgactggttccatgtgaccgatgggcgttcgccacgatgcagtcgggagcgtttgccgccacggatagtgctgttcacggtatgttcggcgctaccggcattatcggcgacgtcagcatcgcgcccgagaatctcgtctttgggcagcatgcggttcgccagcgcgcgttcggccgggctggccgctcccccgcgcgattcgacgccaaggaacacacggctcagcacgcggcggatgttggtatcgatcacggcgattcgttcgccgaacgcaaagctcagcaccgcggaggcggtgtaatcgccgatgccgggcaatgcagtgagttcgtcatacgtacgcggcagtttgtcggcgtactgctcggccaccacgcgggcacattcctgcaagcgcaatgcacggcgaggatagccaagccggccccatgcggtgatcacatcggctttaggtgctgcggcaagagcacgggcgtcaggccagcgtgccatccaatcgttccaatacggcaccacacgactcatctgcgtctgctggctcatcacctcactgaccagcacgccccacggcgtggcccgtccgaagcgccatggcaagtcacgcgcattggcctcccaccatgctcccaatcgcaaagaaattgctgtgtcgttcatcgttcttattcttagcagctatgacgaacgaggcaaaacacaacccccagagcacaccgaatccagccaatcccgaaaccaaagtcgagaaaatgttcgaatacggctatcgcaagtcgaattacgggccggacgagctggtgaccgacgcacacggcaaccccatctccgtggtggacgcgatgctttccgccgagaaggccgccgccaccgaaaccgtgacgccgcacctgtgctattactcgccgcgtattcccggcaacaccggttcggccatccgcctgtgcgcagtgaccggcacgattctgcatctggtggagccgctgggcttcaacctgcgcgacaccaagctgcgccgtgcgggcctcgactaccatgacatggcccacgtggtgttgcacccgaatttcgacaacctggtggagtcgatgcccaattcgcgcatcatcgcgttcaccgcgcacgccaccaagctctacaccgaggtggaatacaagccgactgacatcctgctgttcggccccgagcccggcgacatccccgacccgatggacatcatggagggccctcatgtggccgaacaagtgcggctgcccatgcgcccgtccctgcgttccctaaacctcaccaactgcgcatccatcgccatctacgaagcctggcgccagctcaattttgcgggcggagcgtgaggagaaggcccggtgggccttcgagtagcgacgccgaacgaacgccgacaggcgcgagagcggaaacactgagcttcgcgcagtgatgaacgctgaatataaggctacctgcgtttcgaggggcggatttggcatccgccggaggtctactgccgcttcaaggggctgtcaaaggacgagaccccgagtatggccgttgaaatatcaatgcttgtactcggggtcttcatatataccagcccctcgaaacggaagtagacctccagaaaggtcggaatcagcccctcgaaacgggaatagacctccagaaaggtaattcgagctggtatctgccttcaaagaggtacattcgagcgtttgcagaatgctatctgccttcaaagaggtaccgcaatcgagaaaccccgggtatgagtgttgatattccaacgctcatacccggggtttccgcatataggtacctctttgaaagcagatagctctccg

SEQ ID NO: 1790 - DNA, 9541 bp, Unknown
  MAG_14  MAG No. k141_33832
caaggcccagtacgaggagctgaaggctgccggcgaggccaagaagaccgaaatcgccgaggcacgcaaggccgctcaggccaaggccgttgccgagcgcaccgccatcgtcgagaaggctgaagcactggcggcctccctgggcgacaacaccaactggcgctccaccgccgacaagttccgcaacctgttcgacgagtggcagaaccaccagcgcaccaccgtgcgcatcgacaagccggaggccgaggcgctgtggaagcgcttctccgccgcccgcaccaccttcaaccaggctcgccgcaagtgggctcaggctcgcgacaacgagcgtacagccgccaaggaagccaaggaagcgattatcgccgaggccaatgagctcaaggattccaccgcttggggtgaaacttcccgcaagttcaacgatctgatggaccgttggaagaaggccggccgcgctggccgtaacgaggacgacgagctgtgggccaagttccgcgaagccgccgacaccttcttcaacgctcgtcaggctgatcgcgatcagatcaactcctccgagaaggagaatctggctgccaaggaggctctgctggtcaaggccgaggctctggtgccggtgaagaccgacgccgaggccaagaaggcccgccaggagctggccaagattcaggaagagtgggatcagatcggttacgtgccgcgtgacgatatgcgccgcatcgagaaccgtctcgacgccgttgacaagcagatcaaggccatcgaggatgccgcttggaagcagaccgacccggaggccgacgcccgcaagtccagcttcgaggagcagctcaacgcccagctcgccgagctcgacgccaagatcgcggccgaatccgacccgaagaagaaggccaagctcgaagccgagaaggccaccaaggagcagtggctgaacgccatcaagtaagggtctcgtgccaggttcccctctgagggaagccggcagcaaggctgactgaggggagtttacggttataccgcaagctcccctcagtcgcctacggcgacagctcccctcagcgaggggagcttcgtcatatttatgccgttttcttctgccctatactcataactccaccccatagttcctcagtcacccagcaattggtgtcttacgcctgagtccctaccggtgctgcaataattgccgtgagcccttgatgtgcggccagatattcatgcaacggctggctgtatggcatattcagctcgccgtaattggttccggcacggaaggcggggtaactgtcgccgccctgaagcagatatgaattggatgcgataatcaccaggtcatcgtccgcaatcggtcgaccgtcaacggcgaggttcacgatacgaaccgccgcatgttcgtcggcagcacactcgtcagcgtcagcgttggtatcagcggcggcatcggcattgccgctcccaccggtcgtaccgcattcggcataccgatacgtcacgttcgaggagatgccgagccagcgtcgctccagtcgcccatcgtcacggtggaattgctcggcgagcactctcttcacatcgcgcccggtgagcgtctcatgcgcggccttgaactgcaaggccatgagactatccacctcgcgcacggtgactttgccatcgccattcatatcaagccgtggagtccgcagactgccattattcgaaaatccgattaccggcaaacgatttccggcatacacatgcttcatgattgactcgcggttcgcgtccgccaccagcacaccgaccgtattcccgtgcttatccgaaccttgtttgtcgaaattcacgccggaggccaaggtgccaatcaccgcgttgccggcatgattcgaatatgttgccgccgcctggtaaatatgctgagcgcgcgatacctcatcgttcgcctcagcaccggcagacatccaagcggcttgcgccggatgcgcattaagcccttccacgcccagcacgccgtcagccgccgtatggctggtgccattgccgaggtccacatcggccactcgcaccgtggcgcgacgcccggcaccggtgatgatcaaatcctgcacggccatattccgcccgaagctgcccgcctcgtaaataggcgcaccaccagcggtcgtaccacgcttgatcgcgtgattgtggccggtgtataccacatcaacatctcgcccaatatcggcggcggctgaggcatcggcgtgcagcaaggccaccaccgcatccacctttccggagcgcttgagttcacgggccacgcgattgatcgcgtccaccgcccgttcgtcaagatcggcatcacgcgtaatctgcggagtggctaccgagccgagcgcatcagtaagggcgcccacgaaaccgatccgcttgccgttcaccgttcgaatcgtagagtcacgtacatggctcagcagtccgtcaggcgacttactggcggcagacgtgttggcgcacagccagtcgatgccattgctgggatcagcgatgcgattgttgaaatcggcgacaccgcggtcgaactcatggttgcctaccgccgaaatcgtcaatccccacgctttggccatgtccagcgtgggttggtccttctccaccgccgactcatacggggaacctcccaccaaatcgccggtcgataccgggatcatattgccgggattatggctgtcggccacggtgaaggcggtggcgttgtccgcaccacgttcgatatgcccgtgaaaatcagtgatgtcggcgatggtcaccgtacgggtgccggaagatggattatcgccggaaaaaggaacggctcccgtggttcccgcacaagcataaggaaccaccagagccgtaaggataagcgctactgcaccaaaagcgatccccgatcgcttgccggcccaccgccggttcttcatattcctgctcacaccagtcacgttaggatcgtcgattgaacggccatgcctaggaaggcgactctcaggtgaattcttagcggcgtcttgggatgggaaaggcctgaccccgtactatcagggtcaggcctttgcaacccgtgtcactacgaatgcgtcggcaaggggagattactcggcaaattcctcgacgcagatctcagctaccgcatccacgcacgcctcggcaatcaggcggccgcgttcggcgcttgagccggccggattggcgagtccgccgtgagcgggaacgtcaccttgacgcaccgggtagcgtacataggatttcgccgtggcaccggcttcctcgaccatacggtccatgtgcaccagttccggcgcgtagtggagcatcaacgaagtttcggtgacggccgcatgctccaatgcccagccggggaacaccaatccatcgaacaccttgtcgataaccgactgcggaaccgggtcccaccaattggtttccacgatggtggccactcccccggtttcgcgggtgaccaggtcgatggcctcgacgatgaacgcctcgttttcaaaatgcgcgttcatgacgacgatcttggtgaagccatcggcgatgagttcgctcagcacgtcgtgcatttgggtgatcactgtcacgccgttcatgtcgatagtacccgggaacagcggcccgccaccggagagcggcttggacttgtatccgtagctcagggtgggcagcacggtgccgtcgatgcgttccgccagatcttcggcgacccgcgtggcgagtaccgcgtcggtaccgatgggcagatgctggccgtgctgttcggtcgaaccgatcggcacgatgacgggatgagtcttcacctccttgaattccggccaggtcatgtggtccatacggcggttgctacccattgcagtactcctttgggttggtggtggattggatggtcaatgaatgcgcccggctccctcgggaaaggagccggagctgaggagatcagatgtgattcagatccttgtcggtgttttcatgggaaagaatcatcgcgaccaaggcgatggccgcaacacccaccatgtaccaggccggggcgatggatgaaccggttagggcaatcaggccagtggcgatgaacgaggccgtaccaccgaagatggcattggccagattgaagctgaacgcgaatccggtgaagcgcacggaggtggggaacgtctcggtcaggtagctggacagggtaccgtcgttggcggtcagggtggcgcacattgccagctcaaccagcagcacgggccagaactgggaggtgttgaggatgaggaaggcaggaacggtgaggacgatgaacgccacgcaagcaccgatgagcaccttcttgcggccgaatttgtcggagatgtggcccatgccgaacaccatgaacacgtaggcgaccaagcagatggtggtgatggtgccggactgggtggcgtccatgccgacggtgtcagacagataggtcggcaggtaggtgagcacggtgtagaagccgaccgcattcagcacgcaggctccgaagctgatgatcagggccttgagatggttgtggaagagttcggcgagcggggcgaacatgccgctcttggaaacgacttggccgtcagcggaggcggcgctcttggactcaagagcatcgttcattgactggtacacgggggaatcggagagcttggtacggatgtacagcacaatcaggccgagcgggccggccagcaggaacggcacacgccatccccaaccgaccatcgcgctggagttcatgttggcggtcatcagcgtggccagcgtggagccagcgagcagaccgatggcggtggacgccggaatcagcgagcagtagatgccacgctttgaggtgggtgcatattcgccgaggaatgtggccgcaccggcatattcaccggaagcggagaagccttgcaccatgcgcagcagcagaagcagaatcggcgcgccaacgccgatcaccgagtaagacggcaggcagccaatcaggaagctcgcaccggacatgaacataatcgagtgggccaatgcggctttacggcctttcttatctccgtagctaccccagaacagtgcgccgattggacgcaggatgaaggatagcgcgaacacgccgaaggtctgcagcatggcgacggtgtgattgtcggttgggaagaacaccagggcgatggtggtggcgaagtacgaataggaggcgtagtcgaaccactcgatgaagttgccaaggaaggaagataccgcgactttcctgaccatggcctgttcttcagtttgaggggtgaaattcatcagtcgtgcagatgtagtaatcgttgcggaactcatgatgtcaccgtcctttcaaggatgtgctgttcgtgtgactgaatgggattcaagtgggaattcgtttcgcagcaggtcgaccagcgccgcgatagcctcgactatgcccttgagtatttgctgaaacgtgaatcgtcgattaacccgttcggcgtagaagtggacaggttgcccagtggtgctggcgcattattcaccatgctgttcttgccatgatttcgtgagtttggcggcgaatagcagcatcgaccagttcggtttgtcgttatagtcgacgccgaccatttgtgtcactttgtccagtcggttgtacagggtttgccgtctgatacccaattgctcgcacgcgccggttttgctatcgaggttgtcgaagcagacgcacagtgtgtccagcaacaacggagaggcggcgacctcgaatccgatggtctgcaccacgagcatgcgcatcgccttgtccatatcagaggatgcgacgaaacggtcgacgagtgcggacatggtacttacgattcgcccgtatgccggttcctgattggcgatgtcacgcaataccgcgaacccgtcgaccagcgtcaccgtgtccaatgccactcggccatgcaccacgtacacaccgtcgccttccagtacggcaagcgcatccatgcaatggcgtccgaatgcggccgcaccgtctgaggaatcggtggtggagcaccatccgaccatcaagtcaccttccagcatgcaggagacggcgcatcccgaccgttcttcgaaccgttcgaccatcgtcgatacatggttgatgccttccaccaccgatctgaaccgaaaagcgaatggcatatagatgcatgatccggcaaaacccagcgcgtcgagcatcgcatgcgcttcctgcgcctcaaatgtattgacgtgcacgccgtcggccgggcccatactcagatgatgcatcatgcccatgcgcgcgccgccgtcaatatagagggcggccaccggagacacgatggtggcgatggcccgacgcatcgtggcgtcgaaagtcatggtgcgttgcgtgatctccaatgctcccaccggccgggagcgactttcaagggcgatgacggcgctcgattcgttgccggcatcgaacgcacgacccgctcgagcggccaacagaccgtcaccatcgaaaatggcgacgctttcgccgaacagcgacgcaatggtttcggccacagcctcgatattgccggtacgggacaatccctcacgtaatgaagtggacattgtgtccacctccaattgcaagtgcatctgttcgtgcacgatagcggtattgacactctgacagatgtcgacaaaaggtacgcgagatttcagaccaatcaacgtcaacccatgcagcctggccgcagacaccagttcgtccggcatccgcaccacaccctccaccagttcgaccaccagagcggcgacaccagcctgtgccaggcttgctacatattgtcctaacgtgccgtgccaatcggcggcgagcagagcgttaccctcgataatcagcatctcaccgcccgaaaggaaactggagacatcctctcgctcgttggtaaacacccatcgcactggcgtatcgaggtctttgccttcgacctccaccacaggatcggctcgtttgaactgcgtgttatgaagcgcactgcgaatcgatacagtcatacaatctgtccattcccccgcggaacaccggtcgttccggttaacctcaccgcaaagcgtgctgttgacaataacctcagttggttacgcgggcagtcggttcacgtaaccgttcggcaacacaccagttgaaggagcgacgatggctaccacactgttcaccaacgcacatatcgccaccggagaacccggcagcacggctgcaagcaccctgccattgcaggacattctcgtcacggatggcgtgttcaccgcattcggccccggactcgcgcaacaatatgaggctcagggtggtgatctggcggccattgaggtggtcgatctgggcggcaaacttgtctgcccaccgttctgcgatacgcatctgcaccttgattacgtattcacggcccgcaagcccggtgcggtgaatgaaagcggaaccttgtttgagggcatccagcgatggagtgagaccaagtccgacttgacggtcgacgagatcaagcagcgcgcgaaaatcggcattaagaaagaaatgctgcatggcgtgcagctcattcgctcccatgccgatgtgaccgacccgaacctgacctcattaaaggcgctgctggagcttaaggaggaattgaaggatacggtcactctccagatcgtcagcttcccgcaggagggcatgtactcctacgagggcccgcatggcgaatcgggggccgagctggtggaggaaggactcaagatgggtgccgactgcgtgggcggcatcccccatttcgaacagtgccgtgagtttggcgagcattccatgcacacggtagttgagttggcttcgaaatacgacaagctcatcgacgtgcattgcgatgagacggatgatccgaattcccgttacgtggagctgctttcggcgttggcatataaggctggcattggcccgaaggtcaccgccagccacacctgttcgctgggatcggcggacaacgcctacttcttccacctgaccaagctgcttaaggcggcgcatatcaacttcgcctgcgcccccaccgagaacctgtatttgcagggccgtcaggataccttccccaagcgccgtggcatcacgcgagtcaaggagctcactgaggcgggtgtcaatgtgtcattgggccaggattcaatgcaggacccgtggtacccgctgggcaatggcaatatgatgctcattcttgattatgtgctgcatttggcacagatgatgagctttgaagaaatcgacgatgcgttgaagttcctgaccgtcaacggtgccactacgttgggcctgcgcgatatgtacggcttggaaacgggcaagccagcaaacttcattgtgctggacgccgatagtgtgttcaacgccgtgtatgagcgctgctcggtattgcgttcggtgcgcgccggccgcacgctgtttacccgcgaggagaccatcgacaccggactcgccctgctgcaataacccgacaacaaacagtagttccccttgacaggggagctatcgccagaggcaactgaggggtagaccaaaaacgtgcacattatgtgtgcgtaggtctacccctcagtcagcttcgctgacagctcccctgtcaaggggagctttgctggtatgcgctagctacgctatcgaaacggactacttctgcggagcgtcaccggaatcggcgggagcggattcggctggttcagtggccggagtggcgtcggctggagtctcgccatcagtggaggcaccggcttcggacgaagtttcggcatcggtggcggcaccgtcttcggcgggcttatcggcggcggccggctcctcgaacttctcccccttgaaggtgaattcgccgaggataccctcgccttccgcatccacaatcacgcgctgaccgtcttcgagatcgcccatcagaatcttctcggagatggcgtcctcgatgtcgcgctgaatcacgcggcgcagcggacgggcacctagcagcgggtcgaagcccttctgcgcgagcaggtccttggcggcgtcggtgagttcgagcgacatgtgacggtcgaacaggcggtcgttgagctgcttgacgtccagatccacgatctggcgcacctgcggctcggtgagctgcttgaagacgatgatgtcgtccagacggttcaggaactccgggcggaactgctgcttcaattcggagctgacctggtccttcatgcgctggtagctggactcgttgttggcacccaggttgaagcccgtgttggcggccttggcgatgtcgcgcgtaccgaggttggtggtcaggatgatgatggtgttcttgaagtccaccttacggacctgaccatcggtcaagtggccatcatccagcacctgcagcaaggtgttgaagatatccgggtgagccttctcgatctcatcgaacagcaccacggagaacggcttgcggcgcaccttctcggtgagctcgccgccctcctcataaccgacgtatcccggaggcgcaccaaagagacgcgatgccgcgtacttctcgga

SEQ ID NO: 1791 - DNA, 2688 bp, Unknown
  MAG_14  MAG No. k141_34186
aaagcagtattccgtggctcccctcaaagaggggagccactttcgtctcacgtgaaatagagagtctccacatacataagttggaaaagtgtataaaactccccattttgaggttggaaaacgtagccaaaaccgcatcttatggttggaaaacgtgactggaaccgtatttctgtggttgtaaaaatgtagccgtacgttcaacaacgagtggcaggcccacatgcgggccgcacacttagtcaacaagtacatgtcggtcagatggttcggactggtcagagggcccgctctgatcagttaggtcggtctgaacggactggctgggctggtcggcctgagtagcccgtttggaccgatccggttcgcccttgctggccttcacactgcttcagctccagctgaagttcgctgatgcgccgttcgagttcatcgatgcgccgcacttgtggcgaagtgagactaaggggagccgagagatggctcacaggccgagggcaccggccacggccatggcctcgtgttcgggatcggcctggccgatgtgtacgttgacgtgaatttcgtcatcgcccggctcttcgagaatgtcggactgggattgcagcatgctcggcttcatgaagtggccttggcggtgggaaaggcgttccatcacctcgtcgaatgtgccctgcatgtagacgaacaccacgccttgacggcgcagcttgtcgcggtagatcttcttcaacgccgagcaggtgaccacggcgggctcgccggcggccacgcgctcgtcgatccacgcggcgatggtgtcgagccaaggccagcggtcttcgtcggtgagcgggtgtccggcggccatcgagatggtggcgcattcggaccatgcgaacgaatccgatcaggccatcagccacatcaccggcactgaagcctgacccgtcatcgtcacagcaccacgcggcggttgaggtcgcggcgcagcgtcttccagccgggtaggtaggcggtcatgcggcgttggaatccggcgccatggccgctttcccacagatgcgtcatctcatggaccaagacgtattccaggaattgcggttccatcactcccaattgaaggttcagacggatgcggccggttcgcggcgtacacgatccccagcgcgaggccatgacccgtagcgtgatatgcgtgggctgccggccgatgaccggcccccacttggccagcagctgtggcaacgcggcgttgatcgcggccgccgcttgtcgtttgcgttcgtcggtccagatttgggagcggtcaaaatacggctggacgttcgtaccggcttggcccggcccggcgtcgccgattctcggacgactgatatcaccggttttcggacgaccggcaacgcctccatcatggccgctggcaccagctacgccacgacctccgttctcgaagcctgcaccctcgttcaatgccatgatggagcgccgttgcgcctcagccatgcgctgctgctgggcgagaatccacgaatgtcgctctttgacgaaatccgcgatacgactctcgctcatccgcatcggtgcggagatttcgacgcggccgctcggcggtttgatgcgcaaatacaggtttttgatgggtttgcgcgtcaggtgcagatggatgccgtcaatgtccaacgactgcccggcggcagcggaccgaacggatttcggcgcaccggacttcggagcggtggattgacgacggcgataaggcatgcaagtcattcttacacaacggcggacaacaagcggcacacaatgccgcccctcacgaatcggcaaccggcgctgctacattcaatccgcataccaactgcccacaccggagaaggtcgcgcaggagaaggcctcgctgctcgagatcgacgacagcttccagaagatcgtcctcgtacgcgacgtggtcaaacccgtccgcgacgaacacggcatcctcacgatgagcgtctacgatttcctcctcgacccggacagcctgacgatgtgacgccggacggccggcaaatgccccggaacgcagccccccactcctcgaacaccgccttcgcggtggccgaggacaccatgacgagacagccgagcatgatggcacccagcagagggtgccgaagttcgcgatgacgtactgccacaggtccgacccgtccgtgtagccgtcgaagcgcagcgccgcgacggggacgagaaatccgtcaagcgcatgcgcggcgtcagatacaccgtcctgaagaaccccggcaagctgaccgacagacggtccgaggcgtccgggaacctgcggtacacggaccccaagggccggccctaccgttcatgacggctcagggaacccctccggacgatgcccaaacgaccggccgaccaggccgggaccgaactggaccgccgggtgttccgggcgtcccacagccgcatccccgagatcgtcgaactcgcccgaaagatccgccgtcatgggcccgacatcctcgggacaatcgaattgggctgttcaaacgccaggctcgaggcgtccgacaacaggatcaaggtcaccatccgcatggcctacggcttccaccacgcgaacaatcccatcgccctcgtcatgctccgccgcggcggactcgacatacgcccaccacaaccaagaacccaacccacgaaaacagcagaagcctc

SEQ ID NO: 1792 - DNA, 5697 bp, Unknown
  MAG_14  MAG No. k141_35207
acgttcgtcctcgacggcgtgggcagtgactaattcagcgcgcagcactggcggcgagactactcctacctgccgcaaaaacagaacctgaccggcaaggacgtggccgaggcgatccgcctgccctggacgctcgcgattcgcggcaagggcggcaaggccgagcagatgctgcccgacgagcgcatccgcacgacgttggacgcgatgggctgcgaggacatcgacctggcgcgcgcgccacatgacctgtcgggcggtcaggcggcacgcgtggcgttggcccgcacgctgcttaccgacccgaaggtgctgctggccgatgaggtggacgccggactcgacgacgacaacgcgtccaaagtggccgcgatcatggcggacgcggccgcacacggcatggcgatcatccgcatccgacaccgtccgccggacggacgcgccacccgcacgctgatgctcgatgcgggacggctcaccgatctgacgcgggacaaggaggtgcgcccatgaacggcgcctacgacatcgacacctggggtcttgttctggcgttgggcatggtggccgtggcggccatcgtcagcgaactcatgcacatgggcatcggcaggaccctgatgtggtcggcatgccgcgccctcgtgcagctgtgcgccatgggattcatcatcagctacgtgattcgttcgaacagcgtgtggatggtgttcgccctgatgacggtcatgctggtcgcggcggtgcagatcgtgatatcccgcgcgcgcggcatccccaaaggtcttgccggaccgatcttcctgagcctggtcatcacgatgctgctcatgctggcgttggtcaccgaactcatcgtgcgcccgcacccatggtatgcgccccagctggtggtgcccctgaccggcatgctgctgggcaacaccgtttccgcgcttgctgtcgggctgagccgattctatgaaagcatggaggaacgccgcgacgaggtggatatgatgctggccttgggggcgacggcatgggagtccgcccgtccatccgtcatctcgtcgattcggctgggactgttgcccaccaccgcttcgctggcctccagcggcattgtgaccatcccgggcatgatggcgggccaggtgatagccggcggagatccgctgaacgccgccaaataccagttcgtggtcttcggtgccatcgccgcgctgaccttgctggccgacggtctgatcatggccatggtctatcgcacctgcttcactaccgacgaccaatatcagacgcctaaagcacgatagcctcagtatcgatctcaggccaagcctcaggcgatggtgaccggcgtgccttccggaatttggttgtagaaccattcggcatcggccacagtgagtcgcacgcaaccatgtgaggccggctgaccgagcttgttgccttcctcttccatatactcgccggagttcgccccggtcggcaccgagtggaagaggaacgggccgttgaatcgcacccaataatcagcacccatgccttctgcgggattgtagaagtgatcgcctctcatcccgataacatagttgccgcgcggggtcgtatcgttgagcccggtgctggcgatcatcgtgtagatggtctcaccgccggattgcacatacacttcctgcttggcgatactgactttcacgctgagatcggagtattgcgacaaatcaggctgcttgccggtgggattcgtccatcgcgcacgttgcgcttccttgtcacgctgctcctgaatcgcctggttaaagaccggtacctgctggcggtccaaggatgaggccgatgcagacactcgcgatgccgactgttgcgcggattgactcaccttctgcgcctgcccctgaacctctgcctgcccctgtgcgaccgactcaccgcggggccacacccgttgggcgtcaatcgtcgagaagacggcaagaacgcagcacaacaatgcgcataccgcaaccacaatgcgccgtacaacgtaaattcgttgacgacgaatcctcatccgtgctcgacgccgctcagtcatgtcttccttctcgttgcaaagacttttgccgtaagtattgtagccgcttttacgatacgtcgcgtaccaatatcacgcgcgctattccgctgtcactattcctattccgttgccgtccacttacgtctcagcaacatccacaggccgatgatcacagccaccacgccgagcccgatgccgaacagtcccgaggattgcgccgcgtgcgcggttccctgggattccaacagcacgtcctgcgtgaccaccagcgacagcatcgcatcgagaaggtcacgaatttgaccgacgaatcgatggggttgtgcgtcttatgcgaaatcaccataccgcgaatcgcaatcaagaagaacccgcaacttacgcagcagacggtcaatcgccttaaggaggcgttctggaagctgtatgaaaccaagccgatcgagaagatctcggtgcgtcagatcaccgaactcgccggctacaatcacgccacgttctacctgtatttctcgtccgtgcgcgacgtgcgtgaccagatcgaagacgacctcatcgcccagcgagacctcatattgaagcagtgcatgcatgacggcacactccccagcatcgcaccgcatatgcaaatgccatcgcaatcggaagcagcgcagcagccagcggcatcaccgcaagcccagtagcgaggtcaacccacagctggcggcgcgggaaacaggtcgcgccgcccagtacacgaatccggcgagcttctaccgagtcgcgaggaagaagaaacgcgggaaggggaaaatgatgctgccgtccgactgtgtggggtattcctcgcggacttgggagaacacttcggcctcgaacttcttgcggccggcgtcgtcaagcgcctgcagatacggacgcatgccggtgccgcgataccagtccataatcgcctcatgcgagggcagcgtgtgctcccgtttgaatcgcagatactgttccgaatcccgggtaaccatgctccccacgctaatcagccgttcacatatcggccgatattatctcacaattcagccaagcagggcgtcgcggcgggcgatgagcccgtcaatcgcggcctcgccttcgatgacggtgaaggtcagggacttacgttcgctggtctgcggggcgatggtgtgcaggtcgccgcgctgctcgtgccagccgcggccgtggacgctggagttcgagggttcgaggccgaccacgtagtcgcccgcacccatcgacttccattccatgaagtatgggaagaggctggcgtcgaagtcgatgacgactccaagtccgagcttgcggttgaccacggcggcgaagctgcggccgttcttgtcggcggcgagctcgtgcaggtacacgctttcggggcggttcgcctcgggtgcttggatttcgttccacggcgtggtgtcggctgcggtggtctcgtcacgcggggtggccttgcggctggggatcacgacttcggcgccttcggcgagcaacggccagccgaagttgcagtggtacatccacatcagcggctcgtcgcggaaggattcgttggtcacctcatcctcgaccgtgatcgacggctggccgtacacgctggtgatcttgcggcgcatcaccagattcccgccgaacagttcggcctcgcgcatttcgccggagacctcgagcacgtagtcgccttcggcggtccagtgggcgtcggagcccacatgctcggccggcgtggtgcggatgcggccgtgcatcgggaagctgccggccgggtacttgccgccctcaggcgtgacgtacggcgcgcagatgttctcgaagccgcaggtgaagaacaggccgcccatgatggagcgctgcgcctccagcccgttggtgtcgaactggttgcggccgttcaggcccggcttggacaggaaggtgaggttctcgccgcggtattcgaactggcagacgtcgagggcgcggtcggccatggatacgaagcgtagcgggccgttcttcacctcgatggccttgaggccgtgggcacggccctcctggtactcgatcgggcgcacgtaggcggcctgctgaaggctgcccatgtgggccaacatgtcggctcgcgtattgtgttctgtggatgtcatcgtcgtcaccgctccttgcaatcatcggcttgttgtccgtgtgcacatcatactgtaagcgttttccgcaattgtcgctatcaacaacgtatacgcatgtcgaaaagttggaccgaagaacaacgcaagcacaacgaaggctccccgaagggagccttccatcgtagcacacgttacgcgagaattcgtcgctcgcgctttacgcttccgcggcatcgtccttcagcgcacgcagcagggccttgttgcgggtttcgatgatgcgcttgccgtcctcgccctgccaagagaagaagccctgaccggtcttggcaccgaggttgccttccttgaccttttcggcgagcagcgggctcgggccggtgccgttgtccatgtcgtcgaacaggtaggtgctgatgttgtagaacacgtcgagtccgccgaggtcgatgctggcgatcgggccgaccaggttccagcggcggccgaggctgtacttcatcacgtcgtccacggtggccgcgtccgctatgccctgctggacgatgtagaacgcctcgcgcaacacggccagctgcaggcggttgcccacaaagcccagcgattccttcttgatctttgccggcttcttgccgatcttggccatgaggtcgaaggtgatgtccaccaccttcggatcggtcttttcacccggcaccacttcgaccagcggcatcaactgcgcggggttccagaagtgcgccaccacgaagcgctcggggtgccccatcaccgactgcagcgcggtggggctcaggccggaggtgttcgtggacagaatcgcgtccttgggggcggcgtgctccacttcggcccagacggacttcttgatgtcaaggttctcggccacggattcgatgacgaagtccacgtccgccacgccgctcgcatagtcggcgtaaccggtgatgcgggccagcaccgtgtccacggtgtcgccggccttgagcagtccggcttcggcgaagtcctcggcatcagaacggatcgccttcatcgccttctccagcgaggcctcgctgcggccgaccagatgcaccggatatccggccagcgcgaactgcaacgtgatcgcatggcccattgttcccgtgccgacgttcgcaatcgtcttgatatcgtccgctgtctcaatcatggagaccccttctttccggcggttcgcctggcgttggtgtacgcaggaacagcaccgtgccgttatgcgtttgctcgcattctatgccgatttcgctacgtgaacatttactgaacatttcgcggattcgactagcacaaatccctatatcagcacaaaagcccgttgtctatttagaagtgcaacatccttgttgttcggttaatgatagtagttcgtcggcgaatgcctcggccggggtgcggtagccgagcacgcgcatgggacggtcgtcggtctcgtccacgatggcctgtatctcgtcggccatggacgggtcgacgcgcgtgcgcttgggcaggtagcggcggatc

SEQ ID NO: 1793 - DNA, 7456 bp, Unknown
  MAG_14  MAG No. k141_35368
catccgcatcaatgcgcgggcacacgatataggcccgctcccccgcgtcgactcgcgcgcgaatgtgcgcgaacatacggcccatggtggcggcgtcggcctcattgaccaccacggtgcgaatcggtttgcggccgccaggcaattcggtgagccaggaaatatcgagatcgccaaaccaagtcatggcggcggtgcgcgggatgggcgtggcggtcatcaccagcagatgcggcgtggtgccgtcatcggttttggcgttgagactttcgcgctgctccacgccgaaccggtgctgctcgtcgattaccaccaaggccaagtgcggggcttggaaggtcttggaaaacgccgcgtgcgtggccacgataatgcccggctcgccactggacgccgcagcaagtgctttacgtcgcgcagcaagcttcatgccgcccgtcaacaacgtgactggaatcgctggcttgagttgctccaccatccggccaatggtttcggcatgctgctcggccagcacctgagtcggggcaacaagcacggcctgatagccggcgtctacggcttggagcatggcagcgagcgccactacggttttgccggagcccacctcgccttgcagcagacgctgcattggccagtcatgagccaaatcggcggcaatatcatgaataacctgctgctgccctgcagtgagggagaacggcagggatgcgatgaactgatcgcgcagactgtcggttaccaacgggcaagagtgagccgcggatttatgggcgtgcgacctggctttaagcagcgaggtctgcgaaacgaaagcctcctcatagcgcagggtttcgatggcctccttgaaccgggtcgtggaggccggatcatgaatggccaggaacgcctcagcccgatgcatgaggttcttggccttgcgcaccgattcgggcagcacatctggaatggattgggagagcgcctcagcaccggattcggcggtcgtgccggaattctcttccccgttttggacggcgatggtgtcggtcgtgggagccacaatgccggctgacccagcgccagcgagttgcccgtcaggcgtggatgacgtgcgggcccccatcatccacagcaatcccagaatcgtctcatgaatatgttcggacgagatacgcgaactggcgtgatataccgggcggggccggcagacgcgggtaagcgcctcttgcacggtatcggcgtcgtatttcagcgcggccccggaagaggcagccgcggccggcggatacgcggactgcacactggcatacggatcggtacttcccgcaaacgcaccattgccggatgccgcaccccgagcgtaaccctcaagccccgctcctgctccggccgacccgggcgcgacagtgaggatttcggggtgcgtgaattgcagctgccccatgtattcgctgggcataccggagaccaccacagacgtgccggcgcgcagccgcatgctgacccaatccacatacgatttacgatacgaaaagaacgtgagccgggccgtgctgccgggtacgcgacgagaccgggcgaagtcggcgtcatcgaccgtcgcctcgagtcggtagccgcggcgagcgttcatcggcaccacgcgcatgtctcgtatcacggcggcaaatgccatctgctggccgggtgcggcctcgcggatggcgcgaagcggcaccggttcggtgacgcggaagggatagtaggtcagggcgtcgccgacagtgacgattcccagcgatttgagcgcggacacgcgacgcttgttggtgaccagcgaagcgagagtggtgtccatagtgatgctcatattggcctattctattcgcacggcctctttaggccgcagaaacaacaaaacccgctgagccgaagctcaaacgggttttgctccacgttagtacgcgattcacgcggccacgcgctgaaccttgccggccttgaggcacttgacgcacacgcgcagacgagtgttctcgccatcaatcgtggtgcgtacagactgcaggttcgggcggaagctacgcttggtacgacggtgcgaatgggaaacggtgaaaccggtctgcggtcccttgccgcacactgcgcaacgagctgccatgatggactcccttaaccttgatgtgtcaagtctttcacgcattcgaccgccggtttcacccgacatgccgaacacacaacttcacaaatatatagcccaataccgacaaccgcaactcttgcgtgtatcatgggcgaacttcggcggttcacgcgcggttcgagcgtaacttgcgagtgggccatcagcggttcgcgagcggttcggcattggttcgccagcggtccgcaagtagttcgccagcagttcgccagcggttcgccagcggcgaattacgctgcaaatcgtagcgtatacccgataaaacacgccggactgcctattccgcatccaacaaactctcatataatctcggtataagagacggcaagggacgaaggggtcctcgtgcaacttacgacgaaggaggctgtcatgttgaatctcaggcgaggtatcggcactcacgagcccagcgtgatttcactgggtcaagtctgggtggacatcatgctcaatgtggacgaggtgccggcacagggcggattcgccgtggccgatcatccgaagccctccattggcggcagctatcgcgtactgcaggcggccagccgcatgggcgtgccgaccgagcacgccggcattctgggcaacggcctgtgggcgcatttcatccgccagtcattccaggacaacggcattacgcatatcggccaggatcgtcttgatgaggattccggtttccgcgtggtgctgagctccggcgcgccgaagaagacgttcatcgcttcctatggcgccgaggctcatggcgacgcggacacgttcaacacgctggagccgcagcccaaagacgtggtgcacatcagcggcaacacactgatggaccacacggccaccggcgtggacggattcctactcaaggccggtaccgacccggctgcacgcgactacacgctggtgatcaatcccaccaatacgttgcgtctggtcaatgaccacatgctcgaggatctggtgcttgcgcgcccggtctggtcctgcaaccgtcaggaggccatgacgctggccgagcgcctgggcgcgccgatcgacgacagcaaggtcaccatcggcggtggactcgacgacttcatgcaccagttgtgtgacggcttgggcactacactgcgcgcgccgctggtggtgcgtgtcggcgcccgcggcgcttggattcgtgagccaggtggcgagacgattcatatcgagggatacccgaccaaggccgtacacacccgttcggcgggcggttgccacaccggcgtgatgtgcgcgatgctggcaaagggccatagtctggccgaatcggtaaagatcgccaacgcggcggcatccatcgccatccagcgcagcctcaacggcgtgccgcaatgccccgattacgacgaggccatcgcgctgatcggcgaatagtttccggacgattgagtggatttcctcatctgggggaatccacgatcggctcccttcagtccgcttcgcggccagctcccctcagcgaggggagctatttttttgctctggctccccttagaaaggggcccggcattattcacccgccgttcaactttggcggttttctaccctagtccgcgcttctacgatagattgagttgaataccgtcgaggagtacatatgactgatcccgcaaatgtccacgaaccggtgccgcaaagcgccaaactgaccgcccgcgagaagaagtggatcatctacgacgtcggcaactcggcattcgtgctgctgtccaccgccgtcatccccatttacgccaaatcgctgatgccggcggatggcaacatcgtgtccgcctggggctacgcgcaaaccattgcctccttggtcatagcgctgctcatgccgttgctcggctccatcgccgacgtgcaaggcatgaaaatcaagttcttccttggcttcttcggcaccggcgtggtcacctgctgcgcaatggccctgcccctgacctggctgccgttcctggtcgtctacattctggcgaccatcggcctcaacggctcgctgacgttctacgattcgatgctcatcgacaccacctcgaacgagcgcatggacaaggtctcctcgcacggctacggctggggctacatcggctccaccgtgccgttcatcttctgcatcgcgctgatcttcggcggcccgtcgctcttcggctggtccacggtggcttgcacgcgcgcctcgttcatcatcaccgccatctggtgggtggcgttcaccatcccgctgcttaccagctaccgccaggtgcactaccgtgccacccgcgaccagctgggctcggccgtgcgcggcacgttcagcgaactggcgggcacgttcggcaaaatcgtgaagaacaagccgttgtggatgttcatgatcgcgttcttcttctacatcgacgccgtgaacacggtgatttcgatgagtacctcctacggtgccgagcttggcatcgactccacccagctggtggtggcactgctcgtcacgcagttcgtggccttcccctgcgcgattctctacggccgtctggccggccggttcggctgcaaagtgatgatcacggcggcggtcgtggcatacatgtgcatcgtgctcttcgccgcgttcttcatgaaatcggccgtggagttctggattctggcgattctggtcggcatgttccaaggcggtatccaggcgctctcccgctcgtactacggcaagatcatccccaaggatcacgccaacgagtactacggcttctacgatatcttcggcaagaccgcctcgatcatcggcactttcctggtggccaccaccacctccctgaccggcaacgcctcgctcggcgtgctctccatcgccgtcctgctcgttgtggcgctcgttttcctgctcctgcaaaaggacccgacgcgggagtgatttgccggccctcggcaactctgcgccgcgggcgacatctcgcaacccctgcaacgggccctaatagcaatggaccatcgccacttgatcacttacgctcgcgataatccttgatcagctgaatggcgacggccgcaacgccgcacagcacaccgccaatcggccacggcagccagaacatcgccccgtccgcggcgctcgacccgacggccgaccaatcgccgcgcaatgccgcagggttcaaaaacagcaggcacaagccagtcgccgtggctatcagcataatgatgccgcacaccgcgccggtcagtctggcatagaaatcctgttcgcccgcatgctccttgcggtcgtcctcggccgctttgttgtatgcgttgatattgagcagactgtatctcatgccgcagtagacaaacccgaaaacaccgggcgcacagagcagcagaaaaattgcgttgggccagccatcggagacgccgagcatgtcatcggcatacaccgtcaccgcaatgccaatcagaatagccgagatgccaccgacgatgccgattaccagcagccgcaattctcggctgcggtcctccccggtgtagaaatcttctacgtatgggtgacgccgtttgaagtcaatacgcgacagacctcctggaatcagcatcgccagccccgcaatcacacccacgcagacgcacagaaacgtcagaaaatcgttgagcggcgtcgctccgagaatggaattgctggaatcgaacaggttgccgatgccaaccccggcgacaatcgcagcaacaccgccggcaatcagcagcgcgaatcggcggcgatgttcatcgtagccagtgatatcctgcgcaagctccgcgataggagcgattatgcccgtcgttttggaagaagcggctaaaggcgatgccgtctcagccgaggagtcaacattcgacgaaccggccgcagaagccgacgcggcaggccgactcacatcgccaagtaccagatcatcaagcgtgcagccgaacaggtcgcagatcataagcagcttgtccatctcgggataggccttttcggattcccatttcgaaatggcctgacgcgagacgccaagcaacatggccaatcgttcctgggtcaggttgcgttgcgcacgtaggtactgcaggttagcgcgaaaactcattggaatgtcccttcatacgtaatctttatcatgtcatgttcggccgatgggctcactatggcatgccgtccatgtcacccgccaccatctttgggttgcaatcgccggttattcgagcgcaaccacaagttgcatcggcggaattccgccattccgttgacctgagcagctttaacatcgcactccacgagaccgaagcttttccagccatgcgagggcagcttgtctcacctgccaccacgaatctgcttcgacccacgtacacatctgtgtacagcagcgctcgcaatcggttacctacgacccatatgatttgctgagcgaccgcaaaacacgcaatagccgagacaacaccgtcagcgttaaagcttaaggcgactacttgcccaatagtccggaaatctggctgatgatgtcagcgggcagtcctgcttgttcggcaatggatccgaggtccagattggcaccctgctcctgaattgcgccagcgacctgactgatctggtcggcggagatgttttcctccgccagcgcctgcagctcgtcaagtcggtcggcgttcaaatggtcgccaacgacctgttgatttcacccaactgatcggcattgaaatgctcaccgattaccgccggcaaatcaccaatcgaaccgagattgaaatccccgccaagcacattgcctagattgtctgcggcaaaatttttcaggctatcgaacagtcccacatgtgccgctggtactgcttgttcagcaactgctgcagagcatcgcacagaccctgcatcaatcgccgctcttcggcagacaagtcccgcgtgaaaccaatctctgcctttgcgctcatcagctggggagctcacggtcacactcatgcgtcgcagaccacgagcctcacgcgcctcctcagtccacatctgtgttaacaacatgtgttaatcgcatgcatcgccaccatgagtccccaatgatttcaagggttccccggtctcactattgtttcttccctaaaacggcctcaatcatcggcaccttcctggtagccaccaccacgtccctgaccggcgacgcctcgttcggcgtgctctccatcgccgtcctgctcgttgtggcgctcgtcttcctgctgctccagaaggatccgacgcgcgcaaacgtgctgagacatcgccggtgaaccaagttctgcctttttaccgacgccagctcgcataagcaggaa

SEQ ID NO: 1794 - DNA, 18420 bp, Unknown
  MAG_14  MAG No. k141_35396
ctgggcgggcttggcatgggaggcgatgaacgggtcgcggaacgtcagtcgcatcacgcggtcggtcagttccgtaacctgcgtgatttcgacgttgtggcgcggcgggaagaatccggccgcagtcgcctccgcaaccacatcatgggtgggggtgaaagttgtcatttcattcctattcagcatatcaagctcccccctatcaggggagctgtcaaccgcaggttgactgaggggtagttaaacacactcggctccggtttccagcccacactcacgtatagcccacagccggacaatctacctacctatatacggcaacccgcagattatcgcgcatgtcgagcgccgcctggcgcgcgctgctcgccacaaggtccagcgcctcgtcggcggtcatggattcggagtacttgccgctcttcttccatgcgccgatgatgccgcgcgacgagttgacgatggcgccgctgccctgcttgtcgaacatgcctgccacgtccgcggccgtgccgccctgcgcaccgtagcccggcacgaggaagaacgtgtgcggcatacgttcacgcaacgccttgccttcctcggggtgggtggcaccgaccaccgcgcccacgcgggagtagccgtggctgccgatggtctcggcgccccagccttccacgagatcggccacatgctcgtagaccttcgtgccgtcggccaggtcgagcatctgcagttcgctggaggacgggttggaggtgcgcacgagcacgaagatgtccttgtcggcttcggcggcggcctcgacgaacggggtgatgccgtcggtgccgagatacgggttgacggtcaccgcatcctcatgccacgggtcgaagtcgcccacgccgttcaggtggtgggcgtaggcggctgcagtggagccgatgtcgccgcgtttgatgtcgccgagcacgtagaggccctgctgggccgcgtattcgcaggtcatcgtgtagatgtccacgccggcggggccgagcgcctcgtacatggcgatctgcggtttgacggcgggcacgatgtcggcgatggcgtcgatgatcgtgcggttgtattcgaagtaggcgacggccagctgcgcggattcgatttcctccggggattcgaccgagtcacgcacctcgtcggcaaagctcgccacgacctgcggcggtaccaacgcctcggtggggtcgaggcccacgacgctggggttctgagtgttgtcaatcgcttcgatcaggcgatccatgctgctccttatgttatctacagacggctgaacatcagctgggagccgatgatcgtggcgagggggcgtccggtgacctgccagccgccgaacggggtgttacgagccctggagtggaactgttcagggtccacggtccattcctcagcggtgttgagcaccacgaggtcgacattgtcggcgtcatccacgcggctcaggtcgagcagtcggttgacgccttcacgctgcggctgagcgtcgctctcccccgcaatcacgccatccggatcatccccagtgggcgcgggttcggcgtagtcctcgaccagcgcggccacgtcggttggcacatgccccatgagttcggcgggtcccacggacatgagctcgatcagacgctcatcggaaatgaagccgccgtcgacgagcaccttgtggcacacgccgtacgcgcattccagtccgatgatgccgttgggcgcctcaaggaagccgagttccttctctgccaacgtgtgcggcgcatggtcggtggccagcagatccacggtgccgtcggcgatggccgcgatggtggctttgcggtccgcttcggagcgcagcggcggattcatcttggcgagcgtgccgtacttgagcagcgcctcgtcgctcaacgccagatagtgcggcgcggtctcgcaggtgattggcaatccttcggccttggccttgcgaatcgcctcgaacgagatggcagtgctcacatgctggaagtgtacgtggacaccagtgcggcgggccgcttctatatcgcgggccacgatcttgagctcggtgtcttccggaatgccgggcacgccaagttcgcgcgagaccgggccttcgttcacggcacctgtatcgtgatgctcgcaatgctcgattaggtacaggtcggaggccttgacgttctccagcacctggtccaggatctccggcgtcacagcggaaccgtcgtcgctaattgcggtgatggggtgcgtgagcatggccggcgtcttggcgtcgtcctcgaatccgggcacgtacctgagccagtcggcaacgtcgcttgcctcatgaccggcgcgatccttggacgcgcacacgcacagatcgtaacgaaccggcaattgaacatcgtgcgcagtatcgtactgctgcaggaagtcgatgacgttgtcgaagccggcatccagaacctctttcgcaccggccgcttccaggtcagacacggtctgcccatccagtgccggcaacgtgttcggcatgatgagcacgttcgtgtatccgccggatgcggacgcgcggcagccggaggccatagattccttgtaggtctggccgggatcgcggaagtggacgtgcgggtcttcgaaaccgggggccacggtcagtccggtggcgtcgatatcggcaccgtcagccacggcggaggtgtcggcgaagtaggcggcagcggtcccgggcaccacgaggtcgatgacttcgccggtgttccagaccttgatgttgcgtagggtgatgctcacagtttggcttcctcgtcgcagtagtcgcagcggtattcgagccgttcggagtgcacgaggtggaacatctgcttgatgccgggctcggtggtggtcacgcagcgcgggttcacgcaggagatcacgccgacgatgtgctcgggcaggttcggctgcttcttttcgacgatcttgccgccgcgcaccacgtctacggtggcctggcaggccacgaagccgagtacgtcgaggtcgatgtccttgtcatcctcgattttgatgatgtccttggagccgtaacgcttggagttggcgttcatgatgagcgcaagcttggttttggccgggtcgattttcaggtattcgagaaccttcagcgaggttccggccggcacatggtcgatgatgatgccgttctgaatgctggtgacttccatcaggcctgaacctccttggggttgagcggttcgtatccgggtagttcgtcgcccaccacggtgctttcgagggccatgcgcacgagcatgccgttcttgacctgttcgaagtaggcggcacgcgggtcgtcgtccacgtccacggagatttcgttgacgcgcggcagcgggtgaagtacggccatggacggcttggcgagctgcagcttttcttcgtcgagaatgtaggtgtcgcgcaggcgcaggtagtcgtcttcgttgaagaagcgttccttctgcacgcgggtcatgtacagcacgtcgaggtcgccgatcacggaggccaggtcgcgcacttccacgtaggagcagttgtcggtggcgttgatgcggtcgatcacgtactgcggggtcttgagctcgtccgggctgataagcacgaagcgcacgttgccgaagcggcacagggtctcgatcagggagtgcacggtgcggccgaaggtcaaatcgccgcacagtcccacggtcaggtcggtgatgcggccgaagcgcgactgcagcgtggccaggtcggccagcgtctgcgtgggatgcatgtggccgccgtcgccggcgttgatcaccggcacggatgcggcgcgggaggccaccagcgcggcaccctccttcgggtgacggatggcgaccacgtccacgtagttggacacggtcttcaacgtgtcggcgatggattcgcccttggtcacggaggccagctgcgcgccggcgaatccgatgaccttgccgccgagacgcagcattgccgtctcaaagctcaggcgcgtacgggtggagggctcgtagaacagcgtggccagcactcgcccatcgcaggtatgggcaacctctttgcggtgggaatcgatgtattcggccttatgcagcaggtcgagaatctggtttgtagacaggccgtccagcgttacgacgcttttgccgaccattggcgtttcttcagacaaggctcaccttttcgctcgtggttttcaggtggccacccttgtgtgacctaatataacttacgccatttttcggacagccgcattcaccgagtgttcacctgaaaatccaacgaatatgctgtgtctgtatagctgatatctgctttggaacgccagagctcattcattaggtcgatttgacgttcattaggtcactgcaccctcgtatctgttgttggaatgccgccattccaacaaggtatgcggcggcggccgacctaatgaacgatgaatcgacctaatgaacgtagtgaacgcaatacaagaaaggtctatcgctgcgcgcggcgtcggttccgctccagtcgcggtgcgatcacgtgcatacgcgggcgaagcgcggtttgcggctgctgcgttgcggcggaggccgtggcggtggttgccgcagtcgcctcgtcttcggcctgcccgtagaacaggcgctggcatacgtcacggcatttgcgcatcacggccagcaggtcgttctcgaaatgctggccgcggtgggcgccgtagccgaggtagacggcgatgccgcccagcgaatagatgtcatcaggcagaatatcggcctggttggcgcgcccgctccacagatagttgccgttgcgggccgcggtgcacaacgtccatgccttgcgcagctgaatcgcatcgatagcgctgatgagcttcttggcctccagcacgtccaatgcctccaatgtgccgttgacgcgcagatctttgatatcgccggcgtgctggagctgcatgagttgcacggtccattccacgtcagacagaccgcccctgccgagcttcagatgacgttctcgacgcacgccgcgcggcagacgctcggcctccatacgggccttgagcttgcggatgttctgcaattcggcctcggtcagctccgtggtcgggtagcgcaacgggtcggcgatgttgatcaggaagtcccgcgccagttcggcgtcgccggccgcgtaccgggcgcgcagcagcgcctggcgctcccaggtcgaggcccaggattcgtagtattcctcgcaggaggcgtaggagcgcacgagcgggccgttcttgccttccgggcgcaggtccaggtcgagttcgatcttgggttccagcgtcgtcgggccttgcaggatgttgcgcaggtcttccacgaccttcttggcgaaggcgttggcttggccgtcgtcggcatcgtcggccggacggtagatgagaatggcatccgcatcggagctgaagttcacttcgcgcccgccgtaacggcccatggcgatgacggtgatgccggccggcgcggtttcgacgccgaacgcggcgatctggtggcgcacggcccaggtcagtgaggcgtcgatgatcgcgtcatacacgtcggtcatggccttgagactgtcggagtcgctgatcacaccgctcatccaagacaggccgatgcgttcgatttcgtggcggcgcatggcgcgcatggaggtggcgaactcgttgatgttcgagccgaaacgttccagcgccgagccggtctgcacatccaatgcctcgcgcgtgcgggcctgcagattgccgtcatcaccgagccaactgatcgattcgaccgacttgttgagcgcgtcgcccaggaatcgcgagttggacaggatgtggcacagacgctgggcagcggaggtggagtcgcgcaggaagccgaggtagccggattcggtgccgaagttctcctccagcttgcgccagttgagcaggcccatgtccgggttctggccctcgcccagccactgcaagacggcgggcaggatgatgcggttgattttggccgcgcgccccacgccggcagtgagcgcctgcacgtggcggatggcggcgtccgggtcgccgaagccgatggattcgaatcgttcctgtgcggcctcgacgctcagcacgatctggtcgttctccatctgggcgttgaccggcagcatcgggcgatagtagatgtcgaggtgcaagtggcgcacttcgcggcgggtgtcgtcatacttgtcgacgagttcttccgggtgcaggccgaatgcgcgggcgaggcgacgcagctcctggttctggttgagctcatccacgtcgatgtcgcgcttcttttcgaggcctccgaccgaggcccggccgaggtccgggaacaggtgcgtgcgcttcagggaccagatctgctggcgatgctccatcacgcgctcgaagcggtagtcctgggacatgcgcacggcctgtttgcgcgagacgtagccgccttcggacaggcgctgcagcgagtcgagcgtgttgctggtgcgcagcgattcatcggtacggccgtgcacaagctgaagcatctgcacggtgaattccacatcgcgcagaccaccgcggccgagcttgatttcgcgatccttcagaggtgcgggaatcagatcttccacgcgcttgcgcattttttggcagtcgtagacgaagttcttacgcttggacgcgctccacacgaacggccgagtcatatccatgtaggcccggccgaggtcggggtcgccagccaccgggcgggccttgagcaacgcctggaactcccagttctcggcccactgctcgtagtagttcttgtgcgaggagagcacgcgcaccagcgcgccgtccttgccttccgggcgcaggccgccgtcgatctgccacagcggctgctcggccacgcccatgatggcggactggcagacacgctgcagcatggtgcccatcttggtgcccacgcggatcagcgtctgatggtccacgtccttgtcggccggttcgaccacgtagatgaggtccacgtcggagacgtagttcagttcctgtgcgccgagtttgcccatgccgatgatggtgaagcgcacgtgctcgctgccctcggtttcgtggcgggcgatggccagcgcgccttcgagcgccgcgcccgcgaggtcggacagttcgcggctgatggtcggttggatggaggccgggtcgtccgccacggcatcctgggcgatgatggcggccagttggttccggtagctggaacgcaaggccgtggccgcttcggccagatccttggaggcgacgggcatggccggttcgtccgggtccgcgccgaccgccttgagcagacgtgcacggcgttgcgcgtgattgaacagatggctgttgcagttgtcgactgctgcggcctccacaagctgcggcttgaagcgcatgaacttgcccatcgcgtcggagacgccgagcaccgtgaccagacgcttcagggcgtcgttgtcggggatgacgtgtttcagatcgcgctggctggattgcatcgcgttgacgatatccacgaaattgctcaatgccatatcggggtcgcaggcgtgggccagcatgctcagcagttcggcgcatcgctcatcgggaatgtcgtccgtcttgagctggtcgaacaaggtgcgggccttgtcgaggtcttgcagacctgccctgatgagatccatggagctgggtttgaacatcgacgattccataagattccactatatacgctcatgccctccgaatggggcatgagccgggaaggagtcatcgggcgacgctgatgagctccgaggaatccatatcgtaatcggccatggcgtaggaacggatggcggggtcatcataggtgttcatgtaataggtgttggtcttggacgaatatccgctggtgaacagcgtgcgttcgaactggccgtcgcccatcttcgccatgccgtccaccatctgcacggagccgagggtgtggaacaggcgagacacattggcggcttcatcgttctgctgcgggtaatgcgcgttggtgtaggccacacgaacgaagcgcgacggggaactcacgtcgcccgggatgccatgcatgcccacacccgcaccccaggcggtcaaggaggccttgccccatgaagtcggttcggccatctcgttgctgacgcacatgtagttgcgcagattttccatatggaagtcgaacgtcggctgattggtcagcacatcgacgtcatcatgatgcacgtgcatgccatcggccatctgctcgacgacgatgctgcgcttgccgtcgccgatgaaccagtgcagcagagactcctgctgtcccggcacgatctgggagacgagcgtcacgttcctgagcgccttctcgacctcgtcgacggagtcgaaattacgcgccacccacagcggaaattcgaacgtggcgacgttttccgtgccttcgaccggttcgtggacgaacgaggcgtagccggggaaattcaagccggcgatggccagaccatgctcattggcgcagtcgaaatacatcggcctatcggccatgaccacgcccacgccgatcaccgcgttcggcttcgccttgccgcccgcaccgaacaccgtgtcatagtggtagccgcgcggagtgaccaggatggtctccccatatgagaaactccagtcgagattacggccgaaataggtgttgccctcatcatcggagaaacggacaccagtgcacataacggacttccttccatcgctttggttggcttgtacgttcatgatacccatcggccgctgggggaactctgggtttcgccagcagattaacgtgcggcgcgacgcattgagatgcgccgcgccgcgatatgcgtcaaccttgcgtaccgaggaacaacggttccgtattgcgccagatacggcgcgtggtggcggggtggttcatcgaatacaggtggacgccgtccacgccgtgggccacgaggtcggcgatctgctcggaagcgtagaggatgccggcggcacgcagggactggatgtcgtcctcccacttgttcagcagggtgttgagcttgtccgggatacgcgaggcgttgcgttcggccatgcgacgcacggacttggcaccacgcaccggcatgatgcccgcctcgatcggcacggtgatgccggcggcgcgcgccttgtcgaggaaacggtagaagtcctcgttgtcgtagaacagttgggagatcaggtgagtgacgccggcatcgaccttgatcttaaggttttcgatgtcctggtccagcgagtcagcctggtagtggccttccgggtagcaggcgccgaacactttgaggcccggcttcacggagcggatgtatgacacgaggtcgctggcgtggttgaactcgcctaccagctgctcgccgtcgatgtagtcgccgcgcaatgcgagtacggcgctcacgccggcctgctcgaacatgtcgagggcctcgtcgattttcgccttgtcggaatacaacgcggtcagatgcgcgactgcgggaatgccgtactccttgctgatcgtatgagcaatgcgcgcggtggcggtgcgatccgaatgggtgccgtggccgtaggtcacggaaatgaagtcggggttcagcccctccaggccgtcgagggtgtcatagatggtgtccacgggagcgttgcgcttcgggggaaagacctcaagggtgaacatcggggaatgcatgctgatttccttacataaacccgagctccctcatacagagggagctcggtgatttccgctacttgtcgagcttggcgcgcacggccttggcggcggcgaccaggttctccaggctcggccaggtctcggcgttaccacgggtcttcagaccgcagtcggggttgatccacaccttcttgacgtccatcttgtcaaggatctcgtagatacgatcctcgatctccttctcggaaggaatacgcggggagtggatgtcgtagacgcccgggccggcctcggtctcgaagtgcgcgtcatgaatggcgtcgagcaccaccagatcgccacgggaggcttcgaaggagatcacgtcggcatccatcgcgtcgatgtcgcggatgatgtcgttgaactcggagtagcacatgtgggtgtggatctgggtggtcggcttgacggcggagtgcaccagacggaaggccggaacggcccagtcgaggtacttgacgtgccagtcggacttgcgcagcggcagcttctcacgcagggcggcctcatcgatctggatgaccttgatgccggcggcctcgagatcgagcacttcgtcgcggatggcgagggcgagctgctaggtctgctcctcgtgggtgatgtcctcgcgcggccaggaccagttgaggatggtcaccgggccggtgagcatgcccttcatcacgtggtcggtcttggactgggcgtacgcagaccattccacggtgatcgggttggcgcgggacacgtcaccccagacgatcggaggcttgacgcaacgggtgccgtaggactgaacccaagcgttcttggtgaacaggaagccgttgaggttctggccgaagtattcgaccatgtcgttacgctcgaactcgccgtggaccagcacgtcgaggccgatctcctcctgcttcttgatgacggcgtcgatctgggccttgatgaactcgtcgtaggcttccgtggtgacctcgcccttgcgcagcttggcgcgctcggcgcgaatctccttggtctgggggaaggagccgatggtggtggtcggcagcagcggcaggccgagggcctcgcgctgcagggcctgacgctcctcgcgggcaggctggcgcacgtagtcggcgtcggacagcttgccgatgcgctcggcgacggccgggtcggcggccacgcgggtgccgtcgaacagggcctggttggcggcgagggcggcggatgccttcttctcgtcctcggtggcgtcggccagagcggcgacttccttgagctcggtcagcttttccacggcgaacgcgaagtgcttgaggtcttcggacgagatgccggtctcgccttcagtgctgaacggcacgtgcagcagggaggatgcggtggagacggccacgttggcggtgacctgcttcagggcgtcgaccaggccgagggaggtggcgtagttgttgcgccagatgttgcggccgttgatcacgccggcgaagatggcggtgttggaggccacgccatacttggcgacggcttcgaggttctcttcacggccttcgttgaggtccagtccgatgccgtcgaagccgagcaggttgacggtctcgtacacgtcggcgatgtggccgaagtaggtgttgagcagcaccttgacgttgcccttggcggacaggatcttggtgtacagggtcttgaagagctccacatcgcccggctccttgtcgagcacgaggtacggctcatcgagctggacccatgcggcgccgagttcgttgaacttgtcgagcacttcggcgtagacggcggccacggcgttgaccaggcccttgtcgagctcgagttcggtggcttccggggtgcgggcgagcttcaggaacgtgtacgggccgatgaacacgggcttggtgtcgatgcccagcgccttggcctcgttgaactcgtcgaacggcttggtggagttgagcttgatctccgcggccgactcgacttcgggcaccagatagtggtagttggtggtgaaccacttcttcatcggcagggcggtcacgtcgcccttgtcgccctggtagccgcgggccatggcgaagagcgtgtcctcctggttatcgaaggcgagacgctcgtaacgcttcggaatcacgttgaggaggatggcggtgtccagcatctgatcgtagtagctgaagtcgttgctggggatgaggccgatgccggcggcctgctgcagcttccagtgcttggcgcgcagttcggcggcggtggccttaacggcggcgaggtcgttggcacccttccagtagccttcgatgatcttcttcagttcgcggttctgcccgatgcgggggaagccggagacggaagtcagagtggacatgaatcctccaatgtatgcgttcgtaacccgacttagggtagcaaaacatccggattccaccccttataaatggccgcagagtgtcgttatagatggaatttatatccgctttagtcgaagtctttcacattgatgaccgcgagcagttcgccgctgtgcacctgccattcgtcgaacgatttgttcgatcccatgatcacgatggatgcgggcgaaagtcccaagttgagcaggtcgagtcgttcgccgtcggagtcggcggaggcgagccattgggcgctgatcgacacagtcggctcgtggcccactatcatgaacacgcggttcttggccttgacgtgggcgagctcgtcgaacaccgcctgcactcccccgtcatacaggctgatgcggtagtcgacgatcggcttgtcgccaaaggtcttgagcatgcggtccagtgtctggcgcgtgcgggtggcggacgagcaggagatctggtcgggcaccagtcccagcgactcgatgcccttgcccacggccttcgcctgtttcagacctttgtcggtgagctcgcgctccgagtcacccttgtcgccgaacggctcggccttggcatgcctcatgatgatgaggatatggtcgtattttttcgctgctttggcgactttgctcagcttgatgcccatccgtggctcccttcacgaaccgtctgcccggtgtggcggtgtggtgttgcttccagtatagaggtgtgtgagcgttcacaaactcatcgtcgggcggttattcatgcgtgttgccgagttctcccacctgacggtcgaggtcgcgcaacaccttacgtagtttgtggtcggagatgtcgcgcagttccagttcctcgatctgcgcctcacgctgttcgtcggtgagcgagtcgatgtcggtctgcgtgtccttggtcacgcgatcgcgctttctgagcgcctcgaatccggaggccatggcgcgcgagataacaaggaaaccggtatggccgatcatctggtggtcggggcgtacggcgagaccttgggccttccatgtgcgttcgaacgattcctggatctgcggctcggtccagcaaccggccgcgcgcagggcttcggccagtcgactcatctgcgtggtggtagttacgtaactgaccaacacgccgccgggggcaatcacgcggtatgcctgctcgagtctgttccacgggtcgagcatgtcgagcatgatacggtcgaaccagtgttcgggcagttcggcggccacggagtcgaagtcgccggttttgagatcccaccagctgggggcttcaccgtaatacagcgtggcgttggcctgagccactttggcgaattcggggcgcagctcgatcgtggtcagatggccgcgctcgcccacggcgtccagcagattcacgctcatcgcgcccgagccggcaccggactcaagcacgcgcatgccggagcggatgtcgccgagctggacaacctgggcgatgtccttcggatacatgatctgcgcgccgcgcggcatcgacagcacgtaatcggccagtcgcgggcgcatcaccgcatattcccagccgccgatggcgcgcgacgatttccacggcttgttcttgtctttctcggggtagacctgattgacctgtgcctcgcgcttggcatgcacggtgaggatcacggtgccttcggtcttgccgatcacatcgtcatgcagaatcaggccatgctcggtctgcgtggagccgtcggccacaagctgatcggtgatcttcttgcccttgcggtcggtgaactgcaccttctcgcctgcggtgagaggcccgcgcctcggctccataacttgctccttgcgtgctcggtgggtcaatcgctacaagtctaatgcatgtaagctcgttggtgaggtgatgacgatgcgaatgcagatgacaagccagatcgatgccggcggcaatgaccccattttcctgatgttccacggttacggcaacgacgaaagcgagatggtgcggattctcgacgccgtatatgcgccgacgcgagccgatgcggccccgtccgcaattgccgccgtacccagctatatctcgttccgtgccacctacgcgaggccctatatgggcggcaattactggtatcccgacggctgcggcgtggacgagcgccaacgcgaatgcgcggcggtcggggatgcggtggcttcactgctggatgcctcggcattcgcccatcgcaggaagatattgatcggtttctcccaaggcggttatctgtcgtatcgtctggtcaaggtgcatccgacgttgttcgatgccgcgatcctgcttagcccttcgttcatgggcgaggaacaggcggcgcttgactcccctacccgattcttcctggcgtatggcgcgcaggaccgcacgattccgatgcccgaccagcaaacggcccatcaggtccttgaacgggccgggcatctgacctatcgcgagtattccggcatggcccatgccatctgtgatgaggaaatcgccgatatccgggatttcctacgtgccatatgatgccggaatagcttcaatatggaatatctccgttcaaagaggtaccggtccaagtagaagcggctcaacaatggcggaatggcgttggccacgcccattcatcgcgcgatggttctgcgatcagctcaattcccctgccggctgatgccgcccttatgaccggtggccttgaatggcgtggcgcgtgccgtcaccttcggccccggcagattcgtactggtattggatcgaccgcggagcccggcagccggctgggactcggagcgtcgaccagtacccgtgatgttggtatgccgtttgccgtcgtgtgcccgtttctcatcagcaccttcagcctcgtcaatatcaatgcctttggcgcgcaaagcacgcgcccaccgctcatccatcgaactcctcacacatcccattcgggtttccacgtgtactgcctgtcgtaggcgctgggcgaatggcggcaggtggttcagagtgatcgggccgaatgcgacggcgtcaaaagtcatcgttgctcccttcgatggtgttggccaacaggttccaagggtcaggcacagcgcctttctcaacccgttcgccgccacgatgaccggcagcttgcgttcacaggttcccctgcaatgcgcctcattatggcaacacgaaccgacaggtgccggctgcgcctaggatgggaaatcattgctgcacgccgaaaagggaaggcgactgtcatgaggtatttcacgaccgacacgcatttcgggcatccactggtcacggtgttgcgagggttcacgacgttcgatccgacgcgctcgcgctatgaggaggtgctgcgcgcgcatggtcgcaagaccgccgaggattgggccaaggaggagacgtttggcgcggggctgacgtttcgtcaggtcgccgatacggatgcgcatgacaaggcgattgtggatcatatcaacactttggtcggcccggatgatgagctgtggattctgggtgatatcggtttccgcacatcgctgacccatctgaagaactgcctgcgagcgctcaattgcaagcatctgcatggtgtgatcggcaaccatgatgactggtggcgggaagaccgccccgcactcaacctgttcgaaagtttggagccgcacgatacggttgagattgagggactcggtacggtcaatctttcgcattacccgtatcgggaggatctgacatacagttggcccgatgatgtggcgaagttcagcggcaaggcgttgccgtttaacggccgcaggctgctgtatggacatacacatcagctttcgccagatggtgcacgcccggaggcactgaatgttggcattgacacagcattgaccgccgttgagatgtatgcacgctgaacacgcgcctcaacggcattggtctcgtcatctctcgctcacaccaacggattgccggcaagacgggtcaattcggcgttcagctcggggaaatgctcgttgccgacgaacggaccgtattccgtgccggattggaatgggcaccatgcctgaatggtcatatgcttcagtcgtgaataaggcaggatgccaccggtgcaatcggctgcgggatcgctcgccatattgaattggatttcagcgtcgagcatctgtgtatgcattccgccgtgtcgaaatagtcgatgccggaatcatgggccacggccacggtacgtgccgcatcggcggcatccaacgcgtccatgcgcatcacgcccagcgccactcgtgacgcaatcatgccggattgtccgatttcctgagtcttcatagtgtctcatttctgttatcgcgaatcggcgaacgggcactgtccgcctcgttgccgggcagcaatctccattgccgcggcttatgtcaccttatcgcttgaagtgcacttgaaggcaactcgcaggcaggcagcgcgcgctgccgggcgcgtcttcgcgccttcatgtcttcgctgtgaccgagacatcgttgtgccgtaatcatgcctatttcttgtatgatgacctctatagcaacagagctagggggattccatgaacactaccgattcagccaaagtcaccgatgccaatgccggcgcaaacaatgccatccatatcccgcacaatcccacgcttgccggattggccacgctgacccgcaacgtggcgtacaagaccggggccgataacctggtgatggatatcatctcaccacaatccaccggcgatgacgatgaccgccgctaccccaccgtgatattcgtgcaaggcagcgcctggaccacgccgcatcgcgactacgagatcccgcagctctcggctttggcccgcgaaggctttgtggtggccacggtgaatcatcgcgatgcctcgagcgatccccatgacatgttccccgcatatctcgaggacgtcaaagcagccatccgctatctcagggcaaacgcgcgccaatggcacgtggaccccgaccgtctcggtatctggggcacgtcgtccggcggcaacacgtcgctgctggtggggttgaccgccgacgatccgcggtatgaggacggcaccaatgccgatgagagcgatgcggtgaagtacgtggtcagctgcttcccgcccaccgacatgcttgaagcagtcgacgcattcgacgatgagaccaatccattccggctgtattatttcggcccgttcgcggccgtggtgggcgcgacccatgagaccggcatcaatgccgaggtccgtcagcgcgcggctgacatgagcccctacctgcaggtgcgggatgaccaacagtatccgccgatgctcctgttgcacggtaccgccgacaccgtggtcccctaccatcaatccgtcaagatgcgcgaccggctggtcaagcacggcgtggacgcgcagctggtgctagtcgacggcgccgaacatgagtacgatttctggagccagcaggtcttcgacgtgatcttcgatttcattcgtgagcggagctgaacgtaagggcacacgggcgcgtccttgttataggttgccgagttctcttttagccaattttgttggagcccctgtctgcgtgaacatgccatgacagttctagactgtgttctaggactgtcaatcggcaatgtgtatgaaagcgtgatgtgatgggtcagacggcgattgatggagttgagggacttaatagggccggtgaactcggtgaactcggcagatttagccgttcgcggcagctgatgtggggtcatgcgctgtatctgatttggtggtgtattttcttccgcccgaatgcgcaggtcaaaggcggcgcgctgcgcgtattcggtattgcgtgcattcttgtggccgcggtggcgggcatcgtcggagtagtgctagaatgttttggcatcagtaagttactttagcacgcggccgatttcctctttgagtgcataccgtctcgggtactttgccatgatctccttggcgagagccttggcttggtcaagtccgaaaacgttgcgatattgctcgatccacatggcaacgaatcggtattcgtcgcgatttccctgttgcagatcgcgatccagcggcagctgctttctgatcagtcgttctgcttccgcgctgtgattgaggctgatgggcttgagcaaatcacgcaggagttccggccgctgttcggctgaggtcaaggcctcatcggataggcgctcttcagtcatgagtcgtgcaaggactttcccaccgaaatcatgctcatgatagttgcgcaggatgttctgaatgctttgaggccagcccgatttgccgaccatcgatttgaggatgggaa

SEQ ID NO: 1795 - DNA, 14086 bp, Unknown
  MAG_14  MAG No. k141_35445
ccgtttcgcgacctgacgctaatatagggcgagttcgaaagggagtttcatggcatcacaccgcaaaccgtccgcgcaaacctacgatccgcgcacggtcaaggagcatatcgtcgagacgccgctgaacgaggagatgagcaaatccttcctcgagtatgcgtattcggtgatttacgcacgcgcactgcccgatgcgcgcgatggcttgaagccggtgcagcgccgtatcgtctaccagatgggcgagatgaacctgactcccgaccgcccgtatatgaagtccgcccgcgtggtgggcgaggtgatgggcaagctccatccgcacggcgattccgcgatctacgaggccatggtgcgtttggcacagccgttcgcgatgcgtctgccgctggtagatggccacggcaacttcggctcgctggatgacggccctgcggcctcccgttacaccgaggccaggcttggcccggcggccctcggcatgaacgcggatatcgatgaggacaccgtcgacttcacgccgaactatgacaacaagctcaaggaaccgaccgtgctgccggccgccatcccgaatctgctggtcaacggcggctcgggcatcgccgtgggcatggccacgaacctggccacccacaatctgggcgaggtggtgaacgccgccaagttcctcatggcgcattcggacgccaccctggaacaactgatgcgttacgtgcccggccccgactggcccaccggcggcacgatcatcggccgcgacggcatccgtgaggcctatgccaacggccgtggtacgctcaccacgcgcgccgccacgcatatcgaacatgtcacggcccgcaagcaggccatcgtggtcaccgagctgccgtacatggtgggcccggagaaggtgatcgagcgtatttccgacggcgtgaagaaccgcaagctggaggggatttccggcgcgttcgatctgaccgatcgtcataacggcacgcgtatcgtcatcgagatcaagaccggtttcgacccgcatgcggtgctggtgcagctgttcaagcacacgccgttgcaggacaattttgccatgaacaacgtggcgctggtggagggccgcccgcacacgatgggcctgaaggagatgcttcaggtgtgggttgaccaccgccgtgtggtgatccgccgtcgcagcgaatatcgcaagaagaaggcgttggagcgcctgcacctggtcgagggcctgctgctggccatgctggacatcgacgaggtgatccaggtaatccgcacctcagatgatgcggatgctgcgaaaagccgtttgatggttgtgttcgacctggacgaggtccaggcccagtacatcctcgacctgcgtctgcgccgtctgaccaagatgaaccgcatcgaacttgaggccgaacgcgatgacctgaagaagcgcatcgaggagctgacccgcattctggcctccgccgaagcgctcgaccaggtggtcaccgacgagatggacgaggcggtcgccaagtggggctcgccgcgtcgcaccgtgctgctggacgccgacccggatggcactctgacgccggtcgtggcgcagggcgccggggcttcgggtgtgtccaagtccgcgctcgaagcggtgaaggccgccaccacgatttcctccgccgaagccgatgtggccgcagccgcagccgcagccaagaagaccggcgaacagtccgcgctgaccggagccttgaagatcgaggacgagccgtgcgtggtgatgatgagcgccaccggtttgattgcccgtaccacgccaagcgcgatggacgtgttcaatgtacggtccacatccgatgaacgtctgcgagacgatcaaatcaccacaatcttcgagacctccacgcgcgccacgtacgggctggtcacgtcggccggccgcctggtgctcgcgcatgtggttgatttgccggcgctacctgcttctgccacgttgtcgctgaagggtggggtccaagccgacgaactgatcggcatgaccgaatccaccgatccgattcgtggcgagcgcgtgattacggcgatcgccatggagcagccgacgtccggcaaggccagtgccgaggacgagagcgaggatggtgccgccgaggccaagccgttgccgtcgctggctatcggtacccgtaacggtgtcatcaagcgttggaaccgtgaggcacccaccaccatggattcctggcccgtcattgatctgaaagatggcgacgaagtggtattcgccgccgtggccgaggatgacgaccgtctggtgttcatctcctccgattcctcgctactgacctttgaggcgaagaacgtgcgcccgcagggtcgcaccgcgggcggtatggccggcatcaagctggccgagggcgcccgtgtggcggcattcaacgtggttcccgccggcaaggtggcatggacctatgaggagggcgagaacggtttgacttccggctccggcgcggtggtgctcaccgtggccggcgactccgatgcactacccggcaccgaaaacggcgccgccaaggtcaccccgctggaaatgtaccccaccaagggccgcgctaccggtggcgtacgctcccagcgcttcctcaagggccagaacacgctgattcttgcctgggttggtctctacccgttgcatgcctccacatccgcaggctccccggtcgagcttcccaagcccgatatgcgccgagacggctccggagtggacctcgcctcccccatcgccttcattgcgtaacctcaattaagctccctctgatgggccgagccgtaaagcaaacacccccagtggggtgtttgtaggcgaggagcgaacgatagtgagccaaacacatagagaagagaccctaaacccgacctacactaagcatcaaggaggtggcgatgagactactggttgccgtatccaatgaaccgttggcccgcgccattcgtggtgcgctgcttgcctgtcgtcatgaggtgtccttggcaagcaccggcagtatcgcgctcgccgcggtcaccaaggagccatttgacgcagtgattctcgatgaatccctgctcggcatctccaccgagcaactcatcgaatcccttcacaatgcccgtgcctccgtcaagattctgctgctgacttcgacgccactcagcaaaaccatcggcgaaggcagccgctggcgagcgctgcctgacgagtacgccccgatcgaagagacgccctacagctccttcagcgcggattcacacgcaaacaactcagatgccgaagccgaacagtgcacggacaatgctgccgctagcgcacgagctaatgtacgacacccggatgccgtactgagcaaaccattctccgatggcgaactgctctcatacgtcggctcgcttgccaccgactcccccaccatgatcattcgtggcaatctcacgttggataccacgaatcgcaaagcctactacgcatccacacacaccgcaatttcactgtcccgtctggaatacagtttgcttgaagcactggtcaaggctgatggccagtttgtcaacaccagcgaattggtcaagctcgtcggtggcccattcttcgagcaacaagggctcctcaggaacgccctctacacactggataagaagctcacccacgccggcctcatcatgacccaacgcggctccaactaccgcattcgatagctgggctcaatcagtacagccgcatgcctcggggaacgggggtgaagccggactggtggaggatgcgggcgaaggggtgacgggcgttgaggggttcgccattgatgtcgctgaatgtcacggaaccggtgccattgcgtttgagagcgtaggccagttctgtggcggccttgcgcatttgttcgtcggaatcattggcggcgggttcatggccgaccgattgatcgaacgccgtcaagtgcttggctttggcagccgcgtatagtagcgcaccttgcgcattgagcacgaccgtggctccgatacggcgtgccggtttacccgcaccggcaggcgcgtccggccacgcgatggcggagccactgagatttgcggggtcgagcacactcaatgccaccacggactggccgcgatgctctgacggatgacgcaacgcatccacggtgtcgcgctcggcaaattgggccgcgccgaaaccacggacgaacatgcctcgtaccagtcgaccatgctcctccatgcgctgcaatatcggatacaacgctgagtagccacccgggatattttccttgtcgatcaccggctgcgcgatgacgccatacctgtccagcaacgtctcgaccagtgcgagcgcctgctcggtctgatcagtgtcttcggcttcagcttgcccgattacggcagaccacaaacctcctaacgtcatatccgtagtggctcggtgaatcggagcgacacgcccacgacgacgtgatgtagtggatttacgcgggcttgctgcgcctgcggttaatgcacgcaccggcgcgaagctggaattggtgaccttaccttgccagaccaagctccacaaggcatccttgaactgctgttcgctccactcttgcggaatgatttcaccggtgtttggattgatgtccggctccgcggcctcattccacacacgtttggcggcatccaccagttgacgggcatggaacgctccccctgagtccagtgcggtcagaatcgcttccggcatggtggcgtctgaagcgttcgatgtcgtaccatgttccacaccgctgagcaatattgaatccgccggatagaaagcaacctcaccggggtccatcgcactggttcccccggtttttgagccgacccagaccacatcgccgctggtcagcaactcatccagcaatgcaggttggtagtctcgtactcgtgcggggaataccgccgactcccagagtgcagtgggcagtgctatgccctccagctgctcgataacgcgcatgagcccgtcggcaccttcatatcgttcgccgccgaccggcccgataccttgtcggtcgataagaaacatctggaacgcctctggttctactggcttgactgctttacgcgccttggccaatgagcgagaccgaatgcggcggaatacgtccttatggagccactgttggccttgcttgtcatcatctacaaaatggccttgcagcaactcgcctttggcagccagtacatccaaagtatgcacggcatccgtagcatcgaggtgcagatcggccatgagctgatcggcggtgaaaggaccatgggttttggcgtaacgggtcacgcgaccagtcacatcatcgtcggcaagttcattccagaaagtgcgctcccccagttcctgttcgacttcgcgaatcacgtccgggttgagcacttgtgccatgtcggtggtgccgagcaagcgttcgagcacgtgcggatcgagagacaacagttgcgcgctgcgctcggcctgaggttggtcatactggtacatcaccacgccgacgaagccaaagagaatgttctcggcaaaaggcgatggcggctcggtctccacgtccttcacggtaatggtgccggcttgcaatccggtcatcacctcgttcagggcgggcatgtcgtatacgtcttgcaaacattcgcgcgcggtttccagcagcagcgggaagttcttgaccatacgtgcggcttgcaggagctgtgcggcgcgcagtcgctgctgccataggggcacgcgacggcccgggtcggatcgcggcatgaacagtgatcgggcggcgcattcgcggaatcgtgcggcgaatagcacggactcgcccacttgacgttctacatctgctttgaggtcttctgggtcgaaaaggaacaggtcttgagcaggaatatgtccgtcaccgtccggtagctgaatgacgataccgtcatcggcggcatatacctgcccatcgaaaccgtagcgttggcgcagtctgcggctgatggccatggaccacggttcgtgaacgcggcggccgaaggggcttaacagtacgatgcgccagccgccgtcttcatcgcaggtccgttccacgatgagggtttggtcgctgggaactgtgccggtgatggcttgttgctcggagagtaggcgggccaggttggtgatagcgttggggtctaggccgtctcggtggagacgggtgaggattgttgggatgaaggttgggacagctgggccttctgcggcagaactccccccagtccgcttcacgtctaatccggcggcgatttctcgggtgaagcgggctatggtacggctgaaaccgtagtcacggccagcgccttcaccgtgccagaacggcagacgggcggtgcggcccggagccggagtcacgaccacacgatcacgggtgatttcctgaatctgccatgtggaggtgccgagcgtaatgacatcgcccacgcgcgattcgtagaccatctcctcatccaactcgccgacgcgacgctggcctttgccggcgtccgcctcaggcaggaccacggtgtacagccctcgatcgggaatcgtaccgccagaggtaacggccactttctgcgaaccgggacgggcggaaatcaggccattatcccgattccataccagtcgcggccggaaggccgagaattcctcgctgttgtattcgccggacatcatgccgattacggcatcgaacatgtcacgtggcagttcggcaaacggcgcagcacggagcaccgtggcataccagtcatcagcgttcaaatcgtgcatcgaggcagcggccacggtctgctgggcgagaatatcgagcggattgcgcggcacggccaatggttctatatcgccggcaatcatggcttccagacttgcggcccccgtgacgatttgctgacgggtgagcgggtagaacaatgcgtgagagacgccaccgacctgatgatcggcacgacctacacgctgcaatccggaggagaccgacaacggtgtatcgacttgaatcatcaagtcgaccgagcccatatcaatgcctagctccaaactggaggtggccaccacgcagcgcaattcaccacgcttgagccgttcctcaatcattttgcgacggtctttggagaccgacccatgatgagccatggcgatgacatcatcgccctcatgcgagccgacaagcatggtggtggaaccgaccacagcatcgtaatgtgtggagaacccttcgcggccttccggagagcccggatcccgcacagtgtcgggattggtgccatgccgggtctgtgcatagagatcattgaggcgcgcggtgagcttttcggccacaccacgcgaattgacgaagaccaatgtagtgcggtgcgcgagaatctcatccaaaatactgcgttccaccacgggccaaatggaaccggaggtacggtcgcccgccgctccaaccaacgcggaggaatcgaacgcatcactcgcatcagaatcgtccccagaagtggaagaaacatctctatcatccaccggcacaatgcccctgcgttcggcaagtcgctgcatggccggcgtgacaccgctgatatgcggagcggaccgttcagcctccacgccaccgacacgctgcttggcattcacggactgcaaatcacgcatgttttccaacggctcaatcatgcgcagatccattgcaggccgcccaccgggattcacgatggtaaccggttgtccgccgcccaggaatcgcgccgcctcttcaggcggattcaccgtagcggatagaccaatgcgctgcatatgaaggtcactgaggccagcatcgatggcggtatcactgccctcatcagcatccgcatcgattgcatctcgcttgcgcgattccgcgacaaggttctccagccgttccagacttaccgccagatgtgcgccgcgcttggtgcccgccactgcatgaatctcatcgacgatcaccgtatcgacagtgccgagaatccgccctgccttcgaagtgagcaacagatacaacgattctggcgtggtaacgaggatatccggtggatgggaggctatgcgccgccgctcctgtgcggtggtgtcgcctgaacgagtgacgaccgcgatcttcggcacgggcagcccttgcgcctcgcattgtgcggcaatgccctccaaaggctgttctaggttcttggccacatcggccgcgagcgcctttaacggcgagatatacagcacacgcacaccggcacgccgcgtgcgtggcacggtcatcagccggtcaatggccgagagaaacgcagccaatgttttgccggagccggtaggtgcgatgaccaagacattacgaccggaatggattgccggccatgcctgagcctgtgcctcggtcggctgaccgaaggcatgctcgaaccacaccttggtgggttcggaaaacaggctcagggtttcgtacatatgtacgattataggtcagctgaagtaggcgatgacttcttcggcggtgccgtaggcgctttgggcaccaagcttggtggccgcataggcggagacataggagccgatttgcgcggattgcagcagcgtatggccagcggccaagccagccagcacagttcccatgaacgagtcgccgcaaccggtggtgtccaccgcattgacttgcgcggcggatacgcgatgccaacgtccgttctcgatcaccaccgaccccgacgcaccaagcgtcactatcgcccggtcgaatccgtaatcggtgaatcgttcggcgacctcataccagtcgagtgattccacatcgccgtccggcagacccagtaactgagccacttcatgctggttgaccagcagaatatccgtggcttccaccagttcgtgaggcagctcgtccataaatggcgagtcgttgagcagcacggtcacgccagcgtcatgcgcggtctgtgcggcggcgataacggtggagatcgggctctccaaacacagtcccaataccgcgcattcggcgatggtcgtgcgatgtgattgcacatagccggcacttgccttggcattggaacccggcgaatagacgatggtattctcgccctcagcgctcacggtgattaccgtggtgccactggggccttcaacgtgcaggatatcggcggtgtcgacgccggcctcatccagcttgcctaataggaagtccgcgttggagtcctcgcccaccgcgcccagcaactggacattgacaccgaggcgagcagcggcagacgcctgattcgcgcctttgccgcccggcaacactttcatggcaccaccattgacggtttcgcctggcttgggcagtcgtttggtggtcacggtgtaatcggcgttcatcgagccgaccacgattaccgagcccggcgcatccttcagcgcttccaatcgttcccgtacgggctcgggcatctgtttatgttcttcttcacttatcaccatgggctccaagcatagtaggcggcgggcccaaatgcgcgcatgatcagccgcgcaacttacgaagacgctcgtgcatggccaccatcagcaccaagagcaccagcaaataccacgggtagagactgattgtcacatattgcgcgatgatgccgaacagtggcggcatgagcagtgagcccacataggcacaggccatctgcacgccgacgacggcctgcgatttgtcttcgccgaagtaggccggcgtcgagtggatgacgcacggataaatcggcgcgcacccgaagccgatgaccaccagcccaacgaccacgccaaggtggtgaggcaatggcacgaacatggtgaggatgccggcgagcaccagcacttgaccgaggcgaatcatgaccgggtccttgaatcgcatggtcagaaagccggaaagcgcacgccccacggtgatgcctacatagaataggctggcccagctggcggcggtgatcttgtcgatgccgctgtgcatcaccatgtagctggaggcccacagacccgccgtggattcgatggcgcagtagcagaagaacatcacgaggatttccttggcaccgcgaatggcgagcacgccggccacgccgagcggtttgcgttcagcaacagacgccccttcagcattaccacatccctcggcattgccgtcagatgatgcggcaccatcggtcgattcgccgcccccagtcgtgccacgtttcttccacagcggcaggctcagcaccaggatgacggtcagcatcacctgcaggatcgcgatgtaccgatagccccacggccagccttggccttgagacagcgcatagcccatgatgtaggggccgaccgatgcgccgacgccccacatgcagtgcagccagctcatatgccggctttcgtagtgaatggctacgtagttattgagcgccgcatccacgccacccgcgccaaggccgtacggtatggcgatggccaacagcacccagtaattcggggcaacggagaaacctaccaaggccgccgcagtcaacgccaccgaaacggcggtgaccttgcctgccccgaatttcaatgtcattcggtccgaaagcagcgccgagacaatcgtgaacatggaaatcaccgcggagatgccgccagcccacgccaccggcacgttcagatcctggctcatggtgggccatgcggacccgagtagcgaatccggcaaccccagactgataaacgccacatagatgacggcaagcaacagactggccatgttacatctcccattcacagtacggcaccggttgtgataacgatgtcatcagtctatcgaatgactcatgggcaacacgcataaaacatatgacaacgtgctcacctcaaacgctaattacggaaattctcggtaagcacgatgtcattatcagcgacgtcttcgatcaggtatcgatcttggagcggtcgaaatcgtcggcgttgtcgacgatgaactgcttgcgcggcggcacgtcgtcgcccatcagcaggctgaagatctcggatgcctgggcggcgtcctccatgcggatgcggcgcagcatgcgcgtgcgcgggtccatggtggtgtccgccagctggtcggcatccatctcgcccagacccttgtatcgctggatgtcgtcgttgtaaccgatgtgcttcttgtcgaggtcggccagtttgccggccagctcgtcatcggaatacgtgtagatgtattcgcccttgtgcgagccggtcaacgcgatgcggtgcagcggcggtactgcggcatacacgtagccgtgttcgataagcggccgcatgtaccggtagaacagcgtcagcaacaggatacggatgtgcgcgccgtccacatcggcatcggtcatcatgatgatcttgtggtagcgcgactgttcgatgtcaaagctctggccggagccggcgcccaccacctggatgatggccgcgcattccttgttggagagcatctgcgtaatcgacgccttctgcacgttcagaatcttgcctcgaatcggcagcagcgcttggaaaccggcgttgcgggcggccttggcggtaccgagtgcggaatcaccctcgacgatgaacagttcggccacgtcgtcattgcccggctggcagtcggagagtttggccggcatcgaggcggattcgagcgcgttcttgcggcgcgtgacctccttggccttgcgcgactggatgcgtgcgtgcatttcgccgacgatcttctccagcacgcggccggattgttccttgtatccgcgtttggagccggtgatcatctcgccgaattgcttgtcggtgagccgggtgacgatcggcttgacctgcgcggtgccaagcacgtccttggtctggccttggaactgaggttcggccacgcgtgcggtgaccacggccacgagtccggcttggatgtcgtcgcgctccaccttcatggcggagtccttcatgttcaccttgagcttgcgggcgttgtcttccaccgccttgcgaatctgcttggtgatggcgttcatgaaaccgtccacgtgagtaccgccgccgggcgtctccacgatgttcacgaagctcatgattgtggtgtcgtagccgttgacccatcgcagggcgatgtccacgccgcaggtgcgttcgatttcctgggcgtgcagttcaccgccttcgcccacggcctgggtctcctccttataggtgccctcgccttggatgcgccagatgtcggagatcggctcgcctttggataggaagtcgacgaagtccttgacgccgccggtgtgcaggaattccacgacgcgcgggtgcgcgggctgctcgccgaacgcgccatcgacgacctggtcgccggccgtcagcaagaagtcctcctcggacaggctctcggtactgtcggcttgagcctcggtggagtcgtcgaagagttcggcatcgttgaacgagacgtccaaagccggggcctggtcttgcgcaggttcgactgcgtcggcatcaatggcttcggcggtgtcagtcgccgtttccggtacgttttcgtcaacaatggtgattttgagtccgggcaccaggaagctggtctggcgcacgcggtcgatgagctgttcgtatgagaattcggcggttttgttgaaaatctccggatcataccagtagcgaatacgggtaccagtggttttgggagataccttgccgatgatttccagctcggtgggtcggttcttgcgagtgcgcttgaacggggaatcgggagacggattggccgggtcggcatccgtgtatacgccagggtgaccttggtggaaggtcatgtggtgcgtcttgccgtcacgatccacttcgacgtccagtcgggagctcagggcattgaccacggaggagcccacgccgtgcaggccaccgacggcgttataagacgagttgccgaacttggcaccggcatgcagtttggtcagtacgacctccacgccggacaggccggttttcggttccttatccaccggaatgcctcggccattgtccgcgacttccacggaaccgtcggtgtgcagggtgaccacgatatcgttgcagaagccggccaaggcctcatccacggagttatcgatgatctcccacaggcagtgcataagaccctgcgagtcggtggtgccgatgtacatgcccggacgcttgcgcaccgcatccaagccctcaagaacagctaggtccttggcgccgtattcttctttgggcatacagtcctatttttctcttcaaatgcttggctcccctcacagaggggagccagatgatcattgatccaggaagtcgcgcagggtctgcgaacgggacgggtggcgcagcttggacatggtcttggactcgatctgacggatgcgttcacgggtcacgccatacacacggccgatgtcgtccagcgtcttcggctggccgtcttcaaggccatagcgcatcttgatgacgccggcctcacgcggagacagggtttccagcacctgcttgaactgttcctgcagcagggagaaggccacggcgtcggacggagcgatggcgtcggtatcctcaataaggtcgccgaactcagaatcgccatcctcgccaagcggggtgtgcagggaaatcggttcgcggccgtacttctgcacttcctgcaccttctcaaccggcatgtccagctcgcgggccagctcgtccggcgtaggttcacgccccagatcctgcagcatctggcgctgtacacgagacagcttgttgatcacttcaaccatgtgcacaggcacgcgaatggtgcgggcctgatcagccatggcacgggtgatggcctgacgaatccaccacgtggcgtaggtggagaacttgaagcccttcttccaatcaaacttctcaacagcgcgaatcaaaccaaggttgccttcctgaatcaaatccaagaacagcatgccgcgtccggtgtagcgcttggccagcgacaccacgagtcgcaggttagcctccaacaggtggtccttggcacgtctgccatcgtttgcggcccacttaagctcgcgcttgcgcttgaagtccatctggtcggattcggtgtccagcaagtgttgggcatataga

SEQ ID NO: 1796 - DNA, 5444 bp, Unknown
  MAG_14  MAG No. k141_35616
gtgggcgatacaagattcgaacttgtgaccccttccgtgtcagggaagtgcgctaccactgcgccaaccgcccgggtcatcctcaggctgaatcaatcatcctgaaccagccatccgagagcggacaacgggactcgaacccgcggtctcaaccttggcaaggttgcgctttaccaactaagctatgtccgcatgtgttaccttcacgggcaacaggtgacaaagatacgccaatctcaggaaaaagccaagcccccgcgtgtcccaccggttttccaacgattatcgggtgccgccgtgcacataactcgcggtggccgtatacagcagccaggcgatgggcatggccagcataaacagcgggtagaaccaagcgatgggcacatctggcacggccatggccgtggaaatcaggaacgcatgacgataaccgatcagctggccgaagaggccaaggccctgatcggcgaccgtgccgaagtgaagttcctgaactacgccgacgtgccgttcttcaaccaggacgaggaattcccgaacccgacagccgccgtggccgccgccttcctggcgctcgttgcggagtaatcccgcctgaatcttggttacgttccgcctcaaggcggacggcggaccagctgcatcagcaatgtgccgaacccctctgattgactccaatcagaggggtcgctgcgtttcaaggggctgatttggccttctccggaggtctactcccgtttcaaggggctggtggctgagtagacacgggccaaaaacggcgtaatgacgttagcccggagccgtttatacttgtggtttcccggatgaggagcccctcgaaacggagatagacctccggaacagcccaaatcagcccctcgaaacggagttagacggttgggatgtcggaaagaacactcatgccggcccaagaacccccactatgtcagatatcgctgcccagcacgcaatactgaccgtacagcacgacccgtccttcatgaaatcaggcacggtatgggcttcatccctcaacgcgcgataatggcggtatgacgcaacgacaactgatgcgggccacagtcgaaacgcccatcggccggatgatgatggcctcggacggcgagggcctgaccgagctctgtcttgaagactggtggtgggccaccgaccaccaagccgttctcgactcgaatcgcgaacccgatcgtgaacccgatgtgttccgtatgacccgcgtatggctgaccgcctatttcgccggcgagcgccccggcctagatcagacgccgccgttgcatcccgccggcacgccattccaacatgaagtgtggaatctggtggccgaaattccctatggcatgacggtaagttacggcgaactcgccgccgaattggccgaacgacgcggtggcggccgcatggccgcgcaggcggtcggaggcgcagtgaagcgcaatccggttaccatcatcgtgccctgtcaccgcgtagtcggctcgggccgcgcgtttggcggctacggcggccgactcgacatcaaggccgagttgcttgaactcgagggcgtggatctggcgcgcttcgatctaccgaacccttgaccggcccagcggtccgcctcgtcaaaaggattgagtggttacccctcccgccggcgggagatggcgcgtagcgccggaggatggtcggctggctggcatcgcaacccccgctacccgacaattttcgacaagctgacgggaatcctcccacgaattgttcgccgtcggtgcagtcttgctcgatcgcgccggccaaaaccgtacaatccctacaatggaatgtatatggttaattgctgcgcgcagccgcacggccgcacgcgatcgcaagaccacatggcccaaggggatatgcaatatcaacggaagcaggaggtgcgtatgaccggcattatcgattacgcgcacaccgaaacgcgctccttcgccgacttgccgttcaatgaaatcgacgccttgatcatctccacgctcatctatgaggatgtggccagtatctgtccgacgttgatgctggatgagacgcagtcaggctcgttcgccgcacgcattcgcgctttcgagcccaagcatccactgatctggctgaagggtatctggcatcccgagcttgaatcggtaagccttgacgaggccaaccgcgagctgcatcgttcgccggaaacgcatgccgacgacaagccgcacgaagcccaaatggtttcagtggtcaatccggacctgacccacgacctgttccaggccgcgggcgagaacccccgctacgccaacgttcgtctgggcgcggtggtcgagcacatcaatcagggtgagcaaacccaattcgccgccgccaccttccaactgcccgacggccacaagcgccgaaagccgacctacaaaggcacgttggttatttccttccgcggcaccgatgattcgctcatcggatggaaggaagatttcaatatggctttccagtatccggtgccggcgcaacgttcagccagcgcctatctggatacggtggcgcgactgtgggagggtccgattattctggtcggccattccaagggaggcaatctggcgatttacgcggccatgaacgccgaccccaaggtgcgcaagcgcattcagcatgtctattcactggacggccccggtttcccgccggagattgtgaccagccccgcctaccgcaccatccagccgaaggtgacgaaaatcgtgccaagttcgtcgattgtgggcatgattttcgagaccccggagccttgccgcgtggtctcttccgattcggatggcattatgcagcattccgccttcacctggctattggatggcgaccagttcatcaccgagccggatttgagttccagctcgcagttgtttaacgaggagctgaaccattggatcgccacgcttacgcccgaacagcgcgagcgtgcggtggacgcgctgttcaccgtgctgcacgccaacggcgccaccagcttcagcgaggtgatgagcaacttccccgcttcgattccggcgatgcttggcgcgtatgtagggctgacccccgcagaccggcgtcatttggttgaggccctggcgatactgttcaaggcgtccacggccaaacgcaggccgacgcccgccccggcttccgcgccgagttctgcgaccgccaaaggaacagccgaaaccccagcaggaactgcgacaggaacagatagcgcggccccggccagcgccgataccgacaccgacactgacaccgcagcttcgccctcagcggaggacgcaactgaaatcgccgattagctcatagacatgtccacaaataatagttatactgcccgataagttattagacagcgtgaccatatcacgctggtgcatcaggaggaagagatgccacgtccacgccatgattccgaggtgctgcccgccaaagaacgcctagagaacgctttctgggaattgctcgccgaccgcgactatcgcaagatcaccgtcaccgatgtggtgcgtgaggctggcgtgaaccgtaattcgttctattatcacttttccagcctgcccgaattggccgattcagccatcctgcatcaggtcgaatcgattccgatcaaccgcacccccgacccaaatggcaatcccgaggaacaatggcgagaccgcgtcaccgccacgctctccgatccagagcaacggcaacgcctcgaccgcctggccctgttggcaggcccgcacagcacgcttgaactgaccgaatcgctgcgcgacttctgccgtctgcaaatgctcagcacattgcaacgcgaccccaagaaccttgacctgaaaaccgatctcatggtcgagttcaccgtgggcggcatgctcgccgtgctgcaacgttggcccgaattgagcgacgccatcgaaatcaaagacctgcttaaagaagatgtggccgtgctggccatgggcatatacctggccatgagccaaaaggacatgcttaattactggaatcgcatcttcgtgcacaatgcgcaggattcggccgcccccggcatgcaggccaccgccacgcatgccgcgccatcccccatctcaccgtcgaacggccccgcaggattccccgggtacaccgcttgaccgaaaaccagtgagtctggattgtttccgccgaatgaacccccgcgtgaggtttctcacaaggcgcaatcagcctctcatgctggcgtttccagccctcacacaggaagatggaagcatgagcgaaacatcgaacaaaacccgtctggaacatgactgcatcggccagatggaggtgccggcgaacgtctactggggcattcacacccagcgcgctatcggcaacttcccggtctccggcatcaccgatagccaacatcccgagctgattcgcgcctatgccacggtcaagcgcgcctgcgccatcgccaatgaggaattaggcctgatcgacccggccaaggccgaggccattcgcgccgcctgcctggaaatcgaggccggcaaactggccgatcagttcccggtcgatgtgatgcagggcggtgccggcacctcgtcgaacatgaacatgaacgaggtgatcgccaaccgtgcgctggaaatcgccggccaccagcgtggcgattacacatacatccatccgaacgacgacgtcaacgagtcgcagtccacgaacgacacctaccctgccgcctgcaaactcgcgcttatcgacgcgatcgggccgctcgccgagtccaccaagaaactcgccaaggccttccacgatctggccgacaaacatatcaacgatgtgacgattggccgcacgcagctgcaggacgccgtaccaatgacctatggtcaggaattccatgcgtttgccacgctgttgaagtctgatttggctgcattcgatcgcgtggtgccgctgctggcccagctcaacctcggtgccaccgccatcggcaccggcatttgcgcggatctgcgattccgcaagtccgccatcaagcatctggcgcagatcaccggcttgccggtcaccgccgcgcccgatccggtggccgccatgacggatatgggcgcgtacgtggccacgtcggccgccatcaagagccttgccgtgcacctgaagaaggccgccgacgatttgcgactgctcaattccgggccgcgctgcggtttcaacgatctcaacgtgccggctcgccaggccggatcatcgatcatgccggccaaagtgaacccggtgatccccgaatgcgtcaaccagtgctgcttcacgatcttcggcatggacgtgactgtgaactgggctgtggccgagggccagttgcagctgaacgccttcgacccggtgatggtgcacgagctgttgaccggcatggcgttgctgacgcgcgccatggagacgttccgcgtcaa

SEQ ID NO: 1797 - DNA, 21036 bp, Unknown
  MAG_14  MAG No. k141_35806
cgtggacctgaacaatctggccgccgaacgcggccagacgctggccgagatgagcctggcatggctgctgcacgatggtaaggtgacctccgtgctgaccggagcctccaagcctcagcagattctcgacaacatcggcgctctgaagaacacccacttcagcgacgaggagctcaagctgatcgacgagatttcggctcggtgaccattttggcttccctcgctgaggggagccaagtaccacctttagcgcgtcatttcttcgtagatgcgcttgcaatcggggcaaaccgggtacttggacggatcgtgcttgggcacccagaccttgccgcacagggcgaccaccggacgaccggtcgcgcgtgattcggcgatacggtccttagaaacataatgtgcgaatcgatccgcgtcgccgccatcgtcacgaaccggagactccttggtttccgggcgttccagcaccgacgtgccggcaccttggtccgggttgcgcagcggttcggcatcatcaacgaacatctcggcaaaagtcatggtgcacttctttcctcgtattcaacgattcgactgcactccatcatagattcccgtcgttacccgcgaaacccattggcgcgtaatccgcacacctccacacacccatgtcgcgcatcacgccaccccgccacatacaatgccacataacaatgccgcacacaacgccgcaccgacgccacatacggcaccgcacacactgcctcatacgccgacgcgacaacaatgcacgctcggcagcacgaagcacaccattcgcggtaggctataaggcatgactatcgcagtatgccccggctcgtatgaccccgttaccgccggacacttggatgtaatcgagcgctcggcgcggtttttcgacgaggtgcatgtggtggtggccgtcaacgccgcgaaaacaccgatgttttccgaagccaccagagtcgacgtgatccgccgtgcccttgacaaagccggttgcaagaacgtcactgtttcttccaccgacggcctgatcaccgactactgcaagaaggtcggcgccaccgttatcgtcaagggtctgcgccagaacggcgactatgaagccgagctcggcatggcgctggtcaatcgcaagctcgccggcatcgaaaccctgtttttgccggccgatccgattcttgaacacatctccagttccatcgtcaaggacgtggcccgccatggaggcgacgtgaccggcatggtgcccgattgtgtcgtgccgatgctggccgatgccctggccgaggaacgtcagcggaaggactgatgcactaatgactatgagcgatgaccaccccactggatacgtcgatctgaccaaaccgaatgcggacgccgcatcgtccactccggagccgtccgccccggaaccgcccgcgtctacgcaagccgcgccggcacccaccgaagaggccgatgttctcgccggatcgccgcccgccgcgcctacccctactccggcacagatgcaggccaaagcgcaggcccaagcagctcagcagacccgggcacaagctcagaccgctcaggccgccggcactcgcccctcgttcatgaacgaaatgcccgacctgcgagaaaccacggacgacgacccggccacggtcaagagccgcgaggaattcaccacggtgtatgacatcatcgaccagctcgaggcggcactgggcgaagcgaagtccagcatattcgcccccggcatggtgaaggttgaccgcgacgaattcaccgaccagctttccgagttgaagaaaatgctgccggtgcagttggagcgcgcctccgccctcatgcgcgaggccgagcgccgtctggaatcggcacagacccagtccaacgccatcgtcgcctccgcacaaagccgcgcagccgacatgatcaaggacgccaacgaacaggcacagttcctggccggccaagagaacgtcaccgagcttgcacggcagaaagcgcgcgcgattcttgaccaggcacagaccagagccgaccatctgacccaaggcgcggaccagtactgcactacggtgatggaagggctgtcccagcagctcggcaaactcagtcgggatgtgcaggccggtcttaacgtgctggaagagcgccagcgtgcggccggcgaacagatgccgcacctgacgctgaacgactatcccgaagcccagtaacaccagcaacgccggcaacatcagtaacgcgaataacgccagtaacgaataactccagccaacatacgaaaggcaccaagaacataccatggcacgagttgaagattccccgtgggccattccggtagcgcagattgcttcgcgcgccggtcaatccaagccgattgacgccgatttcccggccccttccggcattggcgacagcatcgtcggcatcaaggatggtgagcccgtacatgtgagcgggcagttcgattcgattgtggacggcctgatcttcaccggccgcctggtcgcgccattcgtcagcgagtgcacgcgctgcctgaagccgattgacgaggactggccggttgatgtgacggtgttcttcccgtatgagtcgggtcaggacaaggccaacggcaagggcggcaagaacaagaaggacgacgagatcgacatcatcgccggcgaggacgagtcggaagacacgtatccgctgctggagaacggcgcattcgcggacatcgaggcgatgatccgcgacacgctggtcgaatcgctgccgttgcagccactgtgccgaccggattgcaagggcctgtgctcgcagtgcggtgccgatctgaacgaggatcccgaccatcatcacgatgtgacggatatccgttttgccggattggcggggctcaaagcccagctcgaggccgagcagaacggcgagcaggccgagtgacgcgcgcctgaacggagtttgtacgagccgtgcgttaagataacggacgcttaagctcaattgttcgaacgaaatagaggatactcaaatggcactgcctaagtacaagacctcgcgcgccaacacgcactcgcgtcgcgcgaactggaaggccaccgctgctgcgaccgtgaactgcccgaactgtggcgctccggccctgccgcacatggcttgcccgagctgcggtaactaccgcggccgcacctaccgctccgccatccagccggctcacaccaagtgagtcctgcgataacggcttgaatgaaggccctgccatcgacgggtggcggggtcttcgcataagtgcaccattacgtacaccatcgcatcgcaaacaacacaacacaacacacaacacatcaccatcgcgtgaaggaccatacaacaatcatgagcaatgaaaccccacagcagccgacgccggccaacgagcttcttgaagcgttgggcaccactctcagcccggatctgctcgtgcaggcactcacccaccgctccttctcgcatgagcaccccggcgtggccaattacgaacgcctcgaattcctgggagacgcggtgctcgaactggtctccactgaaacgctgttcaccattcacccggatatgaccgaggggcaactggccaagatgcgcgccaaggccgtctccgaagacgcgctgagcgccatcgccaaaaccaagctcaaggtgggcccctacattctgctgggtcacggggaaaccgagcagggcggcgcggagaagaactccattctgtgcgacatcgtggaatcgctcatcggcgcgaccttcctggaacacggcatcgacgaggcacgcaaggtgattcaccggcttattgacgacacgctcgccgaagtggccaccgagggcccggcacttgactggaagacctcgctgaccgtcaaggcgcacggcctcggcaaggatgagccggtctaccatatggaggtctccggcccggagtacgcgcagatcttcaccgcgcgcgtctcattgggcgagaacggcgacatcatcggcatcggtaagggctccagcaagcgtaaggcgcagctggcggccgccgaagcgggctggaagtcactggactcgctcaagacgcggactaagtaagcccgctgtcagatttgcgaatagactaataccaacatgagcgacgagtcgtgccggggccacaagtctcggagaagcgactggaatcagacacgcgggcacccggccccatcccaaggtcgggcaggttcgcggcaaaatctatgaggtgagaggaatcatggctttacccacgcctttgcaggcattcagcggcgtgccgaaaatcaacgcggcccccgataagcagaccatcgtcgatggcgagaagatgactggcgcccaagcgctggtgcgttcgctggaggatctcggcgtcgaggacgtcttcggcattcctggcggcgcgattctgcccgtctaccacgagatcaaagacaacacgaagttccgcttcgtgcttatgcgccacgagcaggccgccggccacgccgccgaaggctacgcactggccactggcaaggtgggcgtgtgcatcgtgacttccggcccgggtgccacgaacgtggtcacggccattgcggacgcgaatatggactccgtgcccatggtcgtgattaccggtcaggtgggcgtgcaggccatcggcactgacgccttccaggaggcggatatcgtgggcatcacctacccggtgtccaagcactccttcctcgtgacccgcgcgcaggacattcctcgcgtgctttccgaggcgtactacatcgccaacaccggccgccccggcccggtggtcgtggatctgaccaagaccgcacagaccggcgacatgtactactcatggccgcagcgcatgattctgcccggctacaaccccaccaccaaggcgcacggccgtgtgctgtccgacgcggcgaagctgttctctcagtcgtaccgcccggtgctgtatgtgggtggcggcgccgcccgctccaacgccggcgcacaggtcaaggctctggccgacctgaccggcgcccccgtggtcacgaccctgcccgcacgcggcatcattcccgactccgacccgaagaacctcggcatgctgggcatgcacggtacgattgccgcaaccggtgccgtgcagcgcgctgacctgcttgtggccatcggtgcacgtttcgacgaccgcgtgaccggcaagctcgacgccttcgcaccgaccgcccgcgtgattcatattgacatcgacccggctgaaatcggcaagaaccgtcagcccgacgtgccgatcgtgggcgatgcggctaccgtgctcgacgacttgattcccgaaatccagcgcacgcaggccattcagggcaagccgaatctggccccctggtggaaggcgatcgacggctggcgcgaggaatacccgatgacgtgggatgagccgaccgacggatcaatggccccgcagtgggtcatcaaaaagctctctgagatggccgatccgtccaccatctgggtgaccggtgtgggacagcaccagatgtgggcttcgcagttcatcgatttcgagaaccagcacgcttggatctcctccggaggcctcggcacgatgggctacggtctgccagccgccatcggcgcatccgtgggctcggcccgcgagttcgagggcaagaagccggtgtggctgatcgatggtgacggttccttccagatgacctctgaggagctggccgccgcgttcctggaccacgctccggtgaagatcgcgattctgaacaactccgtgtacggcatggtccgtcagtggcagacgctgttctacgagcaccactactcgcagaccaacctgctcgatggcgaggcgcacggtgccgatggtgcggcggcactggtcgacggcgatgcgccgctcgaagtgcctgatttcatcaagttggccgaggcatacggctgcgtgggtatccgcgcgttcaccgaggaagaggcgattgccgccatcgaaaaggcgaaccagatcaacgaccgcccggtactgattgatttccgcgtgtggaaggatgcgatggtgtggccgatggtagccgccggcgcttccaacgacgaggtgacgtacaagcccggcatcaagccgctgaccggcggcaccccggctccgggaaccggtccggacgagcatgcgaccggcgtgttcgagcacgagaccgccgctgccgctacgagcgagcactgaggagaggagaacacttatggctaactatcctgcatcccagcctggttcccagcgtcatacgctgtccgtgctggtggagaaccgcccaggcgtgctggcgcgtatcgccggcctgttcgcccgtcgtgcgttcaacatcaactcactgtccgtctcccccaccgagcgtccggacatctcacgcgtcacggtgaccgccgacgtggaggccgtgccactggagcagatcatcaagcagctcaacaagctgctgcacgtgctgaagatcgtggagctcgacccgaactccaccgtggaacgcgaactggtgctcatcaaggtggccgccgacgaatccaaccgttccgacgtgctggagatcgtgcgcctcttccgcgtgcgtgtggtggacgtgaatccggaatcgctgaccattgaggccaccggtgccgaaggtaagatcgatgcgctgctggggcttttggagcattacggtgtgattgagctggtgcgctccggtgccgtagccgtgacccgcggtccgcgcgccctgagcgaaaaggtcgtcggttccgaggttaccgggcgctgattcggcgactgcggggagacccagtccaagctcaaagggcggatgtgcatgatgcatatccgcctttttcatgcgtgcatacctcatcacccgtgctgcaagcaaaatgacagcaccttatgctagcattatgacagcaacaaggaggtgcatcatggcaacattgaccatccgaaaaatacccgatgagcagattcaacagctcaaagaagtggctgagaaaaacaaccgctccatggaatctcaggtgcgatccattcttgaagaatggctggccggcacggtggcgcatgaaatcacacgaaagaccaatttctacgacgagatccgcgaattcatgaagaacatggattttgagggactcgacaagggggaactcccactatccgagcgaaattccgccgattcccgaccgccagtatcttttgaataggaatcggccatgattattctggacaccaacgtcatcagcgaaatcatcaagaaacagccagacgaacacgttgccaattggctgaggaaccaagatacaagcaatctggcaaccaccgccatcaccgtcgccgagttgttggtcggaatatgtcgcatgcctgaaggcaaacgacgaaagtacacagatacgaccgtcaagctggcgcttatgacattagaggacaggacgttcgcatttgacacccaggcagctgcggattatgcccatatccttgtcgaacgcgaacgcaggggcacacctaccagtattcaagacgccatgattgcggcaattgcctgttcctgggatgcggccatagccacgcgcaatatcaaggacttcgaaggtaccgacgtggaattgattaatccgtgggagtttgcatagcggtaggccccggcaaactaccgaggccttgtgaacgttacggtttctcccgctactccaattgttcggagagttcgagccattcggcttcgagattatcgctttcagtattgacggcggtgagttgttcattgagcttgttgagaccctcgtagtcgctcgggtcatgggcggccatctgtgcctcaagttcggtcttccgctcttccagtttggcaagcttgcgctcgatggcattcacgcgcttggatgcctcgtggaaggccttgccggtgagcttcgaggtggagtcctcaccgttattggctccctctgacgagggagctgtccgcgaagtggactgagggagagatgcagcaacattgacggcggccgccttacccctaccagacttcgccgagctgctaccggtgcccgcgaagccaggcgtgtcagccggcaatcccttgccgttcttaatagcctcaaccatatcgaggtaatcctgcacaccaccgggcagatggcgtaccttgccgccaatcagcgcgaactgctgatcggtgacgcgctccagcaggtaccggtcgtgggatacgacgatcaacgtacccggccaagtatcgagcaaatcctccatgacggcgagcatatcagtgtccagatcgttgccgggctcgtccatgatgagcacgttcggctcgtcgagcaggatgagcagcaactgcatgcggcgcttctgtccgccggagaggtcgcggatcggcgtcatcaactgggcggattcaaagccgagacgctccatcaactgtcccggcgttacttccttgccatccacaatgtagctcggcttatagcgggaaagcacttccttgatcttgtactggcccagtttctccagctcatcaagacgctgcgagagtacggcgaacttcacggttttgccgatgttcacatggcccacggtcggagtaatcgaaccgtcaatcaacttcagcaatgtggacttgccggcaccgttcgcaccgacgatgccgaaacgatcgccggggccaatcagccaagtcacatcgtcaagaatctcgcggccggaaaccgtcaccttgcgtgcagccgaggtgacaccggccgcagcagtgccatcatccgaattcgttgcagcagtgtcaccgccgatggtttcaccacccgtgttcatgcgacgaacctcgcgatcgtcagcaagctgcggattgccgctctcagcctcggccttcttacgcgcttcctcagcggcctcgacggcttccggcacgccggcgtccaccaggcgcaggtcagtcatgtcggtgaccgccacctcaacggaaccgtgcagctgcggctcggcgtacatggcgttgaccacatccacgcgggaagcggacgcggagagcgccgccacatccgggtcgatatcggccatgccctgcggtttttcgaaaatctgcgtcacgtcgaccaaatcgaccacctgtttgccgaggcgtgaggtggccatttgcttcagttcaagtgtgttacgcatcggcggcacatcggcaataagctcgcgcgcggccttgacatggaacttctgcttggtggaacgggcacgggcaccgcgggaaagccatgcgagctccttgcgggccagattgcggcgcttcgtttcacgcacatccgcttggcgatcgcgttcgacgcgctgcagcatatatgcggaatagccgccctcgaacggctcgatcacgccatcgtggacttcccacatcgattcgcagacctcgtccaagaaccagcgatcgtgggtcacgagtaacagagcgccctggcctttggaccagcggttcttcagatgttcggcgagccagtggatggtgaccacgtcgagatggttggtgggctcgtcaagcgcgagaatatcccaatccttgagcagaagtcgggccaaatcggcgcggcgacgctggccgccggacaaggagccgaccttggcatccagactcatgccgccgagcaatgcctcgacgatttcacgggaagtgttgtcggacgcccattcgtagtcggcgcggccttcgagcgcggcttcgcggatggtggcgttgtcgtcgagcggatcgcgctggtcaagcatgccgaacgtgagtccgccgcgcttcgtcacgcggccggaatccggctcctgggtgccgcggaacaggtgcagcaacgtggatttgccgtcgccgttcttgccgacgatgccgatgcggtcgccctcgaaaacaccctgcgtcacatcagtgaagatggttttggtggcgaaggcgagcgaaacgtgttccagtccaatgtcataagtcggcatgactcaccaatgtagcgccacgcttgcccagcggcggtccacaaacgttatttgttcagcgtctgagcgtaggagttgcagcgggccgcaaaaccggagaacacttgctcggcgagcggatgcagtagctgatcgtattgggcgaactgctcgcgcaattgggacttggacccacccgcggccttgagatccttgaccatgctcggctcatccagccattcgtccagcagcgagccgcacacctcaagatggaactgcatgcccagcgcggatcccagtcggaatgcctgcaccttggtggaagacgaacgtgccagcagctggcctccctcgggcaagcccaccacgtcgttatgccagtgcagcaccgtcagctgcttatcccacatggagaagaagtcatgcttgtccacacgcttgatcggcgcgaacccaatctccggcgcatcgcccttgcgcagctgcgcaccaagcgcagtggcgataatctgatgccccaggcatacaccgagaatcggcttgcctgaagccacggcggcacgcgccaacttggcttccgccttcagccccggatacttgtcgtaatcaagcgcgcccataggcccacccatgattaccacgccagccagttcgccgaaatcaggcaagtccggtttctttttgtcgacgatattcatcgtcaccgtctcaagaccgatgtcttcgaggttcgacaatatgcgtcccggacgttcccatgggacatgttgcaaaatgagcacttgtggtgtggccatgacttctattgtggcacgagcgttccccgtttgcgtaacgagcagggcaaatccatgaatctcgcagtttccgcagcggtcaaagacgtattctcgcgagactgttgtcccgcttctcatccgtctgtcacctcgttcgggccccgcctgtgaagcgttcatcaaactcttcgagtaacgattcagcatgtctggttcggaccctacgcttgagcgttatgggaaacagccaagaaccgcaggatttcaacatttccgtcatgccttcaagcctgacgccggtgcatgttgccaaggccgcagaaggcctgaatctgtatgacaccgcctcgcaccaggtcagccatttcgtgccgctcaagccgggcgaagtcggcatttatgtgtgtggcgccaccgtgcagtcgtcaccgcatatcggccatatccgtgccgccgtggcgttcgacatcgtgcgccgctggtttttgaagctcggttacaaagtcacttttgtgcgtaatgtgaccgatatcgacgacaagatcctcgataaggccgcggccgccggccagcgttggtgggcccgcgcctattactacgagcgcgaattcaccgaggcgtacaacacgctcggcgtgctgccgcccaccgtggaacctcgcgccaccggccacatgtcggacatgatcgacctgattcagcgcattctcgacaacggccacggctatgtggtcacggatgcggacggcaagcccaccggcaacgtgtacttcgatgtggcatcctggccgcattacggcgaactcacccaccagaagcagacttccgaagtcgatgaggccgctgccgtggccgaccgcatgggcccgtccgtggacgccaccggtgccgacaagtacaatccggtcgacccggccgacgcctcccccgacaagcacgacccgcgtgatttcgccctgtggaaggcccccaaggacaccgatcccgaggacgcccgttggtcgacgccgttcggcgtgggtcgccctggctggcacatcgaatgctccgccatgtcccaccgttacctgggcgatggcttcgacattcacggcggcggtttggatctgcgcttcccccaccacgaaaacgagatggcgcagacctgcgcggccggctacccctctgctgcgcgctggatgcattcggcatgggtgaccgccaagggcgagaagatgtcgaagtcgctgggcaccggcctgtccgtgccgagcgtgctggccgagcattccgcttgggtggtgcgttacgctttgggctccgtgcagtaccggtcgatgctcgaatggtccgatcaggcgctggtcgaggcgcaggccgcatacgaccgcgtctcgaacttcatcgaacgagccggtgtggcactgggcggtcagccttctcgcgaggaggttgctgccgtctccgccgacgatttgcccgccgatttcgtggccgccatgaatgacgacgtcaatgtgtctggtgcaaccgccgcgatcttcaccgccatccgttccggcaatacgttgctttcacagctggctgaccgcgccgattccgaaaccgccaaggccgaggtgcgtgaggcgctgctcgccgtgcgtgccatgctcgacaccttgggtctcgacccgctggccgagccgtgggtgtctgctggcggtgccgctgatggcacggccgagtcgcccgaacatgcggcgctggaggcactgattgccgagcagctcaacgcccgcgccgaggcccgcaaggccaaggacttcgccaaggccgaccagattcgcgacgccctgaccgaggccggcatcgccatcgaagacggcccgcagggctccacttggagcctgaagtagctgcttcaaacccatcaatcagtcaaacacgaagtccacgtccacgatgtgcaggcgcttggcgagctccttctccagcgagcgcttgcattcgatgaggtcagctacatcaatggtttcgccgatgccgctcagatacacgtcaacggtgtagttcatgccggtcttgaagatcagcgtctgctcgtagtcggtgttggcaggcagatggcgctgtgcctcggcctccacgtaggcgttggtctcatcgtcgtcatgcacgccgccgaccaattccacgaacgcctctttgagcacgctgaacggctccttgatggtcaatgccaccaaagccacggtgatgaagaaatcgccggtgtagtgcaggaagtcaagcggaccgccggccggtagcagcatcaggaagatggcaaccacgccgatgccgaacgacatcgatccgtcgaccaacgtgctcttgcactcggcggtgagcatggtgctggaatcgccgatggagcggttggagcgccggtaatacatgtataggctgaagcacactattacggtcaggatctcgtagatgaccaccgggccggtttcaatgcgttcgccggacccgaacacgaagtagtcgtacgctactcggcacacgtcaatcagcgaatacaccaacaacgacatggtgaaaatggccttgcagatcgcgtagatgggttccagtgcgaacatgccattggggaagcgctcggtggttcgcaccgtgcgcgacgagagatacaccgccaccattccggacaggacggaaatcgcggtgaaggagaagtcgaggaacatggccttgaggccggtcatgaagaacacggccatgccggctaagacctgcagcacgttgatgacgataccaacgatcagggctttgcgttcgagtagtttttgggtgggcatcagtgggccttccttattgcacggcatgtctgcgttggcccgaacgtcatggttcggagcgcacggcagtctgcgtataagcggtgtccagcgattttcaaaacagcgtaagcattccaaaaaacacaggattctttacggtttccatggtatcggaagcactcgattggcttcgccacgagcggacggcacggcatttgccgtctgaatgcccaacatccctgactactacgcgacgcattccccggaaagagtcgtccccaacaccgcaatttcccgcgtggcggctagactgttgcccattatggcagctttttcatctttgacagacagactctcgaatgcgttcaagcatctgaagagcaagggcaagctttccgaggcggatatcgacggtacgatccgtgaaatccgccgcgcgctgctcgacgccgacgtggcgctcgacgtggtgcgttccttcaccggcaaggtgcgtgagcgtgcactgggcaccgaggtgtccgacgcgctcaaccccgcccaacaggtggtgaagatcgtcaacgaggagctcaccgacgtgctcggccaaggagtcgatcgtccgctgaacttcgcaaagaacccgccgacgatcatcatgctcgccggccttcagggtgccggtaagaccacgctggccggcaagctcggctactggctcaaggattccggccacacgccgctgctggtggcggccgatttgcagcgtccgaacgcggtgacgcagctgcaggtggtcggcgaacgcgccggcgtgcccgtctatgctcccgaaaagggcgtccaatccgatggcggcgaggccgtcgcagctccgggccagacctccggcgacccggtgaaggtggcccgcgattccatcgaactcgccaagcagaagctctacgacacggtgatcatcgataccgccggtcgtctgggcgtggacgaggagctgatgaagcaggcccgcgacattcgcgatgccgtgcaccccaacgaaatcctgttcgtcatcgacgcgatgatcggccaggacgccgtcaagaccgccaaggcctttgacgagggcgtggacttcaccggcgtggtgctctccaagctcgatggcgacgcccgcggtggtgccgcgctgtccgtggcgtccgtgaccggcaagccgatcctgttcgcctccaacggtgagggcctgaaggatttcgaggtcttccacccggaccgcatggcctcgcgcatcctcgacatgggcgacatcatgacgctcatcgagcaggcgcagaagcagttcgatgaggaggaggcccgcaaggccgccgagaaaatctccgaaggctccttcggcctggacgacttcctcgatcagctgcagcaggtacgcaagctgggctcgatgaagtcgctgctcggcatgattccgggcatggcccagcaccgcaaggaactcgagcagttcgatgagaaggaaatcgaccgcaccgaggcgatcattcgctcgatgaccccggccgagcgccgcgatccgtcgatcatcaatggttcccgccgcgcccgtatcgcctatggttccggcgtgacggtttctcaggtgaacgctttgctgcagcgtttcgagcaggccgcgaagatgatgaagcgcatgtccaatcgtggcggcatgggcggcggcatccccggcttcggcggcccggctatgggcggcggcaagaagaagggcaagaacaagaagaaaggcggcaaatccggcaatccgatgaagcgcgaggccgaggagaaggcattgcgcgacaagctggccggcaaatcctccggttcgaccggcggttccgccttcgccaagaagccgcagaacccggccctgcccgccggccttgaacagatgatgggcaacgtcgatggtggcactgaactgccgccgaacctcggcggaggccttggcggactgttcggccgctgatctcacaacttggctcccctcgcagaggggagccaagttatatctcggttcaatttatatttcgaaaggaacttccatgacgacaatcttcagcgcggtggcaatcatcgcactgttatggacggccttaagcgcgctgcccgccggtctcgaggcccgtatgccgcttccgtacatgattgccctgactccgctgctgtgggttcctttgatgattctggccgcggtcgccgcatggcaacatgaatggactgcgatgtcgtcgcttattgtggtcgcgctgattgccagctcacagcgcatcaactactggggtacgtcaatcgacccagccggcaaacgcagagaatcccaccgtgaaacagcccgtgaaacaacttcgccgacgctgtcaaaaagccataacagcaatacatcgagcacctcaaacactccgaaggaaggacccgaaacagtccccgatgggcaccgtgaaacaacgcgtgaaacactctcgccccagttctcggttatgacgatgaattgtcgatacggacgcgccgacgccgctgaaatcattcgcaatattcgcgaacgcaatatcagcgtattggccttgcaggaagtcaccgacgacctcatcacacgtcttaccgaagccgacatcaacgaactcctcccctaccatcagttcggagacgccaaagagaccgataacggcggattcaacgtgatctattcccgctacgagccgagcgcagcggtgcccaacgtggtctccatccctgccgccgacgttcccgccatcaccctcaaaacctccggtaatcgcacggtgacgctttgttcggctcacccgaaatcgccgatgcgcggctgcgcggattggtcggccggcattctgggtctgcgagaactcgcccgtgcaaaatccgtcagcaatcgcaacatcgtcgtcgttatgggcgatctcaactcgagcaccgaccacccgagcttccgcgcgttgctcaagtccggattcaaggacgcaagtctgattcaagccgccggaccgaacctcaccttcccgcgctggctcaagtggccgcgcatcgaactggaccatattctgttcacccaagggctcagaccgtccggcgtgacgtccttcgaagtgccggacaccgaccatctggctttggccgcaacgctcaccctgcggtagcgggcgcggcgatcgatcgggccttggccgtgtggcgcgaagcgggcgggaacgtctggaagacccccgcccgcagccgggtggttcgccgtcagaggtccatggagcggatcagattcaccatttcgatcgcgccctgcgcgcactcggaacccttgttccccgctttggtgccggcccgttcgatcgcctgttcgatggaatccgtcgtcagcacgccgaacagcaccggcacaccggtgtcgaggctggtctgcgcgattcccttcgagacctcgttgcacacgtaatcgtagtggctggtgctgccccgaatgaccgcgcccaggcagatgatcgcatcgtagcgcttgctcttggccatcttcgacgcgatcaggggtatctcaaaggcgcccggcacccaggccaccgctatgtcctgttcgcggacattctcccttttcagggtgtccagcgcccctgccagtagttttgaggtgatgaactcgttgaacctcgccacaacgatgcctatcgtgatgttttcggctaccagatcgccttcgaacgtgtgcatttattcctcctccatgttcaggatatgtcccatgcggtttttcttggttttgagatagaaactgtcgtaagcattggcttcgatttcgattggtattctgtcgcggatctccattccatagtcttccaattgatacactttgtcgggattgttggtcagcaggagcatggaccgtatccccagatccctgagaatctgcgctccgatgtagtactccctcgcgtcaccggggaatcccaacgcgagattggcgtcgagcgtgtccatgccctcgtcctgcagacggtaggccttcagcttgttgaccagaccgatgccccgcccttcctgacgcatgtacagcagcacgcccgagccatgctccgcgatcgtccgcatcgccgcgtccaactgctgaccgcaatcgcaacgcaacgagccgaagacgtcaccggtcaggcattccgagtgcacccggcacaacacatcgttcccgtcgcccagatcccccatgaccagcgcgacatgatgctcgccgttcaacctgttcacatagcagtgcgccgtgaattccccgtatcgcgtgggcatcgccacggtcgagacgcattcgacgagcgtatcgtgcgctttcctgtattcctgcagttccttgatggtcaggagcgggatctgatgctcctgggcgaaccgggtcaagtcgggggtcctcatcatccggccatcgtcgtccatgatctcgcagcacaggccgcattcacgcaatcccgccaaccgcatgaggtcgacggtcgcctccgtgtgcccgttccgttccaggacgccgcccttcttcgccaccagggggaacatatgccccggtctgcggaaatcgaggggttccacgtcatcggagacgcacatgcgagccgtcaatccccgttcttcggcggagatgccggtcgtggtgccacggtaatcgatggacaccgtaaaagcggtttcatggttatcggtgttgtgctcgaccatgggcggaagcatcagcttgtgggccagttgctcgctcatgggcatgcagatcaatcccttggcgtgggttgccatgaaattgacgttccatgtggtggccgactgcgcggcacagatgagatccccctcgttctcccggtcctcgtcatcgatgaccagaacgagcttcccttcccgcagcgcctgcaacgccgcttgcaccgactgatggttcatgattcatgcatcctttctcagaacccgcaccgggacagcagatcctgcgtcagtcccgtccgggtcgtcatcatgttccgcacgtattttcccaatacgtcgttttcgagattgaccacgccgccgacccgtttctcgcccagcaccgtctgcgccaaggtgtgcgggatgatcgataccgagaagtccctttccgtgatctccgcgaccgtcaggctgatgccgtcgacggcgattgagcctttctcgacgatgccttcgagtatctcgtttcgcgccgcgatccggtaccacacggcattgccttcgcgccgcacggaggatatgctgcccgtgccgtcgatgtgcccggtgacgatatggccaccgaaccttccgttcaccggcagggcccgttccaggttgacgccgttcccgcggcgcaatacgccaagcgaggttctgcgccacgtctcattcatcacgtcgacggtgaagcgtcgccggtcgaaatcgacgaccgtcagacagatgccgttcaccgccatgctgtcgccgatatggaggtcctccatcacgttcgtggcgtcgaccgacaacgtgcagttggcggcgctcctccgtatgtccgccaccgttccgacttcctccactattcccgtgaacatgaatacaccacctcgctttccaccagataatcctctcccacccgggagcaggcgcggggccggagcatgacggcgtcggaaggcagggcgactccttggccgcccaccgggcttttcgcggtgccgccgaatatcttcggcgcgatgtacacgtgcgcctcatcgacgatccgctgttcgagggcgctccaattcatcgcgctcccgccttccagcagcacgctgtccatctgcatatcccccaggcgccgcaccacgtccgccagatcgacgtggtcgcccttccttccgacggcgagtatttcgcagccgtgccgccggtagtcctccgccttgcgttcgtcatcgcaggcggtggcgatataggtcctgacgtcattcgccgtctgcacgatccgcgaggtgaggggcgtcctcaatcgcgtatcgcagacgacgcgaaccgggttccttccgtgtgccatgcggcatgtcagcaacgggtcgtcctcgatcaccgtgttcacccccaccatgaccgccgcgacggatcgacggagctgatggacccgacgcctcgactcctcgccgctgatccaccgtgattgattggtatgggtcgctatcttcccgtccatcgtcatggcgtatttcatgatgacatacggcgtatgcgtggtgatgtatttgctgaacacccgtatcagatgccggcactcgtcggccagcacccccacatcgacccgtatgccgtggtcttcgagcatgcgcacgcccttgccggacaccacgggattgcagtccaaggttccgacgacgacccttgcgatgccgctttccacgatcgcctccgtgcatggcggcgttttgccgtaatggcagcacggctcaagcgtgacgtacaacgtcgccccggcgggcgactgcgtgcaatgccgcaacgcgttcctctcggcgtgcaatccgccgaacatctcgtgatatccctgcccgatgatccgatcgtccttgacgatcaccgcgccgaccatgggattggggttcacgtatccggcccctcgcttcgccagctcgatcgcgagtcccatgtactgcgcatcgtccatgtacgcctccaagcatgttgcgcccatacgctatccaaggcatacaaaagaaggttcatgcgaacacgaaaacgccctgaaatgatatggcatcatttcagggcgtacgacaaagcatgaacgtactttcatcttctctcatccagactgtactgtcggctttggaatctcaccaaatcatgccttgcggctcgtgggctgtaccaccggtagggaatcgcaccctgccctgaagatagttattcgttttgcccgtgattgtactcgccgacgctccccctgtcaacggaagcggcctcacgcagcgcccgggccttctgcatcgtctcgtcgtactcgaagtcgaaatcggattccacggtgatgcctccgcccacgccgagcgacgtctcgcctccctcccgcacgatggtgcggatcacgacgttgaaatcgcaatcgcccgtatcggagaaatacccgatgctgcccgtgtacaatccccggggcgcgcgttcgagctcgtcgatgatctgcatggcgcgaaccttcggggcgccggtgatcgaaccggtgggaaacgcggcgcgaaccgcgtccacggcgcaacgatccttgcgcagcgtcccctcgacggtcgcgacgagatggaatacggaaggatacgtctcgatggcaaagtcggggtccgtgccgacggaacccggttcgcagacgatcgacaggtcgttgcgttcgaggtccacgaccatcagcagttcgctgtggtccttctcgctgcgggcgagttcctcgcggttcgcccgatcctcgtccggtgtgccgccgcgcggccgggtccccttgatgggccgcgtcaccacatgccccgag

SEQ ID NO: 1798 - DNA, 5828 bp, Unknown
  MAG_14  MAG No. k141_35996
gcgaacagtgagtcgggaccagctggcggcggccacctcatcgccgaattgcgccacgagttttgccctgagccaggcgcgggtgtcttccggcggttcggtggtggcgcgtgcgatgtcggcggcgctcaccacccgttcggtgcggggttcgagtttggtgaagatgctgtccgcggggtcgagcgccgcccatttcaggtcgatgaccttcagtcgcggatcattccatccgttggccacgccgggtgcggacgttgtggtgattttgcggcgcagtttttcgagcagctgccatttgagcagccattcgatgcggctggcctcgccggtcatggccagacgttcgtcatcatcggcggcatggcggatggaggcgcagtcgatgagcgcctgctgccacatcgccataatggatgtggtggatttgtccggccaggcgggttcgccggcggtgtcggtaccttcgaccagtgcggcaacctggtagacggcttggcgcagtttgagctggataagccatgcgttggtttcgccgccgttggccagcggcaagattgcccccagcgtcaggtcgcgggaaacggtgtgtatggcctcgactgggtcagacagttcgagttcgtcgaggaaggcgttcaggtcgaatccggcctcgtccgcatgttcgagcagccacagcagcatgctcgtggtgccgagtttcagtgcctgcggcacctccatgcgattggcgtcgccgacgatgacgtgcagacggcggtatgcatcggtggagtgggattcgtcgcgcgtattgatgatcgggcgttcgaaggtggtttgcaggccgactttggcgtggatgtagtcggcgcgctggctgagctggtagcccgggatctcgctgttctcgccaatccctacgcggccggagccggcgtagatctggcgggtgacgaagtggagggtcatcaggcgtgtgaccaagtcgaatggcaccgcgcgggccatcatatagttctcgtgcgtgccccagcaggagcccttgccatccacattgttgcgatgcagggcaatgggagtgccagtctgtttgcgggcgcgttcggtggcggcctgcatgatgaggtctccggcgtggtcgtatcggaccgcttcgaacgggtcggtggtttccggcgccgagtattcggggtgggcgtggtccacatagacgcggccgccgttgggggcgatcacgttggtgatgttgagctgcggggcgtcggtgagcatgtccgggcgggcggcggcgcgttcgagacgggtgccgcgcgcgtcgttgaccgggtcctcctgccggtagtcccagcggatggatttgctgtggctgtccgcggcgccgttcaccacgtcgaaggacagttgcaccggattgtagcggtccggggtgttcagggataccgcgtattcggtttcggtgcccatcactcgtttaacggtcatgtagtgctccttgagcttgagctattcggcggtgcggatgcggcggatcgggtccatgccgttgatgcgcgaccattgttcggggtccacgtcggccatggaatcgcgggtctcgcggtattcgtcttccacggcggcagcgagcagcggcacggtgagtgccacgtccaagccggtttcgatggattccttgaccgctcgggtcttggcccggtccacgatgttcttgagcatcgcgccggagaccacgtcggccaggaacaacgcatgccactggccgttctcctcctgcacgtcgcatagatggcggcgttcggaggttccgtagatgtcatgcaccagcacggcggacaaggcgtgcgcgtcgacgccatcttccagaggcaggtcgtcggtgaggtaatggtccacgatggcgatggcctgattggttttgggccggccgacgcgaatcttgacgtcgagacgccccggtcgcaacacagccggatcgatcatgtccacgcggttggaggcaccgattaccatcacattgtcgagtgattccacgccgtcgagttcggagaggaactggggcacaatcgtggtctccacatcggaggagacgccggagccgcgggtgcgtagcagcgaatccatctcatcgatgaacacgaccaccggattgccgtccgcggcgcgttcacgggcgcgctggaaaatcaggcgaatcagtcgttcggattcaccgacgtatttgttgagcagttccgggcccttgacggacaggaacacgcccttgacatgggtttcggccggactgattgcgccgtcgccattcgaatcgtaaccaccctcgcatagggcgttcgccacggccttggcaatcatcgtcttgccgttgccgggcgggccgtacagcagcacgccctttggcggcttcaaatcgtagcgctcaaacagcgcacgatgctggaacggcagttggacggcgtccctgatacgaccgatctcactatccaggccgccgatgtcggcgaacgtgacatccggggtctcctccagcaccagatccttgtcgccctcggcgggcagcacttcgatggcgaggcggacggacggatcgacgataatacggtcgccctgattgatgcccgcatacgcgagcgcgccggaacggcggatgagcacgggattgccggaggcgtcggtaacgatcagtcgaccgtcgtcaagtacctgcttgacactgcgaatctggcccacggtgtcagcatcgcgctgctcgaccagcacgagcttctcgttgagcatcacggtggccccggcggtcaggcgggcggcgttgacgttggaggccacaggcaccaccatgcggcgggtgccggaaatgacttcggccgacgcgtgctggatgccgtcttcatcggtgcgggtggaatcgaccttgaccatggtggcgaaggtgagcggcggctgagcgagctgggcgagctgtgacttcgccttggtcagttccttgccggcgcggctcagcgcttcggcgagcgcatggttcttggccatcaggcgatcgttcagcgcggcgagatcttcggtgtcgctcatgcgggttcttcgcttcccttctatccgggattttcggcaacttatggcagtcggcagaccctattcgttgccgtcggcggatttcctgttacgtataacagtacgcacttttcgcaccacgaaccatacgatgaccacaatcacggccgcgatgaccacgtcctcgaacacgccgagcgcgccttgaatcgagcaccactggtcgccgagcaggtaaccggcggaaacgaggatggtgttccacacggccgagccgagcagggtccagccggtgaagtgcaggaagttcatgcggttgaatccggcgggaatcgaaatcagcgagcgtaccacgggaatcacgcggccgatgagcaccgaccatgtgccgtatttggtgaaccagtcgttggctttgctcacgtctttgcggctgacgccggggattttgtctgccgcgagattgatgcgatgcaggcccacccagcgggagatgccgtacaaggtccaggcacccagtacggagccgatggtggcccagatgattgcgcccggcagactcagggtgccgcgtgcggcggtgaagccggagagcggaaggatgacttcggacgggatgggcgggaagatggattcgagggcgatggccaaggccacgccgataccgccgatggtttccatcagcatgatcagccagtcggtgatggtgccgatcaggccgggttcggtggtggtgcagatgggtgtggggtcggtcgcaagaatagtggcggctgccatggaaaaactcatagagggcattgtcccaaggttttcccagaatcagaggcatgacgcaagaagatgtgcattttgttgacaagtccgccgagagcgaagttgggagcccggctgattctgcggtttctgtgccgacgctgagcaagcccggcctgctggttatggatgtggactccacgctcattgacgaagaggttatcgacgagttgggcgtggtggctggctgcggtgaggagattgccggagtgaccgcacgcgccatgcgcggcgaactggagttctgcgatgcgctgcgcgcacgagtggccctgttggagggcctgccgatctccgtgttcgacacggtgcatgacaagctgcatttcaccaagggtgcactggagcttatcgacacgctgcatgaacacggttggaaggtcggcgtggtgtccggcggcttccatgaagtggtcgatatgctggcggccgagggccatatcgactattggattgccaaccggcttgaggttgccgatgggtgcttgaccggcaaggtgctcggcgaaatcgtgagcaagaccgtgaagctgcacgccttgcaagcgtgggcggaccgtttgggtattccgatgagccagaccgtggctgtgggcgatggcgccaacgacattccgatgattcaggccgccggtctgggtctcgcgttctgtgccaagccaaagacccagctcgccgccgacaaagccatcaacgaccgcgacctaacccacgtgctcgattatctgcgccggtaaaattttaccgacctcggctccggcacttatagttgagccaggactactgcaggcgcagaacagttgacgcttgcggggctggctccccgcaagcggcgtaaacgtgcgcctgcggagcatacgccggccgagcagcatcccatagcgcaagtcgtgttggatgtgcaggcgctccacctcggccagacattcgattacttcattgatgaaaaagacagcgaggccgcacaaccgggtgtgctggtgcgcgtgcggtttggcggtcaaagggtcagcggcgtgatctgggcacgcaccgataccagcgataccccgcgctcttcgattcgctatatcgaacgggtgttgagccccgatgtgctggttcccgcatcgatgcgtgaggatatcggtctgattgccaaagcctatggcggcacacgggccaatattctgcgtttcgctgtgccaccgcgcgtggccaaggtggaggccgaacagcggttagccgcgtcgttccgccgaccggtcggcggctccctaccagataatacgcaaggcggttttgccgggcgtggcaccaatcccgatgggaccatgcctgctggctctacctttgccgttgccagtaccgtttcggagggggctgcgcaggggtatcgtcgtctgaccgccaattacgccgacgtcaatgtgcttcatgatgcgcttaccggtcagcgtttccaatcttttgtgtttgattcgctgcccggtgcacaggagtggcaacggaacatggcatggatggtggccactgcgctgagtgccggtaaagctgccgtggttgaattgcccaccatgcgcgaggtcgaagacctgatgcctatgctgcgcaattatggactcaaaccgttcgccccggcacccgccggcggctgggtgggcgacgtcgccgtgctcaatgcggagaccatgcccgcggccgaccggtatcgcacgtatctggccgtggcgttgggccaggtgaaggtggtgatcggcacccgcgcggtgatgtatgcgccggttgcaggcccggcactgttcgccattctggaggatgccgcctatcagaacatggacggtatgatgccatatccacaggcccgtggcgtgatgcggctgcgctccaagtcccatggcggcgtgttcgtggccatggccaatgcgcgcaccccgcaaagccagtgggaaaacaccggcccggatacggtggagaccccggtgagcggctattccacc

SEQ ID NO: 1799 - DNA, 9795 bp, Unknown
  MAG_14  MAG No. k141_36038
attcgaataggattgaccggtggtattgcggcgggcaaaagcacggtgtccgcaagactgcgggagctcggcgcggcgcttatcgactatgacgagctcgcgcgccgagtggtggaaccgggcggcgtcggtcttcgtcgtatagcggaatgtttcggccccgacgcgctgaccgatcaggggcggctcaaccggcgatggatcgccgagcacgtgttcgccgggcccgactcggaacggatgcggaggaaactggacgatatcgagcatccgttgatctatgatcttgcgctgtcgcgggagcggcaggcggtcgcggacaatccagatgccgtggtcgtgcatgatgttccgctgttggcggaagtcctggacgccatgcccatgcgattcgaccatatcgtcaccgtcgaagcgcccgaacaagtacgggtcgacagaatggtgtcgacccgcggcatgacgcgagatgatgcgcttgcgcgcattcgccaccagtccagcccggaacaacgccgtgtcatagccgacgcggtgatcgattccacgcagccgatggatcgaatgctcgaagccgtcgatgcgctgtacgaacagtggctggcggaatcataatgcgatgatgcggtcggcgagagccgcggtctcctcgttgtgcgtcgtgtagatcacgatcgctccgttgtcggcgaaatcacgcaggtgacgcatgaccatggcgcggttgtcggcatcgagggccgctgttggctcgtccgccagtatgacgcgcagcgattgacggatgagaagcctcgcgattgcgactcgttgttgttcgcctccactgagtgtgtagataggtctattgccgtagcccgtcagattcacggcccgcaatgcgcgtctgatgagccgacttctatctgccgatggtattccgacgctgcgcagagccagaatcagatttctgttcaccgtccattgctccaccagggcgtaattctggaacatgaatcccatgacgttgcggtgcatgagccgtcggccctttctggaggcaattgtttgcccatcataggtaattgttcctgaacttggctcttccaaaagacctaggacattcaacaaagtggttttgccacatccgctttctccagtcagggcaaccatgtcaccgggactgaatgtcaggttcagtccttcccataaggtgcggtcgtcgattcgatatgtcagattatgcgtgatcaataaggcgctcatgattgatgttccttacgtggtaagcggttgctgatacaggtttgtggatggcgatcagggatgtttgatactgtcggcgcgcagccgcgaatcgtaaagcactgtggttgccagcgaaacgacgatgaatagtaaggaaaccgaggtcgtggaaacggcgttgtaacctcctatgagcaactggatcggaagagatgcactgcataacgccgctgctaggaacagtatcgattgaaaacggagatatgacggcgctccatgcatatattccacgaacataatttgacgtcggagtgtgcatagtgtcaaagccaccatgattgcgccgcccagcagacatgttatggatatgcaagctgtgatggaaaaatagttcatttcctgagttgttcgtgccaaacgagtttgtatctcgtcgtgccgattgacgaccgaagccaccaaagagtccacgcccttttcccgtaggatttcgagcagctgatggcgggagctgtaatcgaaggtcatgccgccggtggacaccatcgatgtagtggtatcgccagagagcagtgacgggtcaatgacaacaacaggaacagaggaaaggccatcggtgttggaaggggtgtcaaatgccgataagacagcatctcttggtctggattcaatggagatgctcgtgcgattgatggcgggcagactctttccctcttctgccgccaaactttgctcgaatgagtatgcgcgaagcacattgttcgtaatggattcgctgttccattgttcattctcgggcataatcacactgattcgtgcaagtgtcgtgttgtttcgtataagatgatgaagccttgccgtacgggaatccatgaggatgcagggctgtgggtcttgcgagctatccacccacgtgcatcctagccggaatgaggcgaatcgcgtatgttctgattgggaagtttgttcgacgaagtcgttccatgagggcatggaacgggctcggttttgatcgctgctataccacagttgcaattggaatccgtcgttggatgacaattgatgctccaatgttgttttcagtgtttgggattgccgccatttgaagttcgtaacgttcaaactggcagagctgagagcgagaacgatgattgccatgatgcagccggaagccatgagaaaacgtaaagggcgctttccttggattaatttgagtgcgttcggcaccagaacccttactagagcaatcgacaatgacaaggcaaccaatgccatgcacgttgtggcgatgatgatggagaggaatacctgaccggcgaatcctaagggagaagcgaaaggccagaagatcgcaccaatggaaatccaagtcatccatccgatgcagacgcagatgatgaaaaagaacgcatgccgcaggaattgcctcataataatgccagttgttctcatgccatgcaaggcttgtatcgcgcaaacgcgtgaagctgtcgacacggaaagcgcgccggacacaaatactacagcaagtccggcgaatatgacttgggcgatggaattggagaagaattgtttggtgatttgtgtgatgccgatgggggttgctctgttaagttcgaatccttggcgccgtatggatttggctactgaagcggtatcccgtggtgatccatagagaagccatcttcccaatgggtcggtgaatctgtctccgcgttgcacacgtgtgcgcggcccgaacccataatccgggtatggcgaattcgcatgcatgccgttgccgtctaatgcgccgaaaatagaaattacgcgtctgttggtaccgtgaccgtccggctcataggagactctcgcgagtacgacatgatgggtcgctgcgagaccggtcaatgtcgatagaggctgcccgtgcgcgtcggaaattccaatatcgtagctagggccggagggataggtttcttcgttattctgcgcatagaatcctgctgcgagagtgatgagagccacggccaatatactggcgattttataagtccagtgcatgatacaccttattcccggtaacaatgtgtttgtgcggcggacgataggaagttcgctcgccgcacattcaataaatggtgtggatgctgcgaaatgattcaagcatcaaatccatagaaagcttgatccactttgccgcataccgcgtaagtccttgcggaggcccagattcccgcttccttgacgccgctgtatgcgtatacattatcggcgttcaaaaccgaggaatgatgccgacgggaattgtggaggaaattggagtagacatctccacatccgccccacaaggtggttccatattgccatgttccaccgtagggatatgaaacatcaacggtgctgatgccagcatccctatctgtgggaacgctgcaggagacttttactgaagtaccgacttcattggcgtttgcgggaatgataagtgttccgcttgcgccgagagcaagcattgacgccagtaggcctccggtggttttctttgcgatcatgagtgctccttgttgttcttcattgagcggctgttttgccgcatgcaacacggtaagatgccaatgaggagcgaacgaagtctgtgtgacgggaatcgtcacagtgttacgatttcgtttgacggaggcgatttggggagggggtacttatgaagaacgggcgcctgattcggcttgccttggtggacaacgatcgttgctctgcggagatgatggctttgcttattggcaggacgattcccgaggcgcatatgctatgggttacggataatcccagtcttgccttggaacgttgtctgttcgatccgcggaagccggacatccttatttgcgatctcatgatggacgggctgaacggagtgcggctgacggaacgtattcgacagcggaacgtgcaggttggcgtcatcgtagtcacttcgtatgacctggcaacctatggtgaggatatcgcgtgttgcggagcccaagcgttgatttcgaaaagagatttcgcagcgaccatacgcgaggcggtcaaatcggtgtttgacgggggaacataccctcatggttggggtttgcatagccttgaagagacattgcatacggtggatgccgcacagccggaagcggatggtgccaggctcttctccgatcgagagctggcggtgttgcgtctctatgcacatcatgtaccgaccgttgaaattgcgcgccgcttgggaatcggtgtcgaaactgtgtacagctatgtgaaacgagccatgcgcaaggtcggggtgacgaggcgcggcgaactccttgattactgtgagcgataccatgttctgtgacggcagccgttttcttagacgtcgcttccgcgatttcgggaagtcttggcatggcgagaagatcgcggcgctagcctgcgccttgtgcatagccgctgatacggtcatcgaatcgtgtatcaatccggtttgggatgcgtgggccctgtgggtgggtctgttgttcgtcatcctgtcgttgctctgcgtggcattcccgttcggcggcaatatcgcgttggcgatctcatggtgcgtggtgttccccttgccggtggatctgtccatgtcggtgagcgtggtgatagccgagccattaatcgtcctctcctatcaacgcatatggtgcggcgtggtgttggcggtgactgtgaccgtatctcgcgtggcgcagctgatatggcagtatgggttgccgatgggttgggatgccggggcgttggtgtccgttgtgccttggaccgtcatgccggcgttggcgtgcgttggaatcggtctgctgctgaattggcatcatcgtgagggggagagggagtcggaagcgcgtggcagggccgaatcgttggatttggcggcaaggctgcatgatgcgacgaccaatgatctctcatatctcatcatgagcatcgacaggatcatgtcggaacacccttcgcaaggagagtcgatggacttgccactgttgcgcgaagtggctcaacgggcgctcgatcagacgcatgatgtcatagcggttctcgcaaagcacaatgtcggtactgcgcgaatcccgcgatgccatgcgcgtcgctccggagaagccatcgttccgatcggtgcaggtcgattcgaggccgagatcgaacggcaccggcgggaactcgcaacgcttggtttccgaggcgaggtggttgtgtccgatcccttcgatctcctgagtcggtttgacgagaagactatccagttgacgcggtcgttgctggaagagacgtttgccaatatcgccaagcacgcggatcgcgaacaagggtatgtactcgccatacaagtgcggcaagacggactgtacgtatcggtggctgacgttcccgccaagatggcggatggagcattgacggaatctccgagaacattgggcatgggatttggaatgtctcatctgtgtcaatcaattacgcggagcggtggttggctgcgcgtccaagaggaagacgggtattggagttgcctagcgtatattccgatatatcatcgggatacagcgtgaatcggaaggaaacagcgcatgggattcaacatcgaacgtgtggacaagccgtttgtggtcaaatcgccgtaccaaccatccggagaccagccgaaggccatcgaggaactggccacgcgcatcgagaacggcgagaacgacgtggtgctcatgggcgccaccggcaccggcaaaaccgccaccaccgcatggctgatcgaacggctgcaacgtcccacgctcatcatcgagccgaacaagacgctcgccgcgcagctgtgcgccgaattccgcgagctcatgcccgacaacgcggtgagctatttcgtttcctactacgactactatcagccggaggcctacataccgcagaccgacacctatatcgagaaagactccaacatcaacgacgatgtggaacgtttgcgccatcaggccacggccaacctgctgaccagacgcgactgcgtggtcgtggccaccgtctcctgcatctacggcctgggcactcctgaggaatacgccgggcgtatgctgtttctcaaggaaggccagcagatcaatcgcgacgacctgctgcgccggttcgtggctatgcagtacaagcgcaacgacatcgccttcacgcgcggcaccttccgcgtgcgcggcgatacggtcgaaatcatccccgtctacgaggaactggccgtgcgcatcgaattcttcggcgacgagatcgaccgcatctccacgctgcacccgctgaccggcgacgagatcgacgaggaaaacgaaatccacatcttcccggcctcccattacgtggccggccccgaacgcatggaacgcgcgctcaaaaccattcgcgaggaactcgacgaacgcctggcagaactgcgtaagcaaggcaaggagctggaagcgcagcgcctcaacatgcgcaccacctacgatctggaaatgctcacccaggtgggcgtgtgctcgggcgtcgaaaactattcgcgccacttcgacggccgcgccgccggcaccccaccgcacacgctgctcgacttcttccccgatgacttcctgctggtcattgacgaatcacacgtcaccgtgccgcagatcggcgcgatgtacgagggcgatgcctcccgcaagcgcacgctggtcgaacacggcttccgtctgccctccgcgatggacaatcgaccactcaaatggccggaattcctgcagcgcgtcggccagaccgtgtatctgtccgccacgcccggcgactacgagttgggcttgtccgacggggtggtcgaacagatcatccgtccgaccggcctgctggacccgaagatcgacgtgcgcccggtcaaggggcagatcgacgatctgctcgccgagatcaaggcccgtgtggccaggaacgagcgtgcgctggtgaccaccctgaccaagaagatggccgaggatttgaccgactatctgctggaacgcggcatcaaggtcgaatacctgcattccgatgtggatacgttgcgccgcgtcgaactgctgcgcatgctgcgcgaaggcaagatcgacgtcatcgtcggcatcaacctgctgcgcgaaggcctcgatttgccggaagtatcgctggtggcgattcttgacgccgacaaggaaggattcctgcgctcctaccgttcgctcatccagaccatcggccgtgccgcgcgaaacgtgtccggcgtggtgatcatgtacgccgacgagaccaccgaagccatgcggcaagccatcgacgagaccgaccgccgccgcgccaagcagatcgcctacaaccgggaacacggcatcgatcccaagcccctgatcaagaagatcagcgatgtcaacgacatgctcgccaaggaggatgtggacacccagaccttgcttgaaggtggctaccgcaacgcgggcaaggccggcaacacacacctgggcgtgccggtactcgatcccaacgaggcagacaaacgccacgaggagatcctgaaggccggcctgcccgcgcaggacctcgccgacctgattcgccagctgtccgaacagatgcacaccgccgccgaacaactccagttcgagcttgcggcccgtctgcgcgacgagatccgtgatctcaagaaggagctccggcagatgaccgaggcggggcaatgacccgtcacatacatgggttagtgtagggaatcatggcagaaaccccactcgcatttgaaatcatcaccttcgtggtgctcgcgctgttcttcatcgtcgacctgttcgtcatcgggcgccgaccgcatgtgccctccaccaaggaatgcgtgcagcatatcgccttcttcgtggtcatggcgctgatcttcggcggatgcatctggttcttcgccggctccaagcccgccatcgagttctattccggctggctcaccgaatactcgttgtccatcgacaatctgttcgtgttcgtcattatcatgtcgaacttcgcggtgcccaagcagattcagaagtatgtgctgtccatcggcatcaccatcgctttgatcttccgtggcattttcattctgatcggcgcggccctgatcacccgcttcacatgggtgttcttcctgttcggcgccttcctgatctacaccgccgtcaaactggtgctcggcggcgatgaagacgaggaatatcacgaaaacggcatcatccgtaatctgcgcaagatcatcaagatcaccgacgactacgacggcgagaagctgcgcaccaccaagaacggcgtgcgttactggaccccgatgctcatcgtgttcctgaccatcggcaccaccgacgtcatgtttgccttcgactcgattcccgcgatcttcggcctgaccaaggatccgttcctggtgttcacctccaacgtgttcgccctgctcggcctgcagcagctgtacttcctgctgggtgctctgctcgacaagctcgtctacctgcctgccggcctgtccgtggtgctgggcttcatcggcgtcaagctcatcatggaggccctgcacggcaataccttgccgttcatcaacggcggcgaaggcatccattgggtgccggaagtgcccacatggctgtcgctggctgtgattgtggtcgcaattggcggcgcatccgtggcttccgtgatcaagatgaagagcatggaaagcgccgagaaggcctgaaatcgttagagaatacaacccttaaacccagtcaacacaacaatgtgagcgctcacaacacaccgtgaagaaaacttgtcatgagtcggctcgcgctagtagactgggtttcggcaaatggggcaatcgtgcctcgaaccaaattgaacaagaataggcaggcattcatgcgtaaagccaagatcgtagacaccatcggtccttccaccgaggattacgacaacctcctgaagctcgttgaagccggtatggacgttgctcgtctgaaccgctcccacggcacccccgaggatcacctcaaggtctacaacaacgtgcgcaaggccagcgaagccactggtcgcaacgttgccgcgcttgttgatttgcagggcccgaagattcgctgcggttggttcaagaagaacgccgatggcgaagacaaggttcagctgcagctcggccaggaattcgtcatcaccactgatgacgtcgagggcgacgagcacatcacctccaccaccttcaagggcctgccgggcgattgccatccgggcgacccgatcctgatcgatgacggcaaggtccgtcttgaggtcaccaaggtcgagggcaacaacgtgtacaccaaggtcgtcgtggccggtcctgtgtcctcccacaagggcatcaacctgccgggcgtcgccgtctccctgccggccctgaccgagaaggatgaggctgacctgcgttgggccatccgcaccggtgccgacatcatcgccatgtccttcgtgcgtttcgccaccgacatcgaccgcgcccacgagatcatggacgaggaaggccgtcgcatcccgatcgttgccaagatcgagaagccg

SEQ ID NO: 1800 - DNA, 6687 bp, Unknown
  MAG_14  MAG No. k141_36488
cttccttgaacaggtcgccgacggtcttggacgggtccttgacgaacggctgctcgagcagcacgacttccttgaagaaagcgttgagacggccttcgacgatcttcggaacgatcttctccggcttgccctcggccagggacttctcggtggccacgcgacgctcggactcgaccacatcggccggaacgtcctcgcgggtcagccacttagcgcccatggcggagatctgtagagcagcttcgtgagccacggcggcgccggccttgtcggtggcgatcatggcgacgatgctcggcggcatctcggcggacttcttgtgagcgtagacttcgtcgtgctcgccggagatcttggcgaactggccgaccttgacgtgctcaccgaacagggcggcggcctcctcgacagccagcttgacggtggtgtcgccagccttggcctcgagcagctcgtcagcggagttggcgtcggcgtccacggcgtagccgagaacttcctcggtgaactcgacgaacttcggggtcttggccacgaagtcggtctcggagttcagctcgacggcgtaaccggtctcgccattggcggtctcgacgaccttggaggcgatggtgccttcctgagccttgcggccttcacgcttgccggctgcggcgatacccttggctcggatgatttccttggcgcgggcgacgtcgccttcggcttcggtcagagccttcttgacgtcgagcatgccggcgccggtgtcttcacgaacctgcttgatcagtgcggcggtaattgctgccattgattattctccttgagaaattttgcttacccatgaacgatgggaagcgcttattcaggcacttcccatcgtagagcatcactcggccttgggggcctcggcggtttcgccctcggcggcagccggagcggcggcttcagcggaagcctcggcaggagcctcgttggtcaggagttccttctcccaagcggccatcggctgctcggcggcttcgccctcggccttgttggcgccggagcgctccagcagaccttcggcgacggcgtcagccatcaggctggtcagcagttcaatgccgcggatggcgtcatcgttggccgggatcgggtactcaacggtgtccgggtcggcgttggtgtcgacgatggcgacaaccgggatacccagcttgtgagcttcctcaacagccagggcctccttggtgatgtcgacgacgaacatcgcggacggggtgcggttcatgttgcggataccgcccagctgcttgttgagcttgtccttctcgcgctcgagcaggaggagctccttcttggtcaggccggagccgtgcacgtcggtgaagtccatttcctcaagttccttgaggcggttgacgcgcttggagacggtctggaagttggtcagcatgccgccgagccaacgctcggagacgtaaggcatgttcacgcgggtggcctggttggcgatagcttcctgagcctgcttcttggtgccgacgaagagcacggtgccgttgtgggccacggtggtcttgatgaagtcgtacgccttgtcgatcatgtcgagcgacttgaacaggttgatgatgtggatgccgttgcgctgggtgaggatgaactgcttcatcttcgggttccaacgacgggtctggtggccgaagtgcaggccagccttcagcatatcgctcatagtgatctgagccatggtattactacctttcattgtcggttcttgcctggccatgcgcacctgcgtgcagctgctcccccggtttcacgagttgtgcagccgaccgacacaggccgtcgcgagcatgacgcgaatttgttgtgtgccggttgacaatattgggtggttccggacgccagcgactgcgtccgttgccgggtggcacacaagtttcaaggatagcacggagccggtactaagaaaaacaggctcccctctctgaggggagcctgtcaccgtaggcgactgaggggagttacgggcggtaccggcagaaccaccctcagtctcactacgttcggcggctcccgccagcgggagccgggtatggactacttcgcctgacgattgcgcatgtagcgcagggcttcgcggcgttcttccttttccaggcgatccaaatacacgtggccgtcgagatggtcgcattcgtgctgaagcatacggcccatcagcccggagccctcgagcacgacctcgttgccgtccaggtcgatgccacgcacgcgagcgtagtcggcccgacgggtcttgtaccacaagccgggcacggacagacaaccttcatcgccatactgctcgccggacttctcctcgagtacggggttcagaacgtagccgaccttgccgtcgatgttgtaggagaaggccctcaggctcacgccgatctggttggcggacaggcccgctcggcccggatcgtccacggtttccagcaggtcgtcaaccaggcggcgcacggccggggtgatttccttgatctcatcgcagggggtgcgcaggactgggtcgggcacgaccctgatctcacggatggccacttctcgttactcctcgttcttctcgtcagccggccggtccggcttgctgccggtgtcagcggcattgtcggcattgtcggcggaatcgccggtctcgccctcttcgggttcggccttcgacttcttgatcttctccgacacgctagcaatcgaatcagacacgctggttttcatctgttccgaggcctgtttgacctgttcggacgcctgcttgaccgattcggaggatttcttgacggtctccagcgtgctgtcgatgatcttggctgtggcgggcagcggtttgttggagggcttgggcgcatacagatcctcttcgatgacggtggcgtagcgctgcaataccttgggacgcaccactttcatgctcggggtgagcgtgccgtgctcctgactgaattcctcatccagcaccgcgaatttgcgcacggactcagcgcgggagacattggcgttggcctggtcgatgtactgctggataaaggcacgcaccgcgtcgttgtcgctggcctcggcgagtgtcatgtcggcattgaggccctgaccttccagccaggaatgcagcatttcagggtcgagctcgataagtgcggacacgaacggcttgccgtcgccgactactactgcatgagccacgatcgggcaggtgtcgatgacatcctccatcggggcggggctgatgttcttgccgccggcggtgatgatgatgtccttcttgcgtccggtaatgaaggtgaagccgcggtcgtcgatacgacccagatcgccggttttgatccagccgtcggcagtcatcgtctgtgcggtgagttcgggctgcttgtagtagccaaggaacacgttcgggccggtcagctcaatttcatcgtcttcgccaagacgcacgcccatgccaggcccaggcttgccgaccgaaccgacctcgttgtcgtcctcccaattgacgagcatcggagcggcggtttcggtcatgccataaccctggatgaaggtgatgtcatccatgccgttgaagaagtgggccaaatccacgttgagcggcgcaccaccgcaggccagccatttgaggttcggtccgagagcggaacgaatggatttgcccaccgtggccatgtagaacgaatggcgcatgcgctcgatgaacgaatggccgcggccggcctgctcatccttgctccacttgacgaagtgcttgaccgactgggcgaagatatgcccctggatgccggcaccagccttctgcgaggccgcgttatacaccttctcgaacacacgtggcacgcccagcaggtaggtgggcttgaagctgcggatatcggcgagcagtcgcttggcgtcgggaatgtatccgaccacgccgcagccaccgatgcacacgtactggatgtagcgggcgaagcagtgcgccagtggcaggaacagcagcagacggttgtcgtcgtacagcatgccacgcagaatctcgtagccgttaagcacgatgtgcgtgtaattgcggttggagagcatcgcgcccttgggcttgccggtggaaccggaggtgtagaccacggtaagcagatcatcggctttgatacgagcgatagccgcatccaacgtctcatcggatacgccatgcccgaagtcagcgacagcgtcaaggccatcggccttgaaattgaacacgtatttcatgcccggatgattgacacggatctgctcaagcgtctgtgcgcgctggaagtcgccggcaaaggcgatggcgggatcgacttcctcgacgatgcccgcggtctgacgggcggaatcggtctcatagacgggcacaaccacagcgccgattgccgcgcaagcgaaatcagccacaccccactcatagcaggtaggcgagtaaatcagcaccatggtgccggctttgacgccaagtcccaacaggcccttggccacctcgcgtacgcgggacagcatttcagtagctgtggcgccgcgccattggtgggtgttgtcatcctgccattccgcgatgatgtcatccggcgtgcgaactgctcgtttggccagcagcgagtagacggtgtcgtcatcggtggtgacatatctgggttcttctacatgttcacgcatggtcactactataggcgaaccagcctatgacacggcagaaccgtcttccgctgccagcgtaggaatcggtgtgagggcggggccgtctggtcagcccagatcggcatagatgcacatccatcgagaaccgatgaacttcagtttgaggttgactcgcagattttcctggccgatggtcatgaataccgccatttccagcgtgtccttgccggtgatcatgccgtcgatcaatgtggggacagtgggcagatagcagaatttcgctttgagctccggatgagtgaccatgtgggtgccgagcaggtattgcatggtttgcagccgttccaggcatggttttgtcatggctctgttgagatgtgcgacgctgagtttgccacgtatcgcgtccgccgatgtgcaggcgatgcggcatgcagccatggccatggaatgacattccttcgcattcagcccgcctatgaatgtgggttggatatgataccgcaccgggcgatccgacagctccacaacgatgaatccgtcataactcggcaacggcccgtactgatatgtgccgtggaaaaatcccgaatactccatgatgaccccttcaagcccccttgcaactcaccatcattggcgagcgtttgtactacaacatcacgaaaggcgcgccaagtcaaacgacttgagcgcgccttagggcaagctaagcctcctgcatggagggcaaacccccattttcagggggggtaatcgggattatcgtgcggaatacgggttgaccaccatgccgcaacgctggaagttcttcacgtcgacgtagccggtggaggccatagcgcgcttgagggcgccgatgaagttggtcttgccgtccgcctggtggctcggtccgaacagcacctgttcgagcgggccgaccgtgccgaccgtggtgcggtagccgcgcggcagcgtctgatggcgggcttcggaaccccagtgggtgcccttgccgggggcctcggtggcgcgggccagcggcgcgccgagcatgaccgcgtcggcgccgagggccagggccttgacgaagctgccggagtcgcccatgccgccgtcggcgatgacctgcacgtagcggccgccggattcgtccatgtagtcgcggcgggcctcggccacgtcggcgatggcggtggccatcggggcctgcacgccgatggtctggcgggtggcggagaccgcgccgccgccgaagccgacgagcacgccggccgcgccggtgcgcatcaggtgcagggcggcggtgtagttggatgcgccgccgacgatgacgggcacgtcaaggtcgtagatgaacttcttgaggttcagcggttcctggccagaggagacgtgctcggcggagaccacagtgccgcggatcacgaacaggtccacgcccgcgtccaccacggtggagtagaactgctgggtgcgctgcggggagagcgcgccggccacggtgacaccggcggcgcgaatctcgcgcagacgctgcgcgatgagctccggcttgaccggctcggcatagatctgctggatacgctcggtggcctgatcggccggcagcccggcgatttcgtccaacagcggggtcgggtcctcgtaacgggtccacagaccttccaaatcgagcacgccgagcgcgcccatcttgcccatggcgatggcggtggccgggctggtcaccgaatccatgggggcgccgatcaccggcacatcgaactcataggcgtcgatctgccaagaggtggagacgtcctcggggtcgcgggtgcgacgggtggggacgatcgccacatcgtcgagtgcgtagccgagacggccctttttgcccaaaccgatttcaatttcctgagacatggtttccagcctattgcccgggtgggacgccaacaaggtcgtttcccacggaccggacgattgcttcaagtcgttacaaacatgcgctatgactaaatcatcttcacaccatctatcaggaggaagcatggccaaaatcaaggtcgaaggcac

SEQ ID NO: 1801 - DNA, 6013 bp, Unknown
  MAG_14  MAG No. k141_36896
caggacttcatggtgctgctgcccgagggcacactgcccgccaccggcaacatcatcggatccaacgcagcccacctgcaggtcgtcgccgaccgcaaggccggccgcatctacgcttttgccgccatagacaacctcaaccgtggcaccgccggacaagcggtccaatcgctgaacatcgcactcggcctgccggaagacgcgggcctgaccaagatcggagtagcaccgtgagcgttacatttgcacaaggtttctccgccgccggcgtggcggctggtatttcatccgtcgaaggcaagaaggacttggccctcgtggtcaacaacggcccgctcgacgcggctgcaggcgtgttcacctcgaaccgtttctgtgccgccccggtgcagtggagccgtaaggtcgtcgccgacggtcacgtcaaggccgtgattctgaactccggcggtgccaacgcctgcaccggcgaggccggttacgcccagtccgtcaccaccgcggaaacggtcgccggtctcatcggcgccgaaccgaatgatgtggctgtctgctccaccggtctcatcggtgaactgctgccgttggacaacgtgctggctggtgccaagagtgcccatgaggctcttgccgccaccgccgaagccggcgccgccgcctcccacgccatcatgaccaccgacaccaagccgaaaacggtcgaactgaccggctccaacggctggaagatcggcggcatggtcaagggttcgggcatgatcgccccgcagctggccaccatgctgtgcgtcatcaccaccgatgcggtcgtctccgccggccagatgcaggccgcactcgccgtggccgccgaacattcgttcaaccgcatcgacgtggacggctgcatgtccaccaacgacacggtcctgctactcgcctccggtgcctccggcgtcgaaccggacaaggacgaattcaacaagctggtgcgtgaggcctgcgtctccctgtcccgccagatcatcggcgacggcgaaggtgcctcccacgacattcgcatcaccgtcaccggtgccaccagcgaagacgcggcacttgcctgtggtcgtgccgtcgccgcctcgaacctgctcaagtgcgccatctccggcaacgatccgaactggggccgcatcgtcagctccttgggcactgtgccgcctgaagtcgcgccttacgattcgaacaaggtgaccgtggacgtcaacggtgtgcgcatctgcgagaacggcggcgccggccgcgaccgcagcgaggtcgacatgaccccgcgcgaagtccacatcgacatcgacctgaacaccggctcggacgccgaggccaccgtctggaccgacgacctcacccacgaatacgtccacatcaacgccgactacgaaagctgacaaacagcccagtgggctgtttgtggcagccggcagcgatagcgtcgccggcgtcgcagaaaagagaaaaattggctacagaattgaagggacctgggttccatttcgacgtgcacaccgatttgcgcgccgatcagaaggcagaagtgcttattgaagcgctgccttggctggaggagttcgccggccagcgtatcgtcgtcaaatacggcggcaacgccatggtcgatgaccatctgaagcagtgcttcgccgaagacatggtcttcctgcgtcaggtgggcctgcatccgatcgtcgtgcacggcggcggcccgcagatctcccacatgctcaaggccctcggcatcaaatccgaattcaaaggcggcctgagggtcaccacccccgaggccatggacgtggtgcgcatggtcctgaccggcaaggtgtcacgcgaactggtcggcctgatcaacgcgcacggcccgctggccgtaggcctgtccggtgaagacggcggcctgttctcggccatgcagcgcaggcccatcatcaatggcaagcccaccgatatcggcttggtcggcgatgtggtttccgtcgatgcctcggcagtcgaggatctggtggccgccggtcgtatcccggtcgtctcttccgtggctccgaacgaagaagatgccactgaagtgctcaacgtgaacgccgattccgccgccgcctctttggctgccgctgtgggcgcacgcaagcttgttatcttgaccgatgtggatggtctgtacgccgattggccggacaagaattctctgattggccggatcggtgtggaaaacctgcgcgatatgctgccggacctggaatccggtatgcgacccaagatggaggcctgtgtcagggccatcgacggtggcgtgccccaagcccatatcatcgacgggcgcaagccgcattcgattttgaatgagatattcacctccgcaggcatcggtaccatggttatgcccgatgaaggactggaaatgaggagctcttatggctactgagcatgaggaaaaactaggtacggaagacagcaagtggctgggagagtactctcaggtccacatgaatgtgttcggtacgccgttgcgcgtcatggatcacggccaaggtgcccacatctgggatgttgacggtaacgaatacctcgatttcctggcaggcatcgccgtcaattccctcggatacgcccaccccaagtgggtcaaagcggttgccgatcaggctgccaaggtggctcatatcagcaactatttcgcgtccgagccgcaaattgagctggcatccaaactggtcaagctggctggtgcacctgaaggctccaaagtctacttcggcaactccggtgctgaaggcaatgaagctgccctcaagcttgccaagctgtatggccgcaccttgcctggtgccctgccttccatcggcggcaagcccgcacgcattctcgcaatgactcacggcttccatggccgtacgatgggtgcgctgtccgccacatggaaacccggtatccgcaagccgtatgatccgctggtgccgaacatcgaattcgtgcgcgccggcgacaaggtcgccctgcacgacgcttttgcacagaccggtctcggccgctatggcaagggtccggtggctgctgtgattctggaacttatccagggcgaagccggcgtgcagccgttgggcgccgattacgtcaagttcgtgcgcgaactgtgcgatatcaaccacgcgctgctcatcatcgatgaagtacagaccggtatcggacgtaccggcaagtggttcgcattccagcgtgacgatctgtccggcggcgtgacgccggatatggtgactttcgccaagggcgtggcaggcggattcccgatgggcggcatgatcgctttcggcgagaaacttgcggctctgttcactcctggttcccacggctccacctttgccggcaatccgctgggtgcggctgcgggactcgccactcttggcgtgattgaagacgagaatctggtggccaacgccgaagctcgcggcgaacagctgcgcgatggcattatggccaccggtaatccgctgttcgtttccgtacgcggtcgtggtttgctggacgccgtcgagctcaagcatccctgctcccacgcggtgatgaactactgcctcgaacacgggctcatcgtcaacgcggtggctcccaatgcgctgcgtttcgcaccgccgctgattgtaaccgctcaagacgtggatcaggcacttgccatcctcaaggatgtgcctacggacctgcccgacgactgatttctcgccgtcactgccgacccaccgatccaaggagatcatcatgaccccagaacttcgccacatgctgcgtgacgacgacctcaaccatgaggagcagaagcaggtgctcgaacttgccatcaagttccaccatgaccgcttctacaagcagccgttcgccggtccgcaggccgtcgccgtactgttcgacaagccatccacccgcacccgttccagcttctccatcggcgttgccgagcttggcggctacccactggtcatcgacaagtccggctcccagctgggccgtggcgagcccgtggccgataccgctcgtgtgctcgaccgcatggcttacggcgtggtgtggcgcaccttcggccaggaccgcgtcgaagaaatggccaagtactccacccatccggtggtcaacgccctgaccgatgacttccatccctgccagattcttgccgacttccagaccatcgccgagcaccgaggcggcgtcgacaacctgaagaaccagaccatcgcctacctcggtgacgcggccaacaacatggccaactcctacctgctcggcggtgccgtggccggcatggacgtgcgcgtggccggcccccacggctacctgccccgcccggacatcgtggccgacgccaagcgcgtcgcggccgagaccggcggctccatcctggtcaccaccgatgccaaggaagcagtgaaggacgccgactgcgtgttcaccgacacctgggtctccatgggcgaggaggccgaatacgccatccgttccaagccgttctgggattaccaggtcaacaccgaacttatggcattggccaagccggatgcgctcttccagcactgcctgcccgcctaccgcggcaaggaagtcaccgctgaagtgatcgacggcccgcagtccgtggtgtgggacgaggccgagaaccgtctgcacgcacagaaagcgttgctgacttggttgaccggcaaggcccgtggagacgaaagcctgctcgcatgagtgaaaccggtccgtccctgcagcgccctgccaccagggcggcgcggctgagtgccatagaacaggcgctcgccacgcatatcatcacctcgcaatcacagctgtccaaaatccttatcgacgagggcattgcggtgactcaggcgaccctgagccgcgatcttgacgagatgcatgcggtgaagacccggctgaaggacggcacggtggcctacacggtgggtcgcagcgtcgttgcttcagaaggtgaggatgtaggggagcgcggtgaggcacagatgtcccgcgtgctgaacggactggtcacctcggtggccgccgccggaaatctggttgtggtgcacacgccttccggtgccgcacaatacgtggcctcggtgattgacaggcagccgatcgaaggcgtgctgggcaccatcgccggagacgacaccgtcatggtgatttgcaccaatgacgacaccgccgtctcccgctccgactggctactaagcctcgcttccaaataaccaacacgccgtgcataaatatacagtcctctgtatatacttgcatcagtttgtttttcagaccttgaatgaaagggaaccaatggcagataacaagcgcattgttctggcctactccggcggtcttgacacctccgtcgccatctcgtacctgaaggagcgcaccggcaaggacgtcgtggccgtgtccctcgatgtcggccagggcggcgaaagcctcgagaccatcaagcagcgcgcccttgcctgcggtgccgttgaatcctacgtggtcgacgcccgtgacgagttcgccaacgaatattgcatgaaggccctcaaggccaacgccatgtacgaaggcgtctacccgctggtctccgccatctcccgtccgctgatctccaagcacctcgtgcgcgccgcccaccagttcggcgccgacaccatctcccacggttgcaccggcaagggcaacgaccaggttcgtttcgaggtctccattgcctccatcgacccgacgctgaaggccatcagcccgattcgtgacctgtccctgacccgcgatgtcgagatcgcgttcgccaaggagcacaagctgccgatcacccagaccgagaagtccccgtactccatcgaccagaacgtatggggccgcgccattgagaccggcttcctcgaggatccgtggaacggcccgaccaaggactgctactcctacaccgacgacccggccttcccgccggtcgaagatgaagtcgtcatcgagttcaaggaaggtgtgccggtcaagatcg

SEQ ID NO: 1802 - DNA, 3524 bp, Unknown
  MAG_14  MAG No. k141_37367
cgcccaacgaggtatgggacgaggagatggccaagctacaatcaaaacaagccgacccgaaaccagccgttgcacttacaagttgaatccgggatttttccctcccggattttctcggatatattggttaggcggccggcaacatgcggcgcatcgggaagggagcacagctgatgaaacggatagtggcaggcatcgtggcgcatgtggacgcgggcaagaccacgctgtccgaggcgctgctctaccgtaccggtgagatccgtaaattggggcgagtggatcacggcgatgcgtttctggacaccaattccttggagaaggcgcgaggcatcacgattttcgcgcaccaggcattggtagaacacggcgacctgcgcctgaccttgctggatacgccggggcacgtggacttcgcagccgaaaccgaacgtgtgctgcgtgtgcttgactacgcgattcttgtggtctccggcacggatggcgtgcaaggccataccgagacactatggcgtctgctggccagatacggtgtgccgacgttcatcttcgtcaacaagtgcgacgccgccggatttgcccgcgaggccgtgttggctcagttgcgcaggcgtctgagcgatgcgatatatccgttgccggcaatggaacagtccactgagggcagcgcgctaccgttggacgcgttcgccgaagacatcgccaccctggacgaggaggcgatgaacgactatttggaacatggcgcgctgtccgtgggcagattgcgatcgatgatcgccgtacgcgagctgttccccgtatatttcggctcggcattgaaactcgaaggggtcaaggaattcctggacgggctggagacgttcacccgcgaacgtgaatggccggccgccttcgccgcacgcgtgttcaaaatcgcccacgacggtcagcacaaccgtatgacgtggctgcgcgtcaccggcggtgcgctcaaagccaaggagatcgtctcctcctcgtgcgccgcggcgtcgacaccgtcgccagcgcaggaggatgatgacatggcgtggtccgagaaagtcgatcaggtgcgcatctacaatggcgccaaattcgagacggtcaccgaagtgccggccggcttggtatgcgcggtgaccgggctgacgcagaccttccccggcgaagggctgggaacggaaccggacgccgaatcgccgtcgttgcaacccgtgttgacctacacggtgttgcccgtcggagcggaatccgatacggccggcacctcgggagcggccaaacgtgggggagccggccatgacagcgcgaatcaggacgatgccgagcatgatgccgccaagtcgggaaccggccgcaatgaggagaacgacaccgccggccagaccgcggcggacaatagctcgccggcccgtccccagttcgatgatctgaccttgcacaaggtcatcaccgcattgcgtgagctggaagacgaagacccgttgttgcatgtggtgtgggtggaacggatggccgagattcatgtgcaattgatgggcgcggtccagctggaaatcatccagcagaccctgcacgaccggttcggtctggatgtgtcctttggccccggctccatcctgtaccgtgagaccatcactgcgccgatcgaaggcgcaggtcatttcgagccgctccgtcattatgccgaagcacatatcctgctggaaccaggggagccgggcagcggagtcactgtggcctcggccctgtccgaaaatgatttggaccgcaattggcaacggctgattctgacccacctgaccgagcgtgagcatctcggtgtgctcgttggcgcaccgctcaccgatatcaagatgactttggtggccggccgcgcgcatctgaagcacaccgaaggcggcgacttccgtcaagccacgtaccgggcgattcgccaagggttgatggaagccagggcaggagtcagtggccggcccgagacgccggtcgagagccggccggacaccacaggggagggcaactgccgactgctggaaccgtggtaccggttccggctcgaagtgcccgcagacatgatcggccgtgctatgagcgacatccagcgcatggccggcagcttcgaatccccggtcaccgatgacgaatacgccgtgatcgaaggcgaggcgccggtgtccgaaatgcgcgactatgcgatggacgtgaaccagtacacgcacggccatggccgtttctccgccaccttcggcggctacaagccatgccatgacgccgaacaggtcatcgcagccgccgcctacgatcccgaagccgatctggacaacacccccgactcggtcttctgcgcccacggtgccggctaccccgtcaaatggtacaaagtccccgaattcgcccacgtagactacgtcatgtgaggtggtgactaccaaatctgcggccgaatgaatccgttggcctccaagaaccgttgaatatcgcgcatttccggcatattgatcgaatgggccatgcccggatacacttgttcggtcaacgtgccgtgctcgcgccagaactcacccatcgccgtcacatcggctttcgggaagatgtcgtccgcagcaccatgcccgtagaacacgggcggcttcaacgaagccaattcggcatcgcccgcaacggaccccggtgccagccatccagagcaggagacggctgcggcatatcgcttcggattgaaacgcagcagatgcgcggccaagaggccgccctgcgagaatcccatggcaaccaccggccgagtggcgggaatatgctccgcgacccatgaatcaatggcttgggcggcctcagccgcctgcttgtccaacgattcgccctccggcacaccctcatgcgcccacgagccgaaccacgtatatcccatgccataggcgatgggtgcctgcaaactggcgtaatcagccgaaccggcaccgcaatagttcagcagatcgggcagatcgtattcattggaaccccagccgtgcagcagcacgaacaccggggcggtttcaggaccggtcaaacgggtcaaggccttggcaatcttcatggctcccagtgtagccacgtgaccgccgcgaccgcatttgaacggtccataagcaacccatatagcaacgccgttccattcaagtgtccgatacgttatcgtcgtagacgtgccgcacggggaacggcctcgtgcacagcagccatagagaacaccataaagggggtgcgcaatgaccaggttcaatactcagctcgtccacggactgccggttggagacaacaacaccggagccgtgaacccgccgatctacaactcaacgacatatgccttcgagaaggtcgacgcgatgccccgctacgactatgcgcgcagcggcaatcccacacgtgacttcctggaacagcagatcgcccagcttgagcagggaacgcgcggttttgcgttcgcctccggcttggcggcgattcatgccgtgctcagcattttcaagcccggcgac

SEQ ID NO: 1803 - DNA, 11177 bp, Unknown
  MAG_14  MAG No. k141_37750
aagccctgatcaaaaatgatttccggaggcacgcgcgagtccgagcaggagagcaccgcggcatccgggttctggccatcaagcaacgtttgacgggtctcctgatcctgccatggatggtcgggcttgccttcggcgaatcggcgattgccttggagcatacggctccacgtcgcatttgcggtcgattcctgttcaacgtctgcctgagccatgaaaacctccattatcagcggactgctggtacccatagtagcgattggaagtgcggattcgcgactgcatgcataatctggctttgcccaaagcataatgagaacgctcacaatctcaatcctgtttaagggtgggccgtgatgatagtcagcacaagggctgtggctggtgtgataaggctcatatgttctgtccgtgcgagccctgtgccgccacactacgatgggttctggtaatcgcctgaagaatcctgaaaggaccgaaaatgactcttctgcagcatgaattgaccgatttcaaggtgaacgcattccagaacaacgagttccacgaggtgaccaaggacgatgtgctcggccactggtccctgttcttcttctacccggccgacttcaccttcgtgtgccccaccgagcttgaagacctggccaagaactacgccaagttcaaggaaatcggctgcgagatctactccgtctcctgcgacacccacttcgtgcacaaggcttggcacgacgccaacgagaagatcgccaagatcgagtacccgatgcttgccgacccgaccgccctgctggccaaggatctcgacacctacaacgaggccgatggcgtggccgagcgcggcgacttcatcgtgagccccgagggcaaggtcgtggcctacgaggtcatctcctccaacgtgggccgcaacgccgaggagctgctgcgccgcgtgcaggcctcccagttcgtccacgagcacggcgaccaggtctgccccgccaactggacccctggcgaggaaaccatcgagcccagcctcgacctcgtcggccagctgtgatcgacactgaataggcggtaaccttggctcccctctctgaggggagctgtcgctgaaagcgactggggggagtgctcgcgagagctagcctgatccgatatgcttccctcagtctcactacgacagctcccctcagagaggggagccagtgtatgtaagggagttttcatgactcagaccaacaatctctatgacgtcgtcgtcattggtggcgggccggctggcctgacggccggcctgtacctggcccgcgctcgctaccgcgtgctgattctcgaaaaggacgatttcggcggccagatcaccatcactaacgaagtcgtcaactatccgggcgtgggccgcaccacgggccgcgcactcacccagaccatgcgccagcaggctcaggacttcggtgccgaattcctctccgccgaagccaccggtctcgacgtggatggtgacatcaaaaccgtgcacacctcacgcggcgacctcaagacgttcggcatcctcatcgccaccggcgccagcccgcgcaagctgggcttcgagggcgaggccgagtacgccggccgtggcgtggcctactgcgccacttgcgacggcgagttcttcaccggcaaggaagtactggtggtcggcggcggattcgccgcagccgaggaatccgtgttcctgaccaaatacgcctccaaagtcaccgtgctcgtgcgcgaaccggacttcacctgcgatgccgcagtggccgccgaagccaagaacaacccgaagatcgacgtgcgttatcaggtcgagctgaagggcgtcaccgccggccaaggaggcctgcgagaagcctcgatcctgaaccttgccaccggccagaccgaaacgtggaagcccgccgacgccggcaccttcggcgtcttcgtgttcgccggctatgtgcccgccaccgatttggtgcgcggcgtggtggagctcgacgaccacggttacgtggtcacgcacgactacctcagaacctcggtgccgggcgtgtacgcggccggcgatctgcgcgtcaagaacctgcgccaagtggtcaccgccaccgccgacggtgcgattgccgccgtggaactggagcgttacgccaagcagatgagcgagaaaaccggcttggtgccgccgcgtcccactgcttccgcttatgaggagtccgaggccaaggccgcctccgccgcctcggccgctggcacgacgcccgccccggctcccgccaaacgcagcgccgatgccgcagtcgcagccagcgccgccaagaagcccggcgaactgttctccgccgccatcaagcagcagcttggcgtggtcttcggacgcatgacccgcccggtcacgctcgctctcgagctggacggcactccgctttcggcggaattgcagggtttcatcggcgagatggtcgcgttgtcgaatggcaagctgaactcggtcgccgtcgatgccgcagggctgatcacggcggtggatggtgcttctgtgcctacttctttggtggttggcgagccattggccgtcactttgccggacggcaccgaactgcccacttatggttcgttggacgattccggccgtgccacgttcgacgtcgccggcgtcctgccgctcgcccgtccgaccgtgcgcatctgcgtgccggctgagggcgacggcaaggccggcaaggacggcaatggttcactggtcttcaccggtctggccttccacggcgtaccttccggccacgagttcaactcgttcgtgcttggcctgtacaacgcggccggtcccggccagccgctgggcgatgacctggtcgaacgcgcgaagtccatcacggacccgctgaacatcatgatcctcgtctcgctcacctgcacgatgtgcccggaaaccgtgcttgcttcccagcgcattgcctccctgagcccggccgtgcgcgccgaagcctacgacgtctcgcacttccccgaactcaaggaccagtacggcgcgatgagcgtgccctgcatcgtcatcacccacgccgacggcacccagcaagtcgaattcggcaaaaagagcatcccccaaatgctcgaactggtcggcgcgtaagccgcacgacctcaggtactcaacagcaacaacaacgattctgccaaaatcgtgacgtacatcgattgatgcgatcgatgcgcccgactccggcagaatcgttgttttgcggcagctcagcctcggtcttcgacggccttcgtgacgtttctgtcgccgaggtacttgaccaggctgatgctgatcagggccacaacgaacaggccggtgagcaccgggatgagtgcggcgtagcggtgggcctgatcaggcgcgtgggcaactacgaacgaggccaactggttgccggacagaccggcgaacgcccaggcgctcagcgtcagaccgtgcgtggtggagacggttttggtgccgaagtgctgatcaagcagcacgggcagcgtcgagaaaccgccaccatagcccgcgttgacgaggaacagcatggccagcacggcccacagcagagcgttgtcgatgctgttggtgaagatctgcagcaagcacacggcaatcgacatgatgaagattacctgatagacggtctcgcggcgcttcaggtggtcggagagtgtggagaagcccacgcggccagccgtgttgaacacggagtccacggcgagcaccagtccgatgatgccggagatggcggcggcaaacttggcggggctcaggttggcatactgcgggaaggccttgagcacatcgtgcaggatgtccttctcttggctgatgagggccaggccgcaggtgatgttgatatagaaggctatccagatgccccagaacacgggcttcttgaggattgtcttgcggctgacgtgtgaggtcgcgggatcgtacacccagccggccggacgcttgatgagcaggaagccgacgaacatcatcaccgcgtagaccgcggcgaggatgaagaacatgctgaccaggccaaccgtgccgatgagatattccatcagtgggctggcaatggccttggccaggccgaagccggcgacggcgatgccggtggcgaggcccttgttgtcggcgaaccaaagcatcaggttcttgaccggagtcagataaccgacgcccaggccgatgcccatgatcgcgccataacagatgaacacgcccggcaggaagttcagggcgatgctcacgcccgtgccggcgaagccgaccacgaagcagaccatggagacgagtgcggatttcttgatgtttttctccaccattggcccggcaaacgcggcggacatgccgaggaagaagatggcgagtgagaagccccattccacggaggcggggctggcgtggagacggtcagcgataagctgcttgaacacgctccagcaatagacggtaccgattgggatatgaatcagcagtgcgggaataatcgcgctggtccaacgattctcggtaaaccttgccatatatggacggatcctttcgtaactggtgtacgatgacctgccgacccgaacgagagtcgtatcgcccatatccacgcacatcacgacggcatgcccccgtgaaccatccgggctgcacgaatcgaatcaaatcgaatcgtgcgaactgcgaacaattcgctaaacatccttggtgtgcatttcatcggcgctgctggctcttgtcgacgccgacaaacagaactataacgctgttatggggttgctgtggctggtttctgtggtcggaagctatgagctttctcacatcgaaaacagttatatgacggtatcggcgtgattgatacgtgacgtctgcccgtggacgcggcatatccctctcggaaaacaatgactccgtcatgtccatttcttggtttgacatgttttcgtttgcagcgtcggtgctcaccacggtgaccgcggcgttcgagtcgccgggcagggcctcgaccgagggtctcatcctcggctgagatgtgggcggtactatggattcttatcgataaggttcgtgatatgcggagatggtaacgatggtgaccttaaaggatgtcggcgaactggccggagtgaccgccaccaccgcctccgcggccctgcgaggcaaggattacgtcaagcccgaaaccacgcaacgcgtgtgtgacgccgcccgcaaactcggctacaaaatcaacctgtctggccggtccctgcgttctgggcggtccgataccatcaccttccttacctcgggcctcgagggcgactatttctcccatctggccatgtgtgtggctgaggaagtgcacaagcgcgactcgcacatgctcatcgaactgtcccggtatcttaccgacgacaacgatctgtcgtacacgttttcggacggcatcatcgccatcaatgcgccacgtgcggtcgatatcctgaagcggcacccggccgtcatgctggaaaactacgacaccagcctgcccatcgacaccgtgaacgcgccgagcgacgccggctcacgggcggcaatcgaacaccttatcgcgcgtggctgtgcgcgcatcggcatcgtcggcgacaatcacgatcccaacaatcccaacatcattcccggctcgcgtgatattcgtatgcgggccgccaaggagacgattctcgcggccggactgccgtttgacgagcgccgtgatttcatcaaatcctcgtggtcgattgacggcggtatcgaggccgggcgcggcttggccaagaaaggcaagtgcaagtacgacggtctgtactgcctgaacgacggtattgcgctcggtattctgcgtggtctggcggacgatggcgtaagtgtgccgggcgatgtgcgcgttatcggcttcgacggcctgagccagagcatgtacagcgtgccgactttgaccaccgtggccaccgatttcaagggcatggcggataccgcgctgaccttgcttatgcggcgtatcgagaacctggacgacgagttcttcccgcagaccgtgaatgtgggctataagctcatcgagcgcgaatccactgcggcgtagagtctttggccgtgttgagcttcaattgggtgattggactggcaccagcggctgatatcagatatgccgaaagcagcgatgatcggatttaagttgctggagatgacaggatggattgctctttacccctttcaccatcttgcaataattcttacatgtaagaactctctgttaacatgtaagaattattgcaagatggtgaaaggggatgctcatgttgccggccaaagaaagtttgacggttgagttcaagagtgagcagaagcgccctcaatcgcatgatgaaattgttgacaacgtagtggctctagccaataccgaaggcggcacactgtatctcggtattgaagacgatggcactgtgaccggcgtatgtgacgagcatcgcaatatcaatggacttgcggtactaattttcaataagactgttccgcagcttcccgctcgcgtggcgctcttgtatgagaacgaggtgccgatagtcagtattgaggtggataacagtcagcaaatcgtatctaccagtcaggggaagacattgcagcgccggctgaaagcagacggctcgcctgaggtcgttccgctgtttgtttcccaattcattagccgtttatctcagcaacggttctacgatttcagcgcgcaacctgcaccagaggctcggttggacgatttgaatccagactcacggaacaagttgagaagccatattcgcagtgccaatgcgcaaaactcgttgttgtcttttactgatgaggatttcgatcgggcacttgagctggttgttgatggcccgtatggattgcagccatctgttgctggtctgctcaccattggttcggttgatgctattcatcgatcggttccagccgcatcggctgtttttcaagtgatgaaaggcatgtctccaaaggtcaatatggatccgttcgtgttgcctttggtggatatgtttgatcgtgtaggcgagctgatggagccatggaatcccagccacgaagtcatgagcggcttgattcgtgtcgatctgccagacttcgatcgaggggcattccgtgaggcaatgattaacgctttctgccatcgcgattatgcacgaatgggttcggtgaggttcctggttgatgatgatgggttgaccatagctaatcccggaggattcatagagggtgtttccgaagataacctgcttactgcacaaccgcgttcccgcaatccgcagcttgccctgattctgaaagctgccggatatgttgaacgcaccggacgaggcgtggataccatctatgccgggtcgattgcggcgggtggttctttcccggattattcacagtccagtgctgaggaagttatcttgttcttgcgccgtgtggtacctgacgaggcattcgtgaccatgattggcgacgaggaacgtcgacgtggggctccattgccggtctggtcactgattgtgctctcgctgctgcgtgagcatcgtaggcttaccgtggtccaattgtgcgatttctcccatttggagcatcgacgcatcgtgtctgctgttgagaatctggtggaagctggtttggtagagggggtcggcagtgggagctctcgctcgtatatgctgagtgcccaagtgtacaaacgttcagaggggttggcgtcttacgcgcgtcagcgtgacatcgatgccactcggcgcagtggccttgttctggagttcgccgaaaaaaatgatggtgtcgtcactacggcggatgtcatggatttgtttggcctgagctatatcagtgcataccggttgttgaagaagctagaggatgcgggcaagttgcgccgcgaggggaatgggccgtcatcccgatacgtgttgggatgattggcgcgcgtgaaagtaagttctttcatcacctttcaataattctttcatgtaagaactctctgtttacaagtaagaattattgcaagatggtgaaagatgtacacaaaacggggaagccccgctcacatcgagcggggcttccccatatgcgctggtgtgtagatcagcctgtgttctgcaggccggcagcaacgccggagacggtgcacaggatgaggtagatgaatcctgcctgctggctctgcgtgttttgcttcaatttttcttaagcagagtgagacccatcgtatcgttcgattctacgacgaacgttttgcatcaagcgcagataatgtggtgagtgcatattcaacaatggcggacggtcttgatgcacttggtttgacaaatattggaatgagcgaaagcatcctaaaaaaaggctgccggtacagacaagcttcctgataagcaggaagctgaagtgagtgctcgggcgttcgctgcattcattgatcagccaagacggtagctcgcataatgcattatgtgtgggcagatgtgtcgtctgcccacacattcgctgttgtgctttcgatttggaattcctctgccagatacggggaaacttctaaaaggccgctatgccgaggaagagtcctgtaataccggtggccatcaatacgatgatggtgatgattccggcgaagatgcgtacaggaagggtttcttttccatggtttgatgggctgtccgcaactaatctcattactccagctgtaacccagcaaactgcgcccaggactagtgccaggaattctcgacaccattccgtttcaagtgcgggaatgccgacgattgatgacgggtcgcttgccagtcttggcggaatagcgcataggatacgctccaatatcaggtaaggggtatcaaaatggatcagagtcaaagcgaatgggagctgtagcgccagtcctatccaccacagcgtgcgtcggatggtcgcgagtctgtcgcccggcctagtgtccggcttgccgccttcgccctccgtcccggcaccgtccgcgggcgtgtggtccccctcgtgcgcgtccgtcgttccgtccgtgtccttctcctcattcatatgtcccctttcgatcatccgagtctgtcgctcggcccgcgcgcccgttccacgcgccgtcgccggccagtctagggccgtgcgacgcgaacggggaggcccgcgccgtttatcggcacggaacctccccgttcatcaagcggtcggtcaggcgcggatcagcccgtgttctgcaggccggcggcgacacccgagcaggagtgtcacaaagcccctgccgctctgggtacccaggtggcggtttatgaggacagcatcggtcaactcatcctgcagtggcttcgcaaacctgagtactggtcggaaggaagttccggcacgcaggcactatggcacgcgtacaccccggagccggttactcccagtgaattggccttgtcgcgtcaggcatgcggtgtcgcatgtgatgcacagcctgtcatcaaaggcacgctgcccaatcgggacatcgcccatatggccgccacgtccttgggatacttgacatggggcgttacgaacgatccaatggactatggtctcggtgatctgggcggatgggccctggatttgttgcagatttggggaagctacctggcgaatgccccggaagaggacctggcgtcatggctgcacgctcatctcggcgagcaagacgcccgtatgggattcagttacagcgatgttctcgcggactgtgatgcatggttgctggcgcggtccatgcagagcgattcctccgaaaggtctttgtccaccgctatgcgggacatgttcgcgcaaagcgagacgaatcgaattaaacggttctatcagtcccggttcaagggaagtgcggacaacctggtcatcgcatttcgaaagctcgttgatggaatcgatcttggaatattcgataacgtatccggaagtaaaaaagcactgctcattgcgtcacatgcagaccgactcccgagtcaagcggaggctggtatattggcattatcctatgctgaatctcttgaaaatccgaaccgttaatcaatcatgattgtgatcgcattgcgtggaatgattcagccattccacgcaatgcgcctctgataaaacgtcatagagtcattagagcggaaagtagtgttatcacaagaacgggaaagaccataaccagcacgagaaacgatatgattcccacaaggacatgcgaggcggaagaggaatgatcacgaagttccggatatacagatcgcatatatgaacgcacgccaaagatgacaagcgccgcaatccagcagactacccccataatcaatactaaggtaagtctacgtacatactcagttgccgtagttaaattcatgcacgaagaggaagagaacgttagaactctgcagattatagtatcatcatcgccattggtgccccattccgcccacaaaataagtgctggtgaaagcagcagtaatcccagccaccatagcgcacgcctggccttgcccaaagccacatagcatctactcgccttagggaatttggtagctgctgctttcggtgccaaagcacatttctcgccggaaaaatcttctgacatatcttctgtgccgtgtttcttcccaatgccatcgatcataaccggattcgctttgcaagcgtggcgttcgttcccggcgtcgccctccgccttgatgccgtccgtggacccggtgttcccgcgcccgtccgccggcttgtccatgtcccctccgatctgtcgaggtgcccgttccgcgcgtccgttctctgcgcgcccgcccggcgtgcgccgtcgccggccagtctagggccggatgacgcgagcggggaggcccgcgccgtttatcggcacggaacctccccgctcgcttttgtcgatcggtcggccgggaatcagcccgtgttctgcaggccggcagcaacacctgaaacggtgcagaggatcagatagatgaatcctgcctgctggctttgcgagagctcttccttgtccaccttcttgcgcagcgacttgagcgccagcacctgggtgacggacagcgcgtccacgtacggggagcggatgcggatggcctggccgagcacgtggcggtgttgcagcggccacttgtcgcccacgatgcgctcaagttagtccggtcaatgg

SEQ ID NO: 1804 - DNA, 3850 bp, Unknown
  MAG_14  MAG No. k141_38225
acccgtacggcacccagtggggtccgatgcactggggacacgtctcctccaccgacatgctcaactggaagcgtgagccaatcatgttcgccccgacccttgaagaggagaaggacggcgtattctccggttccgcagtaatcggcgacgatggcaagctcaagttctactacaccggccaccgttgggccaacggccacgacaacaccggcggcgactggcaggtgcagatgctcgcgctgccggacaatgacgagctcacctccgccaccaagcgcggcatgatcatcgactgcccgaccgacaaggtggatcaccactaccgcgacccgaaggtctggaagaccggcgacacctggtacatgaccttcggtgtctcctctgcggacaagcgcggccagatgtggctgttctcctccaaggacatggtccgctgggaatacgagcgcgtgctcttccagcacccggatccggatgtgttcatgctcgaatgccccgacttcttccccatcaaagacaaggacggcaacgagaagtgggtcattggcttctccgccatggggtccaagcccagcggcttcatgaaccgcaacgtcaacaacgccggctacatgatcggcacgtgggagccgggcggcgaattcaagccggaaaccgagttccgcctgtgggattgcggccacaactactacgccccacagtccttcaacgtggacggccgtcagatcgtctatggctggatgagcccgttcgtgcagccgattcccatggaggatgacggctggtgtggtcagctcaccctgccgcgcgagatcacccttgacgatgacggcgacgtggtcaccgcgccggtcgccgaaatggaaggcctgcgcgaggataccctcgaccatggttcgatcacgctcgatatggatggcgagcaggtcatcgccgatgacgccgaggccgtggaaatcgaaatgaccatcgacttggccgcctccactgccgagcgtgcgggcctgaagattcatgccactaaggacggtgcctacacctacgtggcttatgacgaccagatcggccgcgtggtggtggatcgtcaggccatggccaacggcgatcgcggctaccgcgccgccccactgaccgacaccgaactggcctccggcaagctggacctgcgcgtgttcgtggatcgcggctccgtggaggtctacgtcaacggtggccaccaggtgctgagctcctactcctacgcctccgaaggcccgcgcgccatcaagctcgccgccgagtccggtagtctcaaggtggattccctgaagctccaccacatgaagtccatcggactggagtagctctctcacctccctcacagagggaggttttttgtgtgcccctgtcgttcgccttcgcctatactgatggacggcatataacacaatccatcacacgaccggcaggcgcgcaggctcctcaccttactgttccacgccccggccgcaagcgccaccagcaaaccggactggcgcggaaagcaaggtgacatcccatgtccatcgccaagcgcctcaagcgccgcatgcccaccgtcatcgccgtcatcgtattgctggcagtctgggaaacgtgggtggatctaggacatgtctcccccacgatgatctccgcgccaagcgagattttcgccgccaccatcgaaacgtggaacacgctcggcccggccgcggcgatcaccggctatgagggcgtggtcggcttcctgttcgccgtgttcttcggcattatgatcggcatcgcactgtactgctcgcacacgttcaacgcggcgttctatccgctgcttgccgccgcacaaaccatgccgctgatttccatcgccccgttgttcctgatttggttcggctttgagatttccggcaaaatcgtaatcgtggcggtattcggcctcttccccatcgccgtgcagaccgtgcgcggactagaagcggtgccccagttctattccgacgtcgcattgacctgcggcgcgaccccggtctggacgctctggcacgtgaagctgcgcgttgccgcacgtcagatctatggcggtatccgcgtatctgccgcatacatcttcgccacggcatccaccgctgaatatcttggcgcgcgcaagggcctcggcatctggctgcaggctgcctacaattcgttccgcacgccgctgatcttctccgccaccatcgtcattatcctgatgacatgcgtactgatgctggcggtgaacgccagcgagcgcatcctgctcggcccggccggcgatgacgaagaccccgacgcggaccagtagttctttttaccgtcaaagacacaagccggcggccagaaccgactgaacggggcggcttctcatgaggtctccagccctgtctctataatggaacagctttaccagcgtgtggcaaaccggctttcttgagctttcatagggaatgtcgggggcgctggtcgaacggaaatcaaggccctccatatcgttttctgccgacttccgttcgaagcaatcccagagaacgatagagagacaacgaattagggaaccatcattatgaagaaaagccttgtatccaaggccgctgccctcgtgggcgcccttgctatgactttcggtttcgccgcatgtggtcagaccaacaccgccgactcctccaactccaacacctccgacctcaagaaggtcactttcatgctttcctgggcgcccgataccaaccacatcggcgtgtacgtggccaagaacaagggctacttcaaggacgccggtcttgacgtggatatcgtggccgtggcccaggccggtgccgaacaggccgtgaacaacggtgtggccgacttcgccctgtccaacttgaccaatgtgggcatctacacgctgaagggcgctcacatcaagcaggtgctgcaggtgcagcagaagccgagcgccatttggtgcgcactggcgtccaacaccgccatcaagtcccctaaggatttggatggcaagaccttcgccaccttcggctccaacgagtccgacgccgtggtgcgccgcatgatccagaccgacggcggcaagggcgagttcgacaaggtgaccgtcggcacctccaccttccagaccatggaatccggcaaggccgatttcggcggcttctacgccacgtgggaaggcgtgcaggccgacatgtacggcccgaagctcaactgcttcaccgagcctgactacggcgtgcccggcaacgccgacgccatcggcatcatcaccaacgacaagaccatcaagaacaatcccgacctggtcaagaagttcactcaggccactcagaagggttacgagtacgcgtacgccaacccggatgacgccgcgcagattctcgtggacgaagcccctgacgccaacctcaagcccgaattcgtcaagaagagcatgcaggttatcgtcgacggccagtactggggcgatccggccaagatcaaggacggctctttcgtgctcggcaccaacgacttcaagggcactcaggaatacttcgacttcctggctgaagaagacgcctacactgacagtcatgacaaggtgattcatgaggccccgcaggccaaggaccttggcaccgacgaattcctcggcaagtaatttccgatattccgagtttgaatctacgcaaaaatgcgtccttcccatgaggaaaggacgcatttttgcgtatcggccgataaggttattcatagcgaatcatgctaacaaggaggcgattccatggcccaacgtcctgaccgcattattgccagcatggataccggtgttgatgatgcgttggcgttggcgtatttgttg

SEQ ID NO: 1805 - DNA, 8853 bp, Unknown
  MAG_14  MAG No. k141_38836
gcccggcaccgacgaggaatggcaccagtactggatcgacgcccgcacccgctggtacatcgacctcggcgtcaagccagagaacctgcgccactacgagcacccgaaggagaagctctcccactactccaagcgcaccgtggacatcgaatacaagttcggtttccagggctccgactggggcgagctcgaaggcattgccaaccgtactgattacgacctgaccgcgcactccaagcactccggcgaggatctgtgctacttcaaccaggccaccggcgagaagtatatcccgtacgtcatcgagccggcagctggcctgacccgctccctgatgtgcttcctcgtggacgcctatgacgtggacgaggctccgaacaccaagggtggcgtcgacaagcgcaccgtgctgcgtctcgacccgcgtctcgccccggtcaaggccgccgtgctgccgctgagcaagaagcctgaactgcagaccgtggcccagaacctggccgacgacctgcgcttcaacgaatggatgatcgactacgacgagtccggtgccatcggtcgtcgttaccgtcgtcaggacgagatcggcaccccgctgtgcatcaccgtggacttcgacaccctcgaggaccacgccgtgaccatccgtgagcgtgacaccatggcccaggagcgcgtcgctcttgacaaggtggccgattacgtggccgcccgcatcggcgagaagcgcacccgcgtgcccctgaagcccgtggaaatgggcggcgaggcttggcctgagtccggcgttcaggaagccggcggtctgtactaaagacgggtctgtatagaggctcccctctatgaggggagctgtctacgaagtggactgagggggctcttgctgaggcgactcccctcagtcgcctacggcggcagctcccctcaaagaggggagccaaaactatttcagaacaggaaccacatggcagaatctgaaaccgaaaccaccatcaccgctactcacgagaccaacaatctcgacccgcgtacggacgcgccggcacggcccgagactccggtatacatcgcccccgtgcagctcggcaacattaccgtgccgaccccggtggtgctttcgccgatggcgggcgtgaccaactggccgttccgcgtgatctgcgaggaatacggtcccgatggtctttacgtggccgagatgatcaccgcgcgggccctcgtggcgcgcaacccgaaagccctgcgtctctgccatttcgccaaaagcgaaaaaattcgttcgctgcagttgtatggcgtgaatccgtccatcaccgaacaggcggcgaaaatcgtggtcgacggcaacatggccgaccatgtggacctgaacttcggttgcccggtacccaaggtcacccgtcgcgggggaggctcggccctgccatggaaaaccgacatcttcaccgagctcatccagcgcgtggtcgccgtatgcgagccggcgggcatccccgtcacctcgaagatccgcgtcggcatcgaccataaccatgagaccttcctcgaagccggacacatcgcgcaggaggagggctgcaaggccgtaaccctgcatgcccgcaccaccgccgaatactatggcggtcattccgactggtcccgcatcggcgagctcaaggaacacctcaacattccggtattcggcaatggcgatatctggggcgccgaggacgcgctcgaaatggtgcgcgagaccggctgcgacggcgtggccatcggccgcggatgtcagggccggccgtggctgttcgccaacatcaaaaacgccttcgagggcaatcccgaacggctcaacccgaatctgggcgaggtctgccgggtgattcaccgtcatgccgagctgcttaccgagttctatgagggcgatgagatgatggccgtccacgatctgcgcaagcacatcgcctggtatctgaaagggttcccggtgggtgggtccacccgcaaggcctttatggaatgcgagagcctggccgatgtggaccgcgagatcggcaagctcgacccgaccatcgaatacccgccacgcgtggtcgacaaaccgcgcggccgcgtgcgtttcgccaagaaggtgcacttgccgtatgggtggttggaatcgcgtaccaccacccacgaagagcgtgaggcgctcttcggtgacgacccaatggacgccagttactgaaaaaatactgaaaatacacgcaacacgcgccattctgcgcgtgaatttccctccaagagtagcctgtttgcgctactcttgggtgtaaccgtgaagtgacaggagccaaacgtgagcgagatcgcgcagaatgagttcaacgacaagaccaacatcaaggttgttggcgtcggcggtgccggcggtaatgccgtcaatcgcatgattgccgagggactgcagaatgttgaatttgtggcggtaaataccgatgcgaaggatcttctgcgctccgacgccgacgtgaaaatctccctgtccgatcagtccagccgcggactcggcgctggcgcggacccggagaagggtgctaaggccgcacaggatcatcagtctgatatcgaggaatccctgaagggtgccgacatggtgttcgtcacctgcggtgagggtggtggcaccggtaccggcgccagcccgatcgtcgctcgtgcggctcatcagcaaggtgctctcaccatcgcggttgtcactcgtccgttcagcttcgaaggtcctcagcgttccgcttccgccgaatacggcatcgacaacctgcgcaaggaagtcgacgcgctgatcgtcatcccgaacgatcgcctgcttgagctttccgaccgttccatcggcatcatcgaagccttcaagacggccgataccgcactcctcgccggcgtgcagggcatcaccgacctcatttcgatgaattcctacattcacgtcgatttctccgacgtgaactccattcttcgtggcgctggtactgcgctgttcggcattggttccgcgcggggcgaagaccgcgccacccaggccgccgaaatcgccatcagctccccgctgctcgaggagagcatcgagggtgcccacggcgcgttgatcaacattgccggcccgaccgatctgaagctgcaggaagcttccgccgccaccgagcttgtacgcaaggccattcaccccgaggcccagatcatctggggtcttgctctggacgatgcctatggcgacgaagtgcgtgttaccgtcatcgcggccggtttcgatccggttacaccgcaggatccctctgccgccgctccggcaattgccgtaccggccgcccagccggctgccacgcaaacgcagcagcccgccgccgctccggccgcccagcccgtggccactccgcgtccggaattcaccccgacgaccgcagacccggcatccctgccctttgacgatccgactacctcgcatccgaacatcgccgtgaacgatcccgccggcgatctcgacattcctgatttcctgcgctgaaaggactgatccatggctgggttcatgaaaaacgcgatgtcctatctgggcatgagcgacgttgtggacgatgaggacgactacatcgaagaggacgaggagcagaagccggctccgaagtccgcattcgattccgaccatacggtcacgccgctggcatcaaccaccgcgcctgccgcatcgtcgactaccaagccgttccccggtggtcgcgtgaacagaatcaccaccatccatccgaagtcatatgaggatgctcagctggtcggtcgcgcattgcgtgacggtgttccggtcgtactgaatctcaccggtgtggccgaagccgtggcatatcgcattgtggacttctccgccggcgtggtgttcggcgtgcgtggttccctcgagcgtgtcactccgcgcgtgttcctgttgagcccggcgcaggtgaacatcaaggtcgaagagccgacaaaaccaacctcggcacacgatttgttcgctgactgaccggttcagtagttttcgcattcgacgttatatcggtattcggccgactcccagcaaggagtcggccgattcttattgcgctccgagcaaactttttatgcgcggttgttagtctgtctgcatgctttccttagtgttctctctgatcggccgcattcttgcatggctcatcaacgcgtatatcacggttctgttcgtgcgcatgattctggactgggtctccgttctcgcacgaaactggtatccacgtggtgtggtggcccagctgatcaacattgtgtattccattaccgaaccccctctgcgctggctacgtcgctatattcgtccattgccgctcggctcgatttatcttgatgtcagcttcatcgtgctgtattttgcgttggtggtactagaaagtgttgttctgatagtgttctgaggccgtttttgacccgccggaggcatatatctggcataaaaacccacgttgaatgttctgaaacgatggggtcgtgatagcattctgacttgagaccaacgtaagtgcgggcaatgccccaaagcgaggtgcaagatttatggctctgttgacgccgaaggatattagggagcataccttccagactgttcgattcaaggaaggttatgatgtcgacgaggtcgatgacttccttgatcaggtcacggaaaccgtcgaggctcttggacgtcaggcggtagccggcggtcaggccactcagtctctgggccctgacgtgaccaaccttaatgcgaagatctccgatcttaccggtcaggtgcagcaactccagtcggagaatgctggtttgaagaacgctgtggctcaggcccagcaggccgctcaggctggcaatgatcaggcggcacagcttgcctctgccaagctcagcgaagccgaggaatccaaccgcgcgctgtcctcccagaatgagcagctcaagggtcaggtcgatcagctgaacgctcaaatcgatcagctcaccgcccaggccgctcaggcctccggtaaccaggaagccgtcggccagcagatcgccgccattcagcaggaacgtgatcagttccgcgcggccaacgaggagctgtcccgtcagctcgccgctgctcagcaggagggttccgccgctcagcagcagtccgctcagatcgctgaactgtctcgtcagctcgaagaagccaagcagcgtgaaaaccagcttcgtgcccaggtttccaaggtcgagccgagcactgagaccggttctctgcagaagatcgctggcgtcgcttccatgccgggcaccgagcccgagcgcgccaccgccatgctgaccctggctatgcagctgcacgatcagtacgtggagaagggcaagaacaaggccaaggaaatcaccgaggccagccagaacaagtacaacgatttggtcaccaaggccaacaactactccgagcgtacccgctccgaggccgacgactactccactcgtactcgttccgacgccgacacctattcggatcatacccgctccgaggccgacgcttaccgtgaccagattcacgcggatgccgagacctactcccagaacacccgttctgaggccgacgcatactccgtcaagactcgtcaggatgcggacaactactccaagtctcagcacgatgacgctgacaactacgagaaggaagtgcagcagcgtgccgccgagtatgacaagaacactcgttccgcagctgatgcgtacgacaagaacacccgctctgcagccgatacgtatgccgagcaggtgcgcgacaaccttcaggctcagtccaaggtcgtcgagggcaacatccagagcctcaagcagttcgagactgaataccgcgcccgcctcaccgagtacctcggccagctggcatcgcaggtttccgagtcgaacaactacgtcgaccagacctcgtccaagaccaactgagcgtaggcaggtacaggtcgtatgacgaaccaacagggacggctgcgcactcgcgtggccgtctttgcatgtgtggccgcggctgcgctgattgtcgatcagctcaccaaggcttgggcgatggccgcgttatccaacggtcagaccattcgcgtgattcccggactgctgtccttcaccttggtgcgtaatccgggcgcgtccttgggcatggggtcaggcgctacttgggtaatcagtctgttggccgttgtggcttgcgtggcccttgctgtggctggggtgcgcactatctccatgaaatggtcggtggcgctttctttcgcgtttgcaggcgctctgggcaacctgattgaccgtgttatgtacgctgacggcttcctcaacggcaaagtggtggatttccttaactatggctggtccgttggcaatgtggcggatatctatctggtagtcgccggtgtggtcctggtgattctgattcttatgggggagccgttctcccacaaggatcttatcgagcaatccgacgaatccctacagtctgagccggaggcggacgccaagtaatgagtcgaatggtccctgctcccgatgcattggtgggtaagcgtttcgacgtagccgtggccaaaatgctgggtatttcacgatctaaagccgccgatctggttgactccggacaggcgcgcgttttagggcgtgaagttgcgcggtccagcacgttgcaggcgggggagaccgtcgaatttgatttggcggaggaacaggccgggcctgagcctatcgcaactgatatggctgttgtctacgaagatgatgatgtcgtcgtagtcgataagcctgtaggcgtggcggcgcatgcctcggttggctggaccggtcccacggtattgggatcgttgcgtgatcgtggcgtgcatatcgcttcctatggcgcggccgggcgtgaaggcattgtttctcgccttgatgtaggcacttccggcttgatgttggtgtgcaagtccgaccttgcgtacaccgagatgcgtcggcagttcgccgagcatgaggtaaagaaaacctatcatgcgctcgtgcagggcggtcttaaagagaacaaagcgaccattgaggcaccgatcgggcgcgccaaagtgtccgatttccgcttctgcgtgactccggccggcaaaccggccgttacgcattgggatgtgttggagcgtttcggccatgaggccacactggtatccgtgaatctggagaccggacgtacccatcagattcgcgtgcatttctcctcgattgggcatcctctgtgcggcgaccccatgtatggtgccaatccggtgctgtctgaagctttgggacttgaccggcagtggctgcacgccatgaagctcgaattccgccatcctcgcacccgcgtctggaccacggtccggtcccagtacccggccgacctggccgccgccctcgatgccatgcgtgcccgtcacatcgaacccgctgaacctgccgagcatgccgaagttctggtggactaattccgcaacgtgtgcatcatgcgttttaatatttagattcagttccagcctcgccggattcatcccagaataatgagagatcggtcatgatggctctccgtcatgaccataccccaagtgactgcggatgctgagtaccgttcaggccaatggtcggtaaccgtacgtgaattaccggtatttccgctcaacgtgtctcggtactccagcgtgaagtgaacagaaatgagccaaagcagtaaggctgagtacgagtattcgtggccgtcatcaatcgatggtggtcattgggattcgcgccatgtactacgcagtatgttgtacgctctgcctggctgtgactggattctggggcccgctgccggttgacgaggctgaaggcatgtaaaacttatgcatactgatctgttttcttaaatttggctttatcaatggtgtcgcgcaggctctttacccgcgttcggattcgatcgttcgttttctccatggtcgtccgggctcgatcgagccggaccggtgccatatccggatcgcagatgactggcgattccggaagatctacgaaaacgtcatctttagatgacgattcaacgtttcatattgcaggtctccttacggggcgttacgtccgatcgcattctttgaaaaatgggccacctagatttccgaggagattgaagggcaacacgtgacttcggtagaccaaagctgccggaatatctccgtcaaaccgcctgtagctcgatggtgttgtcgcattgtgcggcgatgccaagatcgtgggtgacgatgatgagggtcttgccgtattcgtgctggaggcggagcatttcgtcgaagacatgttgggcgagatcgcggtcgagcgcgccggtgggctcgaccgcgaggatcaaatccccgggcttcaatatgcatcgtgcgagggcgacgcgctgctgttcaccgccggagagggtcatgatcttgtctcccgcgacatggccgagtccgagccgggagagcatggccttggccttgcgctgcctgacctgtttgctgtcacgggtgaagcgcatgccgagggtgacgttgtcaagggcgctcatgtcgtggtagggggctgcggatgcgggcaagccatttcttggaagacgtttcgtcgagattggcgggagcttgcgtcagcaggcgtcgatgaaggcgctgaggatgcgacgttggttgctatcggcgcggtgagagaactcaggatgccattggacggcccagacgaaacgcttggccggcatccagaccgcctccacgatgctgtccggcgcagtggccatcggttccagtccctggcccagcgtgcgaatcgcctgatggtgataactgttga

SEQ ID NO: 1806 - DNA, 12647 bp, Unknown
  MAG_14  MAG No. k141_38996
aggtgtagcagttgtgttagccggctggtagggtatttgacggtttgcatataactgtctggttcattgggctggcagctcaatacaagatttaggactcataggaatcacatgggcttcgttaatttcatcctcgaactgctgaaggatccgcgtgccgcgattgccggttggattgccatgggcgtggcgccgaccctcggcttcatcttcctcatcgtatttatcgaaacgggtgtggtgttcttcccattcctgccgggcgactccctgctgttcgccgccggtgtgttcgccgctcccgatgccgcgaccggcaaggccgcgctgccgctgttctggctgctgccggtggtctggtgcgccccgattatcggcgaccagtgcaattacttcattggtcatttcttcggccgtcgcatcatccagtccggcaaggtgaaggccttgaccccggagcgtttggccaaaaccgagcacatgattgagaagtggggcccgctggccgtgttcctgggccgtttcttcccgttcattcgtacgttcatgccgttcatctccggtatttccggtatgcgttggagccgtttcacgccgttctcagtgctcggcggcctgtgctggtccacgttgttcacgctgctgggctacttcttcggtaacattccggcagtacaggaccacttcgagctggtgatcgtgctgattctgctggtctcgctcgccccgaccatcatcggtctgctcaaggccaagttcggcaagaagaagccggccaaggtgaccgatgctcagttggatgctatggaagacggcattaagaacctcgataagtaagcaagaaatgtagattaccgcataaggaatcgtcgtgaaaatgaaggccctgactgtgcatgtgaggtcagggccttttctgcatgagatgggcgtgaaacagcagcgtggttatccacatttgtcgtggacgacatgccggggtgtggataactcagcaagctagaaccacaatggtcgattcgtgttgagcattgaactcggacacgtttcaatcggcttatgaatagcaacaccacaccccgcgtggcgcgtaggatcacctcgccagcggtagcacctccgggcattccgctgcccacggacgatgcgccaattccagcgtatcgctactacactccgccgcccaggccgttggcctcatgcgaacggcagagatcgggcgaggctccggcactcgccctaactacagacaccagcttccataacattgtaacgatgacgtcaggtcatggaggcgtggggttgagtgtcatggcttccatgcttgcatggacattggcgagacgtgaacacagctgcgttctcatagacgctgatttcgtggccggatgccttgacctgctgcttggtgtagaacaagagccgggcttgcggttcagccaagtcgacgcgcccctcggccgtatcgagggtgaggcgatgaaccatgagctgatgatgtgggagggtgtgcgagtacttccctatgacccttggagcgcgcgccagcctgactggtgggaagttcaagcggccattcgggctttggcggaaacgaacgacgttgtcatcgtagatgccggtcagggtggactcattgagaccgtacccgatctgcgcagtggcctgcaggtgattgccgcggaattgtcggtaatggggctggccagagccaagtcgcaccggtccagattggattcatggggctgtgaagcgccacatatcgtaggtgtggaaccacgtggcgctccacgtgggagaggccacgtgggtattggcgaggcgcaggactatttgactgccacggtattggggcccatcaagccaagtgtcaatctgtgcggagacgtactggaaggcctcggcatcagatcggtgaccaaaggcagtcgcaaagccatgaacttgcttgccgatctcgtagaacaggccattcgcccggtttcgggagcttctcacaaggaccagtgatgctatggctgccgtcagcacgcgagccaatgaggctggcacagcgctcagaaccatattcttcggtctgctggatgacgtggcatctgacccgcaggttaccgatttggcggtgacctgtgatggccgcgtttgggcggaccgcggcaatggcatgcgcgaaacagtattgcatgtgccgttccgctcgccgcaagtagttcgagaatacgccgtccaactgtgcgcgcagctcgggcgcagactggatgatgcctgcccgatagcggatgccgccagtccggatggcatccgcgtgcatgcggtgattgccccattggtgccacaaggtgccgcgatttccatacgattccctgaccgaaccatggcatcgctacagcacctgagcaaattaggcgtattcccggctgcttggctgccgacgttcgtgggattggtgcgcaaacatgccacagtgctgattaccggcggaacaggcgtgggcaagaccaccttgctcaaggcgctgctggcgcaatgcgacgtgaacgagcgcatcgtcaccgtagaggaagttcgcgaactgggggaactgggacgcgacgatcatgtctcgttggtaacacgcgaggcgaatgtggagggcgtcggagccataagcctggcggacttggtcaaagcgacgttgcgaatgcgccccgaccgcgtggtgctgggcgaatgccgtggcgcggaaatcgtcgacctattgcgcgcgttcaattctggtcatcacggtggcatgaccaccgtgcatgcggacggcgtgaaccgagtaccgtccaggctgatttcgcttggattactcgccggagtcagtccacaggcgttgaccatgctggcggcaggcgctttcgacgcggtggtgcatttggagcgagtgaacggacagcggcgtatcacgcagatcggcgaactgcgcgtagcacatggtgaactggcaggaacaccgctggcggtatggaatggctgccatcctcctcggtatgccgccgaatgggggcacttcattgaacgatggggcatcgttcccaggccgagtggtggtgggtgatgatgtggtgtgctgttctggtggcgctcgccgtgctgatatggccggggaacaagtccgggaggctgtaccggctggcttaccgcgggcgcgcgatcgattccgcagccataaacgaacctcgatatgccgactcacctcgcgtgggcgttgcgcaggtgattacgtccgccatcgcgcgattgcgaggtggcggcacattggttgaagcattcgaggaacaatccagcagacgcttcgccactcatcgcattactgtggaacggctcataacggtgttcgaacagcggcgtctgcccgacgaatcaccagcgcaggtacttgaagctgcacgcggggtcgccgccgcagcggttttgagcgatgagctcggttgccaagcggtgccatgtctggaagcggtattgactgcttaccggcagatgaggctgatgcagaacttgcgatcgcaagcatgtgccgttcctaaagccactgtggggctgctgagcgcgcttccggccgtcactgtggcattgggcgagcttctgggagctagaccattggcgttcttgcttggatcgccacgcggtgtggtctgcttgacattgggaggatgttgttatgctgccggcttggcatggatgcgggcattgttgaaaggcagcggattatgagtacggtgtgggtacacgccgcggcaggctgtgcggcgattgctggttggctgtataaggctctgtctcgtcatgacagccgcttgccgggcgaggagccggccgtagcgcatgattgcgggtcgtcatggaccatactcatattgcgtatgttgcaggtgtccttgcgtcagggctcctcgattccccgggcgcttgacatggtgggcaaagccgtcggcggcgactgcggcgctcgcatgagcgaggtcgggaactccctgaccagaggggttccctgggctgatgcgtggcatgccgctatggctgttcagcatgagggtgcgccagctgatagtccatccaagggaaatacgaataccacgcaacgagatcttggcctgctgcaatcggctttggaatcgtcatggacgcatggcgatatgcctggtgtgcgcctcgaatccgccattgaacagctggaccgtgacgagcgtgctgctatcgaacggaatgccgcgaagctgtcggtaaagctactgatgcctacagggctatgttttctgccggcattcgtgctggtaggagtcattccggcgattgcgtccttcatgatgtgaatataggcgtgaactgagtgcgcttaggctgaatcttgttgtattgctcggtattgtacttggctgcgtttggttatccacatttgtggtggacgacacgtcgaggtgtggataactcggcaagctagaaccacataccccgtttttcctggtgcatgaagcgttgatagtccacagtggtatgcaccccgcgtcaacccggcgcgggggccaaccactcacatacgcatggggaaggtgcgaagccactgcgcagcttcccctccttaccgaaaggaacgccaatgaatacccctatccccgtcatcgtcgacgggcaggccggcatctttgcgcacagcaaggctcgtgtggccacgctgaacgccaaggcgaaagaacggctatgcctcatggacgcacgcatccgcgccctcatggctgagcccgaagaaggcgcagccactgcggaatacgcagtcgtactcgttgcggctacaggctttgcggcggtgctggtcgccatcctgaagtcggatgccatcaagacgttgctgaccaacatcatcaaacaggctctgaaagtcgggtgacagccatgaagaccatgagatgccggtggaggctcgccagactgccgccagacctatgcacgggatcggccaccgccgaattcgcgatcgtattgcccagcgttatcgccatcgccgggctgatactggcaatgggacgtgtggtcatcgtttccatggactgccaaggtgccgcgacggcggctgcacgcgagtttgtggttaccggtgacgaatcatccgcgcgcagcatagctgcggacgttgcagggggagatccccgcgtcagcattgcccacaacggccaatcgacgagcgtgatggtcgaatgttcggtactgcccggcccactggatgtcactccaacgcgggtcaccggcaacgctacggcgataagccaataactggtcggctgctggctgggcggccgcaatagaaaggaactgcggtgcagggaatgcgttatgaggagggatcgggcacgatggccggagccatgctggttatggcggtgggcattgcgctcgcggtggcggcaagtgtgggcaacctcatgatctgccagaatcgagcgcgttccctcgccgatctcatcgcctttgacgccgcgtatgcgctgtggcatgtggatatcggtgatccatgcgcgcttgctgcaaacatggctgaagcgaatggcgtcacgctgggctcctgctccgtgcgggatgaagacgtgttggtaaccatcaaggtggaaaccatggttccggtggcatcatccgtggagcggatggctcgggccggaccggtgaattgtacggaaggagacaattatcacaataatggaccgtaagcactgatgctctggcgggcttctggacctttggttaaggtgagagcatgagcgagagtgaacgcacagaacgccgtcgcgtggtggccatggtgggcaatcccacttccgataagggccgtggtgccaaggtggatgcgcgagtattgggactgctggaggacgccggccgtgcccataacttcgacgtcatcgacatcaccggcgtaagtttcgacgattccctgaaccaggcgcgtgaacgcgcgcacgagtacgactatctggtggtggtcggcggcgacggcatgatcgcactcggtgccaatgccgtgggttgcggcggtaagccgctgggcatcgtggccatgggctcgggcaacgatttcgctcggggacttaagctgccggtcaatcgcatcgaaaccgcagtggaaggtatcgtcggcgctatcgtgcgcggatcacacattgatgtggacatgggacgcgtgacctctttggatggtggctatgccgtgaacccatccaccggcggggaatacgagtaccgggagaacaagtctgccgagcacccgattgaccggtactatgcgggcatgctgtcctgtggtcttgacgcaagtatcaacgaccgtgcgaatcattcgcatctgccgaccggcaccatgcgctactttgcggcggtgctggtggagctgacgcatatgaagcgttatgggtaccacgtcaaggccacgctggcggacggtaccacggatgaacgagacatcatcacgccgttgctgacgattgcgaattcgcgtcatatcggtggcggtatcgaggtctcaccgtactcctgcttctccgacgggctgttggacctggtgtggatgaatcatgtgccgaacttcggcgaatgtgcggtggccatctcgaacgcctataacggcaagctgctcgcctcaaaggtgttcgggtggaagcgcatacgcgagatcgaagtcacgcgagccgcagaaggcgacgagccaccggtgctgatggcggacggcgaatacatcgggcatctgccattcagggtagtggccgaggactgcgcgctacgcgtactggtaccgccggccgtggccgcccgtgaggtggactcccgacaggaagtgctcgacgccatcgcccgagacggtcgcgaccccgtaaccggccagttcgcctgacctgattatattggctcccctcattaggctgagccgtaaagcaaacagcccagtgggatgtttgtaggcgagggttcgacgatagtcgaaccaggagaaagtcagccgtaggctgtccgcgattgcggacgagctggccgcgaagcggactgaggggagtgcgggagagcggtaccagagccaatggccgtcagacctcagacgacatagctttcgatatgcagcgtctgcgccatgacctctttgatggttcggtcgctgatgttcggatgcgagcgaaccagcgagataagccccacgattagcgtgaagaatgtctcatggacgttggtgattggcagaccatgcatctgctcgaaatcacgtacggtggtctgggcaatgtagtcggcaatacggtccgccgcgcggtcaatgaacttgatatacagttcggcgttgccatcttggatcatacggtttgagaaggggctctcgtcggcgattagggaacggagcacatgcacgatgtcgtctaatgccttgttcacgttgcctgtttcgcgcgcttggttccactgcttcaacgtggtgaggatttcgtcgatgacgtcatcgagtactgcgtcggctacggcttccttgtcttcgaagtagtggtagaacagcgaacgcgtcataccgacttcgcttgcgatgtcggaaacggtgattttggagaagcctttttccagacacaccttgcgcgcggcttgcacgatggcgtcgcgccgggcatcgccacgggtggggcgtttctcgtcgaggatatcgctcatgggcacctcctgactacaaccgttattgacactatgttaatacaaagaaagcggttaataacaataaaaatgcggtaaccgttgtcagatgaatgtcgttggaatataaagagttttcccgattcggcagctatgagcccggtttatcttgactttttatcggttaattctgagggcaaaggtaggttagtagctatggcacttgcactgtatcgtcgctatcgtccggacaccttcgaaggggtcatcggccaggaccaagtcacggtcccgctgatgcgcgccttggacgaaggcaagcttacgcatgcctatctgttctcagggccgcgaggatgcggtaaaaccagctccgcgcgtatcctggcccgttgcgtcaactgtgccaaagggccgacttcccacccctgcggcgaatgcgaaagctgcaaggacctggccaccggcggtccgggttccatcgacgtggtcgaaatcgatgcggcctcgcacaacggtgtggatgatgctcgagaattgcgagaacgcgctggtttcgcccctgcgcgcgaccgctataagattttcattctcgatgaggcccatatggtcacgcagcagggcttcaatgcgctgcttaaaatcgttgaagagccgcctgaacatgtgatgttcatcttcgccaccaccgaaccagacaaggtgatcggcaccatccgttcgcgcacccaccactatccgttccgtctggtgccgcaggaagtcatgggtccctacctggagacgatctgcgacaaggaaggcatcaagcccgagcccggtgtgctgaaactggcgatgcgcgccggtggcggctccatgcgagataccctgtctgtgcttgaccagctgatggttggttcggtcgaaggcgttatcacccatgatgccgctgtagccctgctcggcttcacgccggaggcgctgatcggtgaggcagtggatgcggtaatcaatcacaacggcgaagccctgtacggcgttatccagaaagtcgtggtcggcggattcgatccgagacgattcgtcgaagacctgctggctcgtgtgcgtgatctgctggtgcttacgttggccggggaccgtgcggaatccgtgctgtccgacacggctgaggccgaggatatggacgatctgcaccgccaagccaaggcgctgggactgggcgcactgaccgccatggcagacatcatcaacactacgttgggtgccatgaccggagccatttctccgcgtatgcgcttggaactgctggccgcacgattgttggccggcagtgaatcaggctttgcaacagccgctcccgcgccagcttcttctggcatgccgcctgcggctgcttcttcgacttcgactacgtcagccgcttccggtacgggtgccagtggttttgccggcgcatcgcgaggcgggtttgccggagcctcacatggtggattctccggtgctgcacgcaaccagcaagcagccgcgcctcagagcaccgcttcccatgaatccgctgtgggagacaatggccctgtcagcagcccagtcagcgaccggcccgcgggctctccgtctgcgcaacctgccgcagcaactgctgctgccaatgcctggggtgctcccgccacgtcgccggccgtcccggcccaaccggtgacctcgcctgcggcatcggataatcggtccatcgacgagaagtgggatgcagccgtcgccgctttgccggaaaccattcgtgaatatgtgtcacgagacaaggtgccgaccgtaaaattcggtcccaaccgtaagagtctgccttgcctgtcgatgacgttcgacaagtcgctgagccagcacgctttcgccttggccgtggacaacagcggtaagaaggcggcgtccgtggtgttggatgccgtgcgcaacgagttcggtgccaatgcggttattgcaccttctgcggtcgcggcgaatggcgagcgagtcgaatccgtcaaacgtatgagcccggagcaattggccaaggtcaagcagcagattgccatggccaaggccggattggccgcgtcgagtttgggcgcgggtctgggcattcatatggggagcgagccgaaagctccgaagccgactgcaacaggccaagccgaggatacggacgacagccatcgagccggccaatccagtgcatccacggcggcgaagagctggagtgacgatgacccttgggccaagccggccgtaagcaacgcttcaccgcaatctgcagacgggttcgcacctaacgagcccgctgctgcgcctgcgcccgaagagcatcacaagaagcatgttgcggttccggacatcagtgatggtgttgatccgtgggccgctccggctgctcctgttgcacccgctgcgtccgttgcgtccgctggacccactggacagtccacggggcagccagccaccgcagctcccgctacggcagttgccggcgcaagcgatgatccatggaatcagccgcaatctcaggctacggcctcgctggcactgcaaccggtcgaagccgacccgtggaaccagccatatcagcagtctcctcacgatgatccgtggaatcagccgcaggggaaccatgctcaggcggctccgcagccaggagacgacccgtggaatcagccgcagtcccagactccggcttcttcggttcctcagacagtgtcgggcaatatgtcgggcgatgacccgtggaaccagccccaatcggttccgcagccggctgccggcgatgacccgtggaatcaaccgcagcccgcacagccgacgccgaatgccgacccgtggaatagccagccgcagccgcaaccgcaagtcgcggccgaggacgacgaatactcgatgaacgaccagtcgctcggcgaggcgacggccatgaatcttgacgatctgaaaaagctattcgaggtcaaaaaagtcgagcaattcgcggcagatgatccgaagaaccccaagaacatccagcctgccaagaagcactcggatgaataatgaggacgaataacgaggaatacccatggcacttgcttatgacggcgcaatacagcgactgatcgacgctttcgggcggctgcccggcatcgggccgaagggcgcgcagcgtatcgccttctacatgctgtccgcgcccgaagatgaagcgcgcgatttggccgaggccatcgaggaggtcaaggccaagatccgcttctgtgatatttgcggcaacgtgtgcgaatccagcccctgcccggtatgcgccgacccgagacgcgaccgttcggtgatctgcgtggttgaagagcccaaggacgtgatgagcatcgagcgcacgcgcgaataccgcggcctataccatgtgctcggcggcgcaatcaacccaatggccaacgttggccctgccgacctgcgtattcccagtctgctcaaacgcttagaaggcgatgaggtcaaggaagtcattatggcgctcgacccgaatattgaaggcgaggccaccaccagctacttgacccagctattgcgacccgtaggtgtcaaggtcacccgacttgccagcggcctgccggtgggctccgacttggagtacgccgacgaaatcacgctgggcagggcgctggccggtcggcgtgaggcctaggccagcgtatcattggcgctttcgcccttgcggcgcatccacggccagaatgcgccgtggcggatgatacgcgcggccttgtgccgtcgtgccaaccagataatgaacagtcctgccgccagtatgcccaggccaacaccaagggcgatattgcgcgcgtcaagcacgtcattcggctcgggggccggcatcggaattgccacgcggtgcccggagataagcagtcgatgcgtgttcacgccgtatggcgtacaggtcatcaaggtgacacggtcctcacccggcacaatcttgagcttcgacgtgtcatccggcaaaatcaccgaaatgcggtccactttgtagcccaaagtttcgcccatgacttcgatgtagaagaagtcgccctctttcacctcgtccaaacgggtgaacatcagcgcttcaaccaacccgcggtgcccggtaatgaccgaatgggtggatttacctcccaccggcagcgacgtgccgtacaagtggccggcaccagaagccagtgcttcctcggaagtgccgtgataaatcggcagattgatggactgtttgggcaccttgattgcgcccatcacgccgttgccggtattaagcagtgactggtattccttgtctttctttgaggcggaatcctcgccgctggcttgggatcctccttgggcggcggagaacggatcgacggcttcacccaagatgggctggccggattcagcgagcttcttgttgtatgcgcgggccgccgtgagcttgtctttcgcctgcgggtaaggccagccggctacttctttggctgtggtggctgtggtggcggccaagttgcggtcggactcgaattgcaacgctagcgggaaacaggccacggcgattgcggcgatcagcaacacaatggtgatgatgcgcatcgcccacagattgcgttgcaggcgtcggcgctcggccacgagatcgctaatatcgatgacttcgtcaaatggagttggaacgaatgctgtgggcttgggacgcgctggggaaacgttgtcatttgcagatgtgtcatcaggcatggccgcgttgttttcccgcattttctgtgaggcacggttactcgtcgaacgtcgatgcagcaatgccatagtcgcctgttccttcgcttgatctgctcatgatttgcttatacaagacggccggcccgtcttagtcgtggttggcataggtgctgccgcaagtggcaacgccgcacgtgccacactgcgaaacgttactccgcaccaagcctttcatgcaacatgccgacgagggccatata

SEQ ID NO: 1807 - DNA, 5205 bp, Unknown
  MAG_14  MAG No. k141_39289
gggccttcgtcgttacgcgaagtccgactccctgccgatgccgctcggtggcctgggtatcgccatcatctcgacttcttcgggactgctgactcagaaggaatgcctcgaccgaggcattggcggcgaaattgtcgccttcgtgtggtgagaaaggagagctgaaacatggcatcgcatattggtaagctccccatcgccatccctgctggcgttgaagtcaagattgaaggccagaacttctccgccaagggcgctaagggttctgactcctacgtggttccggaaggcatcaccgctgccgttgaaggcaacgagatcgtcctgaccgccgctgatgacctgcgtccgacccgtgccaagcacggtctggcccgctccatcatggccggcatggtcaagggtgttcacgatggctactccaagactcttgagatcgtcggcaccggttaccgcgccgtcgccaagggcaagggcatcgagttcttcctcggctactcccacaccatcaccgtcaacccgcccgaaggcatcaccctgaaggtgaccgacgccaaccacgtggttgtcgaaggcaccgacaagcaggtcgtgggccaggttgccgccaacatccgcaagctgcgcgctccggaaccctacaagggtaagggcatcaagtatgccgatgaacgcatcctgcgcaaggctggaaaggctggtaagtgatatgagcgttgctattctcggaaaaggcaagaaggtagctctcaagcgccgtcacgcgcgtatccgcaagcgcatctccggtacccccgagcgtccgcgcctggtggtcacccgctccaaccgtcacatggttgctcaggtggtcgacgataccaagggtattaccttggtgtccgcctccactcttcaggccgacttcgccggtttcgaaggcaccaagactgaggccgccaagaaggtcggcgagctgatcgccgataaggccaaggctgccggcatcaccgaggtcgttttcgaccgcggtggcaacaagtacaccggtcgcgtcgcagccgttgctgatggcgcccgcgagggaggtcttgcactgtgagcgacaacgaaacgaaggaaacccaagtggctgaagaaactcagaacactgtggcgaccgaatccaacaacgaggaccgcaagggtcgtcgtggccagcgcggtgaaggccgtcgcggcgagcgtcgtaaccgtcgtgaagaaaaccacggcgacgagctgctcgatcgcgtggtgaccatcaaccgtgtgtccaagacccacaagggtggccgtaccttcagcttcgctgcactggttgtggtcggcgacggcaacggcaccgtgggtgtcggctacggcaagtcccgtgaagtcccggccgccatcgccaagggccagctggacgccaagaagcacatgttctctgtgcctcgcgtccgcggcaccatcacccacccggttcagggtcacgacgctgctggcaccgtcctgctgcgtccggctgccccgggtaccggtgtaatcgccggtggctccgtgcgcgccgtcatggaatgcgcaggcatcaccgacgtcctgaccaagtcgatgggctccgccaccgccgttaatgtggtgcgcgctaccgtcgacgccctcaagcagctcgaagagcccgaggagatcgccgcccgtcgtggcctggcgctcgacgaggttgctcccgatgctctgctgcgcgcccgtgccgccggcattgccgaggctcgcaaggctcgcgaagaggctgctgccgctaaggccgccgaagagaaggatggtgagtgatactcatggctaagaacctgaagattaccctgcaccacggcatcgtgaaccgtaccccggctcagcgcgccaccgtcaagaccctcggcctcaacaagatcggtaagaccgttgtccgcgaggacaccccggccaaccgtggtctggtgaacgccgtgcgtcacctggtcaccgttgaggaggttgactgattatggcagataacgaaatcctgcagatgcacgacctgaagcccgccccgggcgccaagaaggaccgcacccgtgtgggccgcggtgaaggctccaagggtaagacctccggtcgtggcgccaagggccagacgaagcgtaaccacgtgcgtccgggctttgaaggcggccagctgccgctgtacatgcgcctgccgaagcttcgtggcttcaagaacccgttcaaggtcgagttccaggtcatcaacatcgctcgtctcgtggagctcttccccgagggtggcgaggttgctgtggccgacctgatcgccaagggcgctgttcgtgacaacgctccggtgaaggttctgggcgacggcgagaccaccgtggctttcaccctcaagggtgttaaggcttcggcttccgccaagtccaagatcgaggccgccggcggttccgtttccgaggactgattagtcctacggggagcgcaataggctgtacaacccccgcccgccaataggtggacgggggttcccttttctcaaaaattgttgttctgagcgcagagaagcagtctcaacacaatgatcgttttgagtatgcttcccccgttcagtacgacggagcataattcagataacattcgcgagacatgaagtggccgaagtaggcactgtagactatgctcattcgttagtttgtgtatttcgcgtgattggcgcgctattgggaggaaatctaggtgaggacactaatccaggccctgaagaccaaagagttgaggaagaagattctcttcgtcctgttcatcatcatcgtctaccgcatcggttcgttcattccgacccctggcgtggactacaacgtggtgaacaagtgcatggccactatcggcagcgcctcccaggagaacttcatcggactggtgaacctcttctccggtggcgctatgctccagctgtctatcttcgcgctgggcgtcatgccgtacatcaccgcgtccatcgtggtgcagctgctgcgcgtggtcatcccgcgcttcgaggccctgcataaggagggccagtccggagaggccaagctcacccagtacacgcgttacctgaccatcggcctggccgtgctgcagtccaccaccatcctggtcaccgcccgctccggtgccctgttcaactaccgctgcgatcaggtcatcccggacggctccgtgtggaacctcgtggtcatggtcctcatcatgaccggcggcaccggcctgatcatgtggatggccgagctcgtgaccgacaagggcatcggccagggcatgtccatcctgatcttcatgtccatctgctccggcttcctgccgcagctgtgggagatcggctacggcaccaacggcaagaacggcgactggaccaagttcggcatcgtcgtgggcgtgctcgtggtcatcctcatcttcgtcgacttcgtcgaactgtgccagcgccgcgtcccggtgcagtacacgcgccgcatgatcggccgtaagatgtacggcggctcctccacctacctgccgctgaagatcaacatgtccggcgtcatcccgccgatcttcgcctcctcgatcctcgccatcccgaccctgatcgcccagttcggcaagtccgaccagtcctgggtcaagtggatcaacgccaacctggcgaacaccacatccgtgtggtacatcgccctgtacgcgctgatgatcgtgttcttctgcttcttctacacctcgatcacgttcaacccggacgagaccgcggacaacatgaagcagtacggcggcttcatccccggcatccgcgccggcaacgccaccagccgttacctgacctacgtgatgaaccgactcaacaccgtgggtgccgtctacctgctgttcgtggccctgatcccgaccgtgctgatcatggctctcggactcaacgccaagctgccgttcggtggcaccacgatcctgattatcgcgggcgtgggcctcgacaccctgcgtcaggccaaggcccagaccgaacagttccagtacaccggcttcctgttcgaaaacgtggaccacaaagaaggctgacgcccgcttggcagcggccgcccgcaatgggcaggcgggcgcgcgaggagcggaacagtccagtggactgttccacgacggagcaatctttcttccacatataactcaatggctcccctaaccaagggagccaaaaccgtattaataaccgacacaaaaggagaccaccatgcgtctgctcatcatgggcccccagggcgtgggcaagggcacccaggctgctctgctcgccgagcacttcaacatccccaccatctccaccggcgacatcttccgctacaacatcaagaacaagaccgaactcggtcttgaggcgatgagctacaccgacaagggcgagctggttcctgactccctgaccaacaagatcgtcaaggatcgtctggccaaggaagactgcaataacggctggatcctcgatggctacccgcgtaacgccgcccaggtcaccgctctcgacgagatgctcgccgacctcgacactccgctcgaccacgtggtggccctcgaagccgcccgtgacgtgctgctggagcgtatgaagaagcgcgccgccgagcagggccgcgctgacgacactccggaggccatcgccaagcgcctggagacctacgagaaggaaaccgctccgctgctcgacatctacgaatcccgtggcctgctcgtcgtggtcaacggcgtcggcgacatcgacgagatcagcggccgtatcatcagccacctcgagtagtaggttcggcagcccggccaacaagccggagtgatgccgaaataccacatcaacgtttccatacccctgtgcgacacgccgagtgttcgtacaggggtatgtgcgtatatagttgacagttggtgtgtcttcggatatgccatagtaatcatccaacggaataggactagaggcacatggcaaaagacggtgtgattgaagtcgaaggtcaggtggtggaagcattgccgaacgcgatgttccgcgttgagctcgagaacaagcacatcgtgctcgctacgatttccggcaaaatgcgtaagaactacattcgtattctgccgcaggatcgtgtcgtgctcgaaatgagcccttacgacctgaaccgcggacgcattacgtaccgttacaagtaaaggtacacaagaaaa

SEQ ID NO: 1808 - DNA, 5639 bp, Unknown
  MAG_14  MAG No. k141_39682
caagcgcatcgctcggaggaacaacaacatgcagtggttcaagattccggccaagacctacttcgagccgaacgccatcaagtacctgcgcgacatgtacggcatcgagaaggccgtcatcgtgtgcgataaggtcatggagcagctcggcattgtcgacaaggtcatcgaccagctgcgcgcccgctccaaccgtgtgaccttccgcatcatcgactacgtcgagccggagccctccgtcgagaccgtcgaaaagggcgcggagatgatgcgcgaggagttcgagccggacacgatcatcgcggttggcggcggctccccgatggatgcctccaagatcatgtggctgctctacgagcacccggaaatcgccttctccgacgtgcgcgagaagttcttcgatatccgtaagcgcgccttcaagatcccgccgctgggcaagaaggccaagctcgtgtgcatcccgacctcctccggcaccggttccgaggtcaccccgttcgccgtgatcaccgatcacaagaccggctacaagtacccgatcaccgactacgcgctgaccccgtccgtggccatcgtggacccggtgctggctcgcacccagccgcgcaagctggcctccgacgccggcttcgacgccctgacccactcgatggaagcatacgtgtccgtgtacgcgaacgacttcaccgacggcatggccctgcacgcggccaagctcatctgggacaacctggctgagtccgtcaacggcgagcccggcctggccaagaccgacgctcaggagaagatgcacaacgccgccaccatggccggcatggcattcggctccgcgttcctcggcatgtgccacggcatggcccacaccatcggtgccctgtgccacatcgcccacggccgtaccaactccatcctgctgccgtacgtgattcgctacaacggccagattcctgaggagcccacctcttggccgaagtacaacaagtacatcgccccggagcgctaccaggacatcgcccgcaacctcggcatcgacaccggcaagaccccggccgaagccgtggagaacctggcgaaggctgtcgaggactaccgcgataacaagctcggtatgaacaagagcttccaggattgcggcgtggacgaggattacttctggtccgtgctcgatcagatcggcatgcgcgcctacgaggaccagtgcaccccggccaacccgcgcatcccgctgatcaacgacatgaaggacatcgccgtcggtgcttactacggcgtctcccaggcggaaggccacaagctacgcatcgagcgcgagggtgaggccgccactgaggaagcctccgagcgctgattgcaggcggttggcggctgctggcaccagcagtagccaccaaccgcggtgttgcagcttagtggctgcatagcggacacaaggagcccgaccccattacaggggccgggctcctttgcatatgtggtgctccctcagccggcaggtgcctccatggggcggtaacctactcatggggcggtaacttgcccatggggcggtaacttgcccatggggcggtgaaaaccccatggggcggtaacttgcccatggggcggtgaaaaccccatggggcggtgtacgaaaacggctctattctgcggaaggtaaaattttaccgtccgccccatgggctaattaccgccccatgagggaattaccgccccatggaatcgctgagcgtcgctaaatcaccgcaataatgcagccaaaagcaataaagctggcaaacgcctcggtaatgccggtcaccacgggcttcaaggttgtgcgccgtgtaaccaccggcaacgcaacggcgcgggccaacagcagcacagtcatcgcaatcagatacgggctgcgtccagccggcacggcggctagcagcaatagcgccacatgccatacccacgaagccgccacgtacgaacgcttcccgcgttcccggatcatggttttgaccaccaaaaccgacccatactgcgtcagcgcaaacagcacggtggcaatcagcccgttcacgggcaatgaacccgcaggccaccaggcgtgaaggtcgaatatctggctcaaatccggcatattccgaatcgcggcgcgtgcggcggtgacatcagcggctgcgcacgaggcatgtgctgcgttgatgggaataacacatgccgtctcaacagcgttgccaaacgacgcgatcaccgtggccatggccgatgcggcaatcaccgacacggcattgccccacagcgagcgctccttcctcagccacgaggacagcatcgacagcgcaaccagcactatatataaaggagcccaacgcagtatgccggtatgcgtaatcaggaatggcaagccgatgacgatgagcgctacggcataagtgagcatcggcggcagataacggcgtgaaaagtgtgctttgaaccagtgcgcggcgctgaactgcacgcaatagcacacggcccacgtcgccaacagccaaagcgtatcaagattaggcccgccgataaagaagccagccacagcgggcagcataaccattacccatgcgccaggttggttgtcgaaccaatcgcgtttaagagtcttgcggcgggaagccatatctgtcatgatatcgcagcgaatggttctcaataagaaagatgtgagacctgcattgcgacaatcgaacataggaagtgcgagaagccagtgcttccgccattatgcaacatgtgcgattgttcggaaatgttcatttggctcacattgtgtttatgtgagactaatctcgttgagtatcgccctcggcgctggaaatggcctcggctatcggatcttggctgaagtcgtggttgcgataatcagggtcgtccaccggcagatgctgcaccaaggtatcgaacacctgactgtagattttgccgcgctcgagcaccgcatcgagcacatggccgccgaacgtcttgtcgtcggacaggaagtgctcgtggaatccggccacagccgcgccgtgaaacatcacgggggagaagtacccgagcatggtgcccttgacgtcgtggcgcaggaacacggcctgccggtcggccacctctaccagcgtggggtagggtgcctgctgcttgatgaccgcgcgtgtcttgatgaagctgaacgtgccgcgcacaattaccgaaaagaacgtgttcgcgcggccgttcgccttgacgatcttttcgttgagctcttctaggccgatatcatgacgctcgcactggtactggaaggccgcgcgatggctattagcgaatggcatggtgaagtcgtccggcacgcgttcggccacaccggattggcctatcttgtatgccacgccatccaggatgatgagctcgccgtccaagccctcgccggtgccgatgccggtgtcgccatgcttgagcaattcgccgatggtggtggtgccttccagcagccccggcacgagtaaggccaaagtgccgtgctgatataacacgttggcaccgtgctcacgaataggtttgatgttctttgccagtgattgtgtcacgagccttaagagtaattcgcgttaccgtccaactcaattaatcaatccatattcgccaacgtgagctgtgccactatatataggtaagtctcagaaggatgttggtaggcgacgccgagcggctatgccgcgaggtaatacgaacggcatgagcgcgacacgcgcgaattcctccgcgctgtcccacctcaatgcttgaataaacaagttgcctgatttgggctcgcaaattggaattaaaaaagcgagcgcgggccgggagccacttcaagtgaagtgacagccggaaaccgcgcactgatgtcggatgaccgccagaggacgtatgtccaagggaggccatgcgcgccggtgccctagaagcaggttggtaaacagtacaacgaacatcgctagaaagggcggacggcaatggcgggacagaaaatccgcatcaggcttaagtcctatgaccacgaggtcatcgaccaatcggcgaagaagatcgtcgaaacggtgacgaacgcgggcgcaactgttgttggccccgttccgctgccgaccgagaagaacgtcttctgtgttatccgttctcctcacaagtacaaggattctcgcgagcacttcgagatgcgcactcacaagcgcctcatcgacatcgtggacccgacccccaaggccgtggactccctgatgcacatcgatctgcctgcggacgtcaacatcgaaatcaagctgtaagggaggaggaagcattatgtctaatcgcaaggctctgctgggcaagaagctcggcatgtcccaggtgtgggacgagaacggcttcttcgtgcccgtcactcttgtcgacgtgtccaccaacgtggtgaccgccgtgaagaccgaggaatctgacggctacaaggccgtccagctcggctacggcgccatcgaccccaccaaggtgaccaagccgctggctggccactttgccaaggccggtgtcaccccgcgtcgccacctcgtcgaggtgcgcaccgacgacgtcgatcagttcgaggctggccaggaactggccgctgacctgttcgaagagggtgctgaggtcgacgtgaccggcaccaccaagggtaagggcttcgccggtaccatcaagcgttggggcttcaagtcctaccgccgtactcacggttctcacaagaacgagcgccgtcccggttctgtgggcgcatgcgccactccgagccgtattctcaagggcaagcgtatggccggccgcatgggtcatgtgaccgccactacccagaacctgaccgtcgtctccgctgatgtcgagaacggcatcctcgccatcaagggcgccattcctggccccaagggcggcatcgttctcgtccgctcggctgtgaagggagcctgataaaccatggcaaacgttactctgaacgtcaccgacgccaagggccaggccaccggcaccgttgaagctcctgaggctctcttcggcgtttccgccgaggatgtccaggctcacatcccgctgatccaccaggttgtcaccgctcagctcgctgctgctcgtcagggcacccacgccaccaagactcgtggcatggtttccggcggcggcaagaagccgtggaagcagaagggcaccggtcgtgctcgtcagggctccatccgtgcaccgcagtggtaccacggcggcaccgtgttcggcccgcagccgcgtgactactctcagcgcacccccaagaagatgaaggccgcagctctgcgctacgccctgtccgatcgcgccaatgccggtcgcgttgccgtggtggagttcggtatcaccgagccgtccaccaaggccgctgtcgccgccctggccccgatcaccgcggacaagttcaccacggtcgtcttcactcgcgacaacatcaacgagtggctctccgtgcgcaacatcccgaccgttcacccgattttcgtcgatcagctcaacacgtacgacgtgattacctcgcagtacgtggtcttcaccaaggaagccttcgaggctttcgtggctgccaagaccgagccgaaggaggcctgatttagatggtcgctattcacaagcccgctcacgac

SEQ ID NO: 1809 - DNA, 7049 bp, Unknown
  MAG_14  MAG No. k141_40336
gacgcgcagcacgtcgctcggctcgcagccgatcagacctgcgatctcctcggcatgcttgtccggctcggcggacggcaggtcgatcttgttgagcacgggaatgatggccagatcatggtcgatggccatgtacaggttagacagggtctgcgcctcgatgccctgggtagcgtcgacgagcagcaccgcgccttcgcaggcggccagtgcgcgggacacctcataggtgaagtccacgtggccgggggtgtcgatcataccgagcgtgtattcggtgccgtcaaaggtccatggcacgcgcacggcctgggatttgatggtgatgccgcgctcctgctcgatatccatacggtcgaggaagcgatcgcgcatctcgcgctcgggcacaatgccgcttaactgcaggatgcggtcggccacggtcgacttgccgtggtcgatgtgcgcgatgatacagaagttgcgaatcaccgactgatccgtggaacccggctgattgtgttggacgaccaacgcattcctcctcttggcatatactcaaacttcacctagtgtagccgagggactgtattcggcgtggcattgcgcgggtttttccggggctcatgctatcctctaccttttgtatgtccttataacacacatcgtttggagtaaacgtggcaaacattaagtcgcagaagaagcgcgtgctcaccaatgagaaggcgcaccttcgcaacgtggctgtgaagtccggcctgaagaccgccatccgcgccacccgcgaagccatcgccgccggtgacaaggctgccgccgaggccgcctacaaggttgccgcccagaagctcgacaaggctgctggcgctggcgtgatccacaagaaccaggccgccaaccgcaagtccggcctcgctgttgcgatcaacgctctgtgagcataagcctcttaaggttttagcaagtcccgcaagtcatctggcttgcgggactttttatatctccgttcaaagaggtacattggcggtcttgcgaaatgacatctccgttcagaaaggtaccgaatccgagaaagcccaagtataaacgccgtcattgcaacgcttatactcgacgtttcgtgcttcaggtacctctttgaaagcagttgtcattttgcagaaggccaaatgtacctctttgaaggcagttagccctgaggcggtcttgaatcatcctgaggcttgtcttcttcgtccttggtggtatcgccgggatcgacggtatcggcgtgcggatggatgaccgggcgcttgagatatcggctttcgctgggcaggtagacgcgatgacgctcgacggctccgggcaaggtgacgttgaagccgaccgagagcaggcgcagcgccaccacgatgatgacgatcagcacgtcgagcagcatttccgagcacatgtcgaaccaaccgtagtgcacaccacgccatacaagcacggtcagaatgcaaccgatgaacgagggcacggcatagaggtgtttgtctcgaataatcattggcacatcgccgatgaagatgtcacgaatgaggccgccggccagtgctgtgaacatgccaaggaatacggctgtcatgcctgaggaaccgtaggccagagcttttgcggtgccgctgactgcgaatagtccgaggcccagagcatcgatgacagtcatcgtccatttgagtttggtgatctccgggtgggccaccaccacgataatgccggaaaacagcgtggtgagcacatagcctttgtcggtgatgccgaccggcggcagggcaccgagcatcacgtcgcgcacaagaccgccgccgagtgcggtaagccatccgcacagcatgatggtgaagatgtcgtagcccttgcgaatggcggcaagtccgcccgacaatccccaacacaggattgctaaatactcgatgaccacaaaaacgatgttgttctccaacaccacctgcatgagccgctcccctctggtaccgcttcggttcgtctcagtccgtcttcgttctgttcccgttcatccttattcggcgctacagcccgtcgtacccgagcctacaacaggccttgcctgacgcaattggactagagaacaaaccgaataaatgctattgccggttcgactccacacttttttcttacagcgtcgccagcgcgccaaactttgagcagccaccgacgttagtccttctcatttgtcggaggttggccaaagtttggcacggcaccgacgatcacgcgctccagtgtcgttgccgtgccaacttatgtacagctaacgacgctaagcccctttttaccgtcgtttgatcgccagaacttgacccgttaacgacgctaaggtgtctcagcgacgtcagcagtccaaaccttgaaccattactgacattgaacatcccccagcgtcgccagaagctcatgtcttgtctcaccaccgacgcaacgccgtcgctgcctctgccaccggcttcagtttcgagcaatgctcgaagcctgacggcaaacggtaggctgaagcatagtattccgtcatgtcactcatcttgctcataggtttgctcctgttctcatctggatgaaccataaccaacccccgcaacgtgcagaagacctaaatcatattatttgttgcgaaatgttgctaaatccatctgtacccctctagccaagaacatttccaatacgccaagaccccttggaattgttgacattctaaggggtcttagtcggaaacaaaaggtgctagttcagcacaccttccacatccagttgtgcgggtcctcgacttcgccgagctggatgccgagcagctcgtcgcgcagttcgcaggtgagcttgccggagccgccgtcggcgacggtgacgtcgaacttctcggacttgaagcgaccgatcggggtgatgatggcggcggtaccgcaagcgaacacctcggtgacttcaccggacttgatgtcctcgagcagctggtcgagggcgatcatggtctcgaccacgtcgtggcccttgtcctgcagcagctgaatcagagagcgacgggtcacgcccggcagaatgttgccggtcagggacggggtctccacgtggccatccttgtgcacggccatcatgttcatgccaccgagctcttcaaggtaggtcttagtggcggcgtccacaaagcacacctgctcgcagccattctcaacacccttgtactcgccgagcagggaggcggcgtagttgccgccgcacttggcgaaaccagtgccgccagggccggtgcggaaccacttgtcttcaacccagatgctcaccggcttgacgccgcccgggaagtacgggccggacggggatgcgatcacgcaggaatccacttcctgcggagcgcgcacgccgaggaacggctcggaagcgaacatgaacggacgcatgtacagcgtgtactcgcggcgggacggcacccagttggcatcgcgcttgaccagcgcggccacggaaccgaggaagtcgtcaatcggcagctcaggcaggtacagacgcttggcggagttctggaaacgctcggcgttcgcatccgggcggaacagccaggtggagccgtcggcatgacggtaagccttgaggccctcgaagcactcctgtgcgtagtgcagcacggaagcacccgggtccatcttgagcggtgcgtacggttcgacgcggcggtcggaccagccttcgcccttggtccaagtcatgtgggtcatgttgtcggagaacacctggccgaaagccggcttgtcgatgagggactggcgcttctcatcggatgcggggttgtcgttcggcagtacggtgaacggttcggtgagcttgtcgagtgctgccggatcgtggtgcgtgttttcagtcatcactagctacttcttcttgactttggcggcccgaaagccaccatatggggtgtgtgctgtgcgcttgtggcgcgaactctgttgcatacttttgcacacccatgtgttactcgtgtggcagagttcacatggtgaaaaaacgaagaagcccacaccgttctcaacggctgcgggcttccacgtttcagttatgttctgaattgttcgctatcgaagcgaccgactcacttggcgtcggcggccggagcagcagcggcgtcagccggggcggcagcagcttccggagcggtggtggactcggtggcatcctccggcacctcgacggtgacgacggactcttccggatcctcgacgtccagctcgacgccctcaggcaggacgacatccttggcgaacaccttggtgccgtcggtcaggccttcgacgctgaccacgatcttctcgggcaggttggtgacgtcggcgcggaccttgagctcctgaatgtcgacgaacgccacggcagcacccttcggggtgccttccacgaacaccggcacctcgacgtcgatcttctcgccggccttgacctcgaggaagtcgatgtgctcgatgatgcgcttgaccgggttcttctgcacgtccttgacgacggccatcttggtgttgccgtcgaaggcgatggtgaacagggcgttggtgtgacgcagggccagggtggtctcgcgcatcggcaaagtcacgaaggcgggctcttcgccgccggcgtagatggtggccggaatcttgttggcaacgcgcagacgacgagcaacgcccttgccgaactcggaacgggcctcgccctcaagcttaatggtggtagccataatggatactccttgtatcttcgtttcgtactgtctcgctcagacgccacgacgcgccgaaagacaccctacaaggagtgaaatacgccgagtcgataacggaatctgtgtcatgtgtcagcatgcacacttccctcgccaaagcaacaattgtcaagtatacgccaaccccggactttgcgtaatgatgcttcgatgacactgcatataggccgtcccagctacgtcaacgtacggtttccgcgaaataatccctaactttgtgaagaacgtacgcttacccgttctcatcatacggttttcacgaaatcgttcgccatttcgtgaaaaacgtacgctcagcgacactcagtgtacggtctttcacgaagttggggatgatttcgataataacgtacgatggtgagtaccatatcgggaggttgatatgactcgttcggacgacgtcatcaatgaggatggccatgacgtcatcgccgcacacactcgcgttgtcaggggcatggctgcggcacttgccgcgatagccgccacaggagccggcgtcacagccgcggccgccaacgtcatgttcatgttcgcgctggacaccaaggccaaacgttcgatgttcaacatgccgcacgaggagacgccgaaaggcatcgaattcgacatgtccgagcagcttgaggccggccggtggttcgaggaggccaagcaatcggtcacgctgcgcagccatgatggattgaaactccacggctggctgttggacccggattgttccgacccacagccgcatctatacgcgatctgctgccatggctataccggagagcccgcggaaatggccaaatgggcgcatcgctatgcgcaactcggttttacggtcctgctacccgcgcagcgcgcccatgaattgagcgaagggcgttacgtgggtatgggattgctggaaagcgacgatctgttgggctgggtttcgctgatcaccgcagctgatccggatgcacgcattctgttgcatggcaattcgatgggcgccgccacggtgatgatggcggccggcgatgcgcgactcccccgcaacgtcgtcgccgcgatttccgattgcggatacagttccgtggtctcgcagtttacggataatgccgaggcgatgttccgtttgccgcactcgttggccgtgctgctggtcaaagtggccagtcatgtgtctaaacgcaaggctggataccggtttgaggacgcctcctgtgtgaaggcattacggcacgcgactattccgatgatgttcattcatggcggagcggatacttttgtcaacccgaagtatctggacatcaattacaacgcctgcgccagcatcgaccgcgagaagctgctgattcccggcgccgaccacacgatgagcgccagcaccgatccggaccactattggcgtcgcgttaacggctttgttaagcgggtgtttgggctgtagtagatatagaagcttggctcccctctgtgaggggagccaagaatggttacgcgagcagttccttgacggcggcgatgacggactgcagactcttcttcgcgtcaccgaacagcatctgggtgttgtcctcgaagtagagctcgttctggatgccggcatagcccataccacggccacgcttcatgaccacgacgttctgggacttgtcgacgtcgagaatcggcataccggaaaccggggtgccaggacggcgagcagccgggttggtcacatcgttggcgccgacgaccagagccacgttggcctgcgggaactgcgggttgatctcatcgagatccacgagctcctcgtagggcacgttggcctcggccagcagcacgttcatgtgaccaggcatacggcctgcgaccgggtgaatggcgtaggagacttccacgccatggcccttgagcagttcgccaaggtcagcgagctcgcgctgggcctgagcctgagccagaccgaagccgggcacgaagatgaccttctgcgcgtagacgagctgaacggccagatcgtccggcgtggtctccttcatggtgccttccggaccgtcgccagcagcggcgacgtcagcaccaccgccgaagccaccggccaagacggagagcagcggacggttcatggcctgagccatgaggatggacagggtcacacctgcggaaccgacgagtgcgccggccacgatcagggcaacgttgtcaatcgccagaccggacatggccacggccgtaccggtgcaggcgttgagcacggagatgacgacgggcatgtcggcgccgccgatcgggatcacgaagaccaggccgtagc

SEQ ID NO: 1810 - DNA, 3430 bp, Unknown
  MAG_14  MAG No. k141_40547
cggtggcaaggtgctcgacgccgataccatgaaactcgacgaagatttggccgtggccattaaccacaaagccgccgaaaatctcgataaggatggcctgaacgcccaacgcaagcgtgcgctcgtcgactccgatctgcaagccgaggaagccatgccggacgcgctcggtccggtgcttggcaaatatatgagcgaagggctcaaatccgggaaactcaacgccgtcgccgatatcttctcctttaacgtggcctccacctacgcctcaaaacgtgcggccatgcatccgcgcccctatctgaaccgtgcggaaagcagctacggcggcactaacgatctcgccggactgcccgccacgcttgacatcaagcaatcaccctcatggctcgaacacgtgcccggctactcgaacttgcagaaaaacagttcctacccctccggccacactaccggcgcctattcgtggggtatcgcgctggccggcatgattcccgaactcgcgccgcaaatcatggcccgcacttcggaggccggcaacaaccgcatcgtgctcggcgtgcattatccgcttgacatcatgggcgggcgcattggcgcatccgcccagaacgggcagtactggcataacgaattcgcttcgtccatcgtgcccgcgtcccggcagctgcgggactatctggtgtcccgctgcgccgcggacggccacggcactaccctcgccgcctgcatcgccaacaccaaggcctccggttcgggcggctacaccaacgattttctggacccggtggccaccgagccggtcgcggaccaggcctcggccgtgcgcgtctacaccgcacgcctgacctacaccttcccgcaagacaccgcccagtccggcgctgatttcgtggcaccgcgcggggcggcggacgtgctgcgactggcctatcccgaactgcacgccgatcagcgcaacgcgattttgaaagccactgccttggattccggataccccctatggcaatcgagcgacggctggcagcgtatcaactgggccaaagccctgtgcgcccgcgtcaccttggataagcacggcgatgtggccaaggtcgagaccgccgaccaagtggcgcttaccggcccgagtgtggtcaatgcccagtacaccgacgcgggcaatcacccggcgtcggatagctcggcgggtgaaaacagcgccattgcggccgggccggatctcgccaccctccatgccgcgcaacgaccggcgttgatcagcgtagccatcggtaccgctgtaatcgcgattgtcggcggaatacggacggttcgacgcaaatccaagaaccagcttcagcggtaattcagccaaagttcagtttggagatctgccgagtttgccttcatacggtgtcggcttcatttctctctcatactctcggggtgtcatccgccgaagagcatcatgctgcggcggcacaacccgaggaaggaacgggagtaatgttccacaccaacaatttcaccgcgatgtcgcggcgcgccatcgcgctgctcaccgctgcggtgacactgagcagcatcgccctgatcggcgtgcccgctgcggctgcggacgagcagcaggccactgccgaacagaacacggctgccaaaccatccgtaatcatcaacgaggtctatgccggcaatacgaaagctgccggagacccggatagcaagcgttgcgattgggtcgagctcaagaacaccggctccacagacgttgacgtgaagggctggggcatctacgacagcggcaagaaagccaagaagcactacaccatcggcaccagcgaagtaacgaatacggacaccgtcatcaaagccggcggatatctggtggcatacatcgaccccgacaaggccgagcccggcctgggttccgatgccgacgaagcctatctgaccactaccagcggcgactttaccgatagcgatgtggtggattccacgtcatggaataccgatacaaccggcgtgaagaagatgagcgacagtcagtcgtggtcccgtaaggacgatggcactttcgcgctttccgatacgcccacgcccggtgcacagaacgtgttcgatgacccgactccgactccgcccgccggcgagaccatgaccgtggacgcatggtcgggattggccgatgtgaccacagtggatgccgaaggcgaatttggcgccaaaggacaaggcggcgaccacactgacggcaatctgtctggtctggtgtatgaagccggtaaagacggcaagcaaggcgtgctgtgggcggccgacaacgatctgaaccccacgctcggcaacaccgctgataagggccctggctccatcaacaagttcgtctaccagaacggcacatggcagcaggatcccactgatggctggaccttcaccaacaacggtcagaccaagggcggcaagcagctgcacttcaaggacggcaagggcggtgtggactccgaaggcatcacgctgatcaacggagattcatccaagggcatattcatcggcgccgagcgcgacaacgaaaacaagaatgtgccgcggccttccattctgcagtatgacgtgaccgcgaaaaccaccgacgccaacggcgacggagcgcaagagctgaccgctacgcacgagtggaatctcatcacagcactcacacagttcggcgtgacgctgggccacggagcggacgccaatcttggggtggaaggcatagcctttattcccgactcggtcctgaccgccaacggattccagtccaaccttgacccgaagaacgtaatgacctacgacccggacggtttcggcaatgatttcggcggtctgttcttcgccgcactggagaaaaccggccatatctacgccttcgcactgcaaaccgtgaatgatgaggacctggtgcatccggtggccgacatcgacctgccgcagtccgcggtgaacgccggctatgatggcccgcgcgatctgacttgggacgccgagcacaaccagctgctcgcccaaagcgacaatgatgcgaacaccggtgccaaaatcggcacctacgagttcaagaacggtgtgctgcagctgaccaagctgaccgacactccggatgaaatccgtacgcagaacaccgaaggctttgccatcacccctgataccgaagccaccaaggtggtaaatggcaaggtgtacaagccggtgttctgggcagacgacggcgtgaccaatggccattcattgcgtatgggctatatggcaaccaatcagccggttcccgccagcaccaccatcaatctgctgaacttcaacgatttccacggccgtatcgacaagaacctcaccgtgccgttcgccgccaccatcgagcagctcaagggcgaataccctgactcatcactgctgctgtccgccggcgatagta

SEQ ID NO: 1811 - DNA, 12158 bp, Unknown
  MAG_14  MAG No. k141_40558
acgcagtcgacttaaaatcgatcgcttcggcttgtgggttcgagtcccaccggaggcaccttaaaatcggcctgtggccgatgccgttttttgcggctgtgccgcggtctctcccccagtcggcttcgccgacagctcccctcgtcagaggggctcgcagcttactatgtggagagcttataaggccgaaacaaaaggccgttaggctatgtggcgttgtgacgatgtacctgatgaaacgaggaatccacatggcttcacgctggaccgatgtcgaacgagtcgaacaaggcgccctgcccaccatgcttgcccaagccgtcattgcgggcactgcactcaccgttggtgccatcgcctgctcgggattctatctgtccatgatcggcaatgtggccgcactcctgccgtgggcgactatcgtgatactgatcgccgtggcgttcacctacatcgtcggcttcgccctgttgtggtgtgccgaagccctgaccctgcgtgccaacgacaaactcaagccatggctgtacggcgtcgtcggattaatcggctacggcgtgtggggcatgttcgtgatgagcacgatgatgaacacgctgaaccagccgctgaacggcgtggtgttgtcgaacagcgatgtgatggccctgaccgtcaactacgcggtgttcggcttcatcgccttcctgttggcacaggcgtacgcgcccaaaatcgccaccaagaagggactgaccatcgggctgatggtggtgcagatcgtattggccatcatcggtatcatcgtactggttatgatgttctccgcactatctcactgactgacttatcgctcgccggcacgacgcgcgcggccatcatcgcgcaaagcgaaagattccgggcgctaggctggaatacgatatcgtgatggcatgacgcctggtgacaccggcatgccgaaccagcaggggagaaggagccaaatgttcagtgtgcttgacatgttcaccatcggcgtcggaccttcatcctcgcacaccgtaggcccgatggtcgcggcacatgcctttgcctcctcgttgctggccgaccatttggtcgatcgcaccgcacgtgtcaaaatcacgctttacggttctctggcgctgaccggtctcggccacggcaccgatcgtgctgcgatggccgggctcgaaggcaatctgccggccaccgtggataccgaccacatgatgcgcatccgcgagacctgcgcgttggacgatactctgaacctcgccggcctcaaacgcatccatttcgactacgaccgcgacgtggtgttcgaacaatggaagcgcatggccgcgcaccccaatggcatgcgattccaggctttcgacgccgccgcaagcttggtcgacgaacaggtctggtattccatcggcggcggattcgtgcgcaaaggcgctcccgaagacccgatgatcggcattcatgaacgtcctccggaaggcacctcctttgccgacgcggacgaatcatcatccactgatttcggcgtcgaggcaccctacccgttctcatcatgcgccgaactggtgtcgttgtgccgggaacatcatctcagcatcgccgaacttgtatgggccaacgaaaccgcttcacgctcaggcatccaggtccgatccgatattgatgccatctggcgtgttatgcgcgcctgcgtggaccacggatgcacctcggcggagcccacattgcccggtggccttgacgtaccccgccgcgcgccgaagatgtatcggcgtctcgcttcgaattccgatgtgctgcgccgcgacagccggcgcaaagacgccgtgctcgagtcttccgacgccgcatgggtggatctcttcgccttggccgtctctgaggagaacgccggaggcgggcgcatcgtaaccgctccgaccaacggttccgccggcatcattcccgccgtgcttcactattactggcatttcgtggacaacgccaatgaacagggcgtggtcacgtttctgctgaccgccggtgccatcggatacctgttcaaacgcaacgcctcaatttccggtgcggaagtcggttgccagggcgaagtcggctcggcctgttcgatggcggcggccggacttgccgcagtcatgggcggcacgccggaacaggtggagaatgctgctgagatcggcatcgaacacaacttgggcctgacttgcgatccggtgggcggactggtgcagattccatgcatcgaacgcaacgccatggccgccaacaccgccatcaacgccgtgcgtatggccatgctcggcgacggctcacacatcgtgaccctcgatcaggccatcgaaaccatgaagcagaccggtgaagacatgatggccaaatacaaggagacctccaagggcgggcttgccgtcaatgtcgtcgaatgctgattgacatgtctggtattcaccagcatgatgaccggaattgacgtatacggccagcgtgtcgtatcgcacagggatgaaggactaccgccgattcgccgatggtgctaaggtagggcgcattgtgtctttgaaggaggactaatggcagatcagatgcctcaggtgaacgccgaattcggcaccacgcccgttatcgagttcccggcgcccgaagccccgaagggcctcaaggttgtggagctgaccgagggcgacggcccgatcgtgcgtcgcggcgacaccgtcaccgtgaactaccacggcgtggtgtggggtaaggacaccccattcgactccagcttcgaccgtcatcagcccgccagcttcggcatcggcgtgggacaggtcatcaagggctgggaccagaccgtgccgggccataacgtgggctcgcgtctggtggtttccattccgccggaatacggctacggttcccgcggcatcccgcaggccggcatcggcggcgaggacacgctggtgttcgtcatcgacatcatttccacccgctgaccataggtcagcacatgacgaacgccggggtcatagccggcgttttgtcataaataacgaaaattgtttcagcatcgacaacggttcaggaggacgatatggctgaggacaaggtctacctgctgacgcaggaagcatacaacaagatgaaggaagagctcgcccatcgtgaaggcgagctgcgtgaggaaatcgcgcacaagatcgccgtggcgcgtgccgagggcgacttgtccgagaacggcggctaccaggccgcccgtgaggcgcagagcaagaacgagggccgcatcaccgagctcaccgtcaagctgcgcgattccaagatcatcgagaatgccccggaaggcaccgtgggcgagggctctgtggtgaccatcgagctcaacggcaacgagatgacctacgtgctcggcagccgtgacatcgtggccggcaccgactacgacatcatgaccccggattccccgattggcaaggccatcgaaggtgccaaggtgggcgacgtcgtttcctacaccgcaccgaacggccgcgagctgtccgtgacggtcaaggccgccaagccgctggcctgagttataagtgactagtatgcccccgtaggcgggggcatacttatatgtcgtagcgtttattgccacagcgagacgatcaccatgtagatggccaccatatggcaggcatatccggccaccgttccgcagtggaaaatctcatggaagccgaagacgcgaggccaagggtcgggcttgcgcaaggcgtagacgatggcgccgaggatgtagcaggcaccgccggcgcacagcagcaccaccacggctggccccgcatacggcgaattccagaacatcaccatataagccaggccgtagatgccgaagatgatgtacaccaccgtatacagccagcgtggtgcattgatccagatcacatgaatcacgatggcgatggccgtgcacgcccacatcgatatgatgatcacattgcgccagaacggttccagcgcaaacgaaaccggggtatacgtgccggcaatgagcaggaagatgttgacatgatcgatacgccgcagcacatcggtgacgcgcgggctccaatcgcccagatggtagcaggccgaattggtgaacagaatcagcgacgctgtcatgaacacggcacacgcccacttcagactcgcgccatgtgccaggcatataagcacgatgcctgccgccaatgacaggggagcggcaatcgcgtgaatccagccgcgcatcaacggctttggtcgtccgtgcacgtcgagacgaatcttgcgttccacttccgcaggggcaatgccctcgattttcagcgcacggtgctccgctttggcgagcttgtgccgggccttctcctcggctttggctcgaatggcctcggccttgaactgggccttggcccgtacggcatcagccttggcctgcaacgcctgttcgcgcgcctcgatagccgcctgacgcttggaagcgatggtggcatcctctgcaatcgtcgcgctgttatgagcgtcgtgatgcatcgtcttttccgcgtcgtcggttgttgatgccatggtgatgcccccgtttcacgagttgacgatacgcttcttacgctgccgtaacctacgttagcgtaacttttatgcttgtcaataccgactcacacgaacactatcacccaatggtggcgatactatggaatccgaagatgagaacgtcacagcaataaggggttcggtgatggtgtattgcacggagtgtgggtttgccaacgagcaaggaaatgccttctgttcgcagtgcggaagcccattggagcagcccgaggccaatccggcggcccctgcctatgacgataacgcgctgacgctggtgaagcagccggcggcgccgttgcccgccgtcgcgccgccaacggcgccgggttccgcggtgccggggcctatggcaccgggacccatgaccgctggccctgcggcacctgcttctcctgaacctcccgccgggcgtcctggcggcgatcacaccaaagcggtggtgattgtgctcatcgcgctgatttgcgtcgtggcgttggtcatcggcttgttcgtcacccatagcatgggattgtggggagctcagccgcaggcgcaaacatcggtacagtcgaccgggtccgatgcgtcggattccgccgatgatggcacgacggattcctctgacgccaagtccaaggccaagaagaacacgtctgatagcgccaaagacaagaacagcgacgattcgtccaagaaaagctcgacggagaagtcgaagccttccactccggtgatcacatccagccagttgtctgacatcgcggattcatactcgtcctccgatgtggccgtctccgccatggtcatcgatggaacatacgccgattcctcagaggacgccaccatcgcgaccacgtcgcagtccggcaagcaattcgtggctgccggtctctatctgccggtctatcttgcggcccaggacaatggcgatgacaacgccaaagcgcaggcaaacgcgatgatgggttccatggacaacaatgccggcaatatggcggccgcggcggtaggtggctggagcggcgtcaattcgtgggcatcttcgcatgggtataagggcacctcgttcaaccgcgatttcggcgatgtggcggccagcaatgccggttatgagaattacagttcctcccgcgatgcggcccgcatgctcgccgcagtggacgccaagggaggcgcgtcattgatgaacgcggacattgcttccgaaggcgtaaccattccgtccgacatgatcgtgcatgcccaccgaggccaaggcatccaggacacctggaattacttcgccatcgtcgaagccaatggtcataaggccgccgtggccgttgtcacccaatatcaggggcagtcggtggccgcggacctgatgagccgggtgctggccagtgttgacaagacattggggcagtgacggtggctcggcataccaagcatagtagcgacacgcgtgcaacaggcagcgtcgtgggattgatcctgatcgccgccctgatcgccgctttggtaatcggcgtcggtggatggatgtacgcgcataacggtctcggcgcatcgcacgccaaaacatcgcccgtcgcctcggcatcggactcaccggcaacagcgtcggcatcgtcgtcaacggcgtcatcgaaacacgaacaacgccctgtgcatgacaccttggagcgcaaggcggcacctgctcccgacctgaccacggtggcggaagagaagcggatgtcagatgtgtcctcggcggtcacggcagctgtggccggcaatggaggcacctggtcggtgtatgtcgaggatctggccacgggcaaaaccgtgagcgtcggcggccagcccatggtggcggcttcggatatcaaactgtacgtgatgcttgccgtgtacgataagcaacatgccggcaccttggccgcgggcgggcaagataccacctcgctgatcaaccagatgatcaccgtcagctcgaacgctgccaccaatcagctggtattgatggtcggcgatggcgacatggccacaggcatgcaacgggtgactggtacggccgcccgatacggcttcagctcatccaagcagttgcgggtgttgtccgatgccggcacagacgggaccggcaccgagaactggacgtcggcttccgattgcggcagattcctcgctgcattgtaccgaggcaaactggtttccgccgaagccagccgctccatgcttgacgtattgctcgggcagacgcgacgcgccaaaatacccgccggagtaccgtctggcattcaggtggccaataaaaccggtgaactggccggcgtggaaaatgatgccgccgtggtgtggggcaaggccgcggacggaacagaacgggattatgtgatggtggttatgacctcgggagtggtctcgggaaccgcgcagcagcagatcgccgcattgtcctctcaggtgtatgaggcgatgaccgcctgaacggcgggcagccgtgcaacgcgattggtgcggtattgaagatgcgatgtcgtaatagtcgtcatacttgcccgtgtggcttgccgcaatggcggcgacgtgtctgcgtatgataggggcatggctgatttttcacacatccttgcaacgcgccccgacttcgacgacgaggaccgcgagtggctgcatcatctcgttgccgattggcaggtgatcgccgatctgagctttgccgacctgctgctgctggtacagaacggtgacggcaaatacgtggtggccgaacaatgccgcccatccaccgtgatgacgctacgggcggaagacgtggtgggaaacgtcatgccggatgacatggtcggcgaattggacgccgccatgctctccagcgtggtgttccgctccacggtattgagaaccgtgggcaaggcgaccgtctgcaacgtgtacgcgccggttcggcacaatggcaagaccttgggcttggtcgtgcgtgagaccaatatggccacacgagaatccaacggtcgatatgagtcggaaagcattaacgcgggcaaacagctgtacgagatgattccgcgaggccagttcccctacaaggattcggtgatgagccagcgccatatcgctcgcgtggcggacggcttcatcatcctgaccatggacggcgtggttcgatacgcagccccgaacgccatcagctgctttaggcgtctcggcctgctgaccaccatgcctggccattacctcagcgaactcggcacacagctgttgaaggagaacgaccccgttccggaaaccctgccgttggtgctggcgggcaaagccgcggtcgactccgaactcaacgccaaccgttccgccgtctcgatacgctcgctgcccttatatgacaacaacggtcgtatcggagcgattctgctatgccgtgacgtcaccgagctgcgccgtcgtgagcaggagctgcagaccaaggacgctacgatttccgagattcaccatcgtgtcaagaacaacctgcaggccgtctccgcattgctgaggcttcaggctcgtaagaccaagtcggatgaggtcaagaaggaattgcaggaggcgcaacgccgcgtgcagaccattgccatggtgcatgagggattgagccagaccgccgacgaggtcgtcgacttcgacaaggtgattgccaacctgctgcgcatggccgtggacctagccacgatgaaagaccagcacatcgatatcaactacatgggcaagttcggcatgatgcccgctcaggatgccacgccgctgtccctcgtgctgaccgagctcatcaccaattcggtggagcatgggttcgaaggccgcaaggatggccatatcacgatttccgtgggccgctccggcccgaacctcaatgtggtggtcgaggatgacggttccggtctcggctccgaagaacagggaggattggctcgttcttccggttctggtttgggcacgcagatcatcaacacctttgtgaccaatgatttcggtggttccgtgcattgggagccgcgccgcgaaggcggcacccgcgtggtgcttgatatgaagctcagggccgctcaggatgagtgatgcgaagcccaaaaataaggaaaccctcccaagtgggagggtttcctagtatgacgaagcgataatcaaaacatcagatttgcatctgcatggcctgagaacggcgggcgcgcatggcgcggcgcttcagcgcacgacgctcatcttcgctcaagccgccccacacgccgtaatcctgattggtgtccagagcgcacttcaggcatgcatcaatcaccttgcaggtgcggcacacggccttggcctcctcaatctgctgataggctgcaccggtgttgcccaccgggaagaagagttccggatccttgtcacgacatgcggccttggctcgccaatcaaaagcgctgctcattgcttgcctcccttaaaagccccgtggctggtgttgttccttaagtccagtaccaaggtaaccacgaaccgtggtgattttcaagaggtttcgccgagaaaaaaccgaagttttcacgaagcgcactgcaccagacatgccgatgtgccctcgatgagcacggcccggcccgcgttgtcggcatcgatatgactcatcgtatccaataggcgagcggggactccggccataaggtcagacgttcgttccccgcacgggaacacgattctggtattgcaatgctctggtatacgtatcgggcgaatcgtgctgacggcgaataccacgctgacggactcatcggccaacgcatgtgtgaaagacagcgcctgctcgtcggtgcggaatgggtcgaacaactcatcggcgtcgtcgacgaaccacacgatatgcggaggcggtggtgcatccgagctggcatacggcgtgcagcggccgttgcgaagccattgcgatccccatacccggcgatgcggggaactgacacgtaccgccaagccatcagccatgctggcgtgtcgagccaatgttttcagcaacgtggttttgccgcgcccctgcgggccgatgacaccgatattgccaccggtgagggataccgtcgcttctcgcaggttgatgccatcgtcggcaagtccaaatcgaatgcgttgcggtgcgtgattggccacagtccggtcttttacgtgccggggaagtggcgcggtaaacagggacggctgcggcgggctcccgacgaaccgcgatgcgaacgcgatctggcggcataccgcatcgatatcgcgcgccgttgcacagcggaatgccgtcacctgttcggaatcgttgcagaacgccgcaccgggcattgccggactgaggtcggcggcacgaccatcaccaagcagctcgcatgattgcagacggtcccgaacccgtaaacaaatgctgacggacatattcgccttcatatcggcactgacctgacccatcggattctgcgtacaggcgatcagatacatgcccagtgacctgccgagcgaggcaatacgcaccagacgattcacataatccgggagctggtccttcagggcatggaattcgtcaatgaccacgatcaggcgcggtggcggattgaccatatcacggatatcggaagcatggacagcggcggacagctgttcacggcgtgtcagttcggcttccagcgcacgcaacgcgcgtacggcatgcgccagatccagatcgcatacgctgcccacggtatgcggcaaccgttcgagtttgcggaacgcggaaccgcctttgaaatccaaaaacacgaaattcagatgctcaggcccgttcatcgaggcgagcgccagacaccagctttgcagcaacacggatttgccggaaccagtggtgccggccaccagagcatgcggcccctgacggttcagatcgagcctcagcggctcgcttccggtcatgccgatcggcaccgcaaggtcaaggggttcaagccaatggcccacaatggtgcgccatggcaggcgtgcgaagtgcagcagcgattctatcggctgcgacggcgcatgacggaggtctgcggcgcgggcatcggcatcgtccgtgataccgatatcgatcgttgcctgttgcggggcgggggtcttctccgggcccggaggtgggggtagcgtcagcagcagggacacgagacaggcgaatatgcctggcgtgatcatggcggcgaacagccattgcccgtgcaacagcagtatgaccatcatcagtgcctgcgcgatcatcgggcacgccgcggcaagcatggtcaggcgggcgcgcaatggcggcgcgcccaaacggtgcttcgcccgggatacggcggatgccgtatgggcggaatgtcgcttcgaatcgttctgctgtgatgccatgcttccagcgtgggggagcgcatgccgaaagcgcaagccgaatcaaggtatgtggttctagcttgccgagttatccacatgacattttgcccgtgcatgattggctgcgtgggcaacggcggcgatcatgcgccgacgatgaagccgatgggctccgggaaagcgtcggtcagccttccgccagattgcccacggcgccggccttatgcgtgccgtcggcaagctgattgaacagttcggtgttcctggcgtcatcgagcagcaccgaggagccaacgccatcaacgtaataatctgggtcggaccagtacacgctgccggagatgccattcgagccggtggcgcttttgaacgccaacgccatggtgagcaacgtgtaagggttggttttttcatccacggtgagtgcgctcatcgcggcattggacactgccacgactttggacggattggtcagggtcccactgctggaagcctttttgacgatggccgagatgacctgccgctggcgttcgttgcgtccgaagtctcctcgcgcgtcggcgtatcgcatacgagagaaggacaatgcagtggaaccatccgtcgtatggcatcccgccttccagttcagtccggaataggaatcctgaacatcctcgtcatagcacagttcgataccgcccaaggcgttcaccacgttctgcagaccgccgaacttgatctgcgccacatggtcgattttctggccggtaatctgctcgacgttgcttaccaaggctttcttgccggcaatctgcgccaccgcattgattttcatgtactggtcatcgacgttcataagcgaatcgcggggaatggaaatcagcgaactcggcccgcttttaggcttgatcagcaccagaatcgtatcggttctgaagcctgagatattgtccacgccgccgtaatcggtggaaccgtctcgctcgtcggagccaagaatcagccaggtcgaggccggcgtgttgggggtgtcggtcagccagtcgctccggttcagtttgctgtccacccattgccaggcaccgaaaacagaaagaatcaacgccgccaccagtaccgcaatcgcgcataagatgatgcgcaaggcgtgcggccggtgtgccgttaccgttttcgccgttgccgccgccggccggccaagatggctgaacttcgtggacacgtttgctgctggcgatgagggccgggaaaccgacatatccgacggattgcgcacg

SEQ ID NO: 1812 - DNA, 23583 bp, Unknown
  MAG_14  MAG No. k141_41360
cgcaggaacttctcgacgtcatcggtcaggcccacgcggtcgtacagcgactgggtgtactccacttcgttgtcgtacagctcgttgagcaggtcgtacgtgtagtcctgcagatccaggcgctcggcatcgctcagctgggcgatgcccttctggtacttgtagccgatgtagtagccgtggacggcctcatcgcggataatcagacgaatcacgtcagcggtgttcgtcagcttggcgtgcgcggagaagtacatcggcagatagaagccggagtagaagaggaaggattcgagcagggtggaggccaccttgcgcttgtacgggttgtcgccctcgtagtagtcgagcacgatttccgccttcttctgcagaaactcgttgttctcgctccagtcgaatgcggcatcgatctgttcggtggagcacagggtggagaagatggacgagtagcttttggcgtgcacggattccatgaaggcgatgttggtgtacacggcctcctcgtgcggggtgagcgcgtccggaatcaggctcacggcaccgaccgtgccctggatggtgtcaagcagggtcaggccggtgaagacgcgcatggtgagcgtgtgctcgtcctcggtcatcttctgccagctggggatgtcgttggagacggggactttttcgggcagccagaagttgccggtcaggcggtcccagacctcaaggtctttctcgtcttcgaggcggttccagttgattgcggagacgcggtcgatgagtttcagcggtttgcgcggaatggaaatcggtgccatgagtagtgttccttttactcgttgtcgttgtcgttatcgtcgttggacttgttttcgaactcctccggcgcggtcagccggagcagtgctctatagatggttcgtgacattgttggttccttagatggtggagccccccctcagtccgcttcgcggccagctcccctctctgaggggagctgtcggcgttagccgagtgaggggagtaacaacggctctctggttgttcaatgcgtgcggagaccgccgtctgaggccgaaggcgtacgaaggtacgtcgagtgccgaagaaaggcggtatacgctccctcgaacgatcagagcatgcaggagacgcagccttggacttcagtgccttccagggcttgctggcggatgcggatgtagtagagggttttgatgcccttgcgccaggcgtagatctgggccttattgaggtcgcgggtggtggcggtgtccgggaagaacagcgtcagcgacagtccctgatccacgtgctgggtggcctcggcgtacgtgtcgacgatggccttccagccgatctcgtaggcgtccttgtagtacccgaggttgtcgttggtcatgtaggcggccgggtagtacacacgcccgatcttgccttccttgcgaatctcgatcttggaggcgatcgggtgaatcgagctcgtggaatggttgatgtacgagatcgagccggtgggcggcacggcctgcaggttctggttgtagatgccgtccttcagaatcgcgtcgcgcagggcctcccagtcggccgcagtcgggatcgcgatgccgtactgttcgaacagcgcacggacccgttcggtgcgcggagtgagcgaacgacgaccatcggtgtacttgtcgaagtagttgccctggccggccggcttggcgtagtcgctcgtagcgaagctggcgaacgtgcggccatgctccacggcgagcgcgtgcgaggcacggtaggcgtggtaggccacggtcatgaagtacatgtcggtgaagtcgaggccctcttcagaaccgtactggatgccttcgcgggccaggaagccgtgcaggttcatctggccgagaccgatggcgtggccctcctcattggcgcggcgaatcgaaggcaccgcgttgatgctggtgtgctcggccaccgaggtgagtgcgcggattgccgtctccaccgtgtggcccaagccgccatccatcgccttagcgatgttgagcgaacccagattgcaggagatgtcgcggccgacatgcgcatacgtgaggtcctcgttgtatgcgctcggctcctgaacctgcaggatttccgagcacaggttggacatggtcacgcgaccttcgatcgggttcgcgcggttgaccgtgtcctcgaacacgatgtacgggtagccggattcgaactgcagttcggcgatggtggtgaagaacttacgggcgtcgatgtaggtcttcttgatgcggtcgtcggccaccatctcgtcataatgctcggtaacggagatgtcggcgaacggcttgccgtacacgcgctccacgtcgtacgggctgaacagggccatctgggccttctgtttggccagttcgaacgtgatgtccggaatcaccacgccaagagccagcgacttgatgcggatcttctcgtccgcgttctctcgcttggtatccaggaagcgcaggatatcagggtggtgggcgttgaggtacaccgcgcccgcgccctgacgtgcgccgagctggttggcataggagaaggagtcctccagcagcttcatgaccggaatcacgccgctggactggttctcgatgtgcttgatcggggcgccgagctcgcgcaggttgctcagcagcagggccacgccaccgccgcgcttggagagctggagggccgcgttgatgccgcgcgaaatcgactccatgttgtcttcgatgcgcaccaggaagcagctgaccggttcgccacgctgggccttgccgaggttcaggaaggtcggggtggcgggctggaagcggccggcaagcatttcgtcggcgtattcgatggcctgctgctcattgccggcggcgagctccagggccacagcggcgcaacgctgcgggaagtcctcaagatagaggcgaccatcgaacgtcttgagcgcgtaggacgtgtagaacttgaacgcaccaaggaaagtgccgaactcaaagccggcggattccacgtgctcgtagatgcggtcgaggaattcagcggagtactggttgaagaccgcagggttgtagtactggttgctgatcaggtattcgagacgctcggcggtggaggcgaaccgcttgctgttggtggccacgtgccctgtcacgtattcgcgttcggcggccttgtctttgtcgaactggatcttgccgtcggcgtcatagaggttgagcatcgcgttgagcgcgtggtaatcgtgcgccgggtcgtactgttccgctgcggtgtcggcagtattgtcgagcggcaggccggtggcggtgaggtcagtcattggaaatccttggaatatggcagaagtgtgtttactcagacagttgctcccctcagtcaacttcgttgacagctcccctcggagaggggagccaatacctcgagggggtcaagatttactgttcggtgaagaagcggacgaggccgtttcgcacggcggcagtgtcttccggggtgcccatgagttcgtaacggtagaggtagggcaccttgcatttggcggcgatgatgtctccggcggcacagtaggcctcaccgaaattggtgttgcctgaggcgatgacgccgcgaatccactcgcggttggctggatcgttgaggaagcgtttgacctgaatcggcactgctttcttgaccacgccgccgccataggtgggcaccatgatgacgtacggttcgcggacgtttagcgccgggtcggcggcccgcaacgggatgcggtagacgttgatgccttcgtcctgcaaacggcatccggccacgaaccgtgcggtgttttcggaggccgacgagaagtagaccaatgcgccgatcgtcttgccgtcggccgcgaattcgggctggctcagactcacgcggataccgtggctgcggcgcggttgtcggcggccacctgctgggcgacttcgcgaatcaggtcggggcggtagccggtccaggagttgtccggcgtgatgaccaccggagcctgctggaaaccggcggcctgcagctgctcaaggggggaggggttctgcgtcaggtccacggtttcaaacggcacacccagcttggtgagctggcgcttggtggcatcgcactgcgggcaatgcggcttggtgaacacggtgacggtcatggcgactccccttgatgtggttctgatgaacagtgaagcgaaggccatattacagcggtgtgatttgaaatcaaggcactatatgtagtggcgcgtgtcacataacaaacctagatatagggtttttcgttgatattccgccattcccatgcacccccgaaaatcggcgtgcagcgacccgcccaatcacatgtggcattgttcacatttgcgtttgaaccgctcttcgactgatcctcaaccgccctgcaaccgccatcttgagtttcgaggggctgttttgaccctttccggagatctatctccgtttcgaggggctggtactcaagtaagcgcatccccaaaatggcggaatgacggtggggcgaagccgtttatacccgtgttctagcgggccaccagcccctcgaaacgggagtaaacctctacggaaggccaaatcagcccctcgaagcggagaacggatacctcggcaccccgtgtggagccagaagacccggccggatgtccaaacgagcatccggccgggccttaaaagtagttgttcagttatcagaatcgatgcggcgcgatactactccgcgtctttacggctccaacagatcttcgatgcggcagccaagcgtgcgggccaaagcgagcacggtggagacggcagctttgccaaggtctttgcggcgctgctcgtacatttggatggagcgcagggtaacgccggagcggcgggccagcccggattggctgagtccggcgcgcacgcggatcgtgtgcagccgggagtcgccctcggtgcgattatgggcggcccgctcgtcgtacacgtcgacgaatcggctttcgtcggcttcgtgcagagtcgggtacagtcgcacgatatcgtcgagcgacagcacatcgagaatgtccgagaaccgcactcccctggtccattggcagtatgcgagtacccatccggcccagtattcgggtgttgagccggcgcgcagtgcggctggcggcatatcgagaatgcgcgcccaaccggtttgccgcatgatttcggccaccagctcctcgccggacatgccacacacgtatttgggcgtgcctcgcccgaaaagcgcggccgcctcggaggtggcgaagaagtccatgaataggccgaccggcaacccgcaatcgttcagcgcataatcgaaggcgccggccaagttggccatggcgtccggcaagtatgtcccatcataggcggggatcatcgttggtcactttctcgcggatgatgtcgcgcatgaacaggccgtcgagatcggcttctgcacttttgcggcggtaggcttcgcgagctgtgcggtcgcgctcgttacgcaatccgtggtaggtcgaagcgcgggcgatttcgcagccttggaaccgcagtgccgcgaatgcctgaggactggcgagtacgatctgcttgccgagctcgcccaaccgcatcgcctcagcgagttggtcgatggaaatcgcgttattgacaaaagcgcgggcgaacgagaaatacgaatcgtcggcacgatatccgacgatgacgtcagcctgactggcatccggcagaaacacttgtttcagatattcgatgccttgcgcggcgacggcggtggtcggctggaaacgacggttttcgaccagcatggccagccagttcaggatggtgtagggcggctgggacaggtccaggaagaggagcccgtccgtggtcaacgtgtaccgattcgcgaaaccgtcatccattcccgcgcacgcccattccttggccagctcgacgctgcgcgtgcaatagaatccgcggccataatcgtcgttcggcttgaccagcccgtattcaggatgcttgatgacatgcgaagagccatgccacagttcgatcgatgcggtctccattggccggctccttctctctccttacatattcttgattatatcactgtggtgatagtcataagggaaatacgagatgaaaaataccgctgtatacgttcgtacacaacgtgaaatgtatacgaacgtatacaacactgatgtccggagtcatgctccgcagtggcgcagcggacgcgccactacaatcggaatatgggactgaagacgtggaagaagtggacggactggccgctgatggtgctgtccgtggtgtttctggtggtgtattcgtgggaaattctctcccgcacgcatatcgcgctgtgtgaaaccgtcatcaacgtgatctgggtggtgttcgtcgtcgattatgtggtctcgctgtggttggccgacgatcgctggcggtggttcaagcacaacctgttcacgctgctgaccatcgcgctgccgatgctccggcccttgcgactgttgcgtttgctgaccgtgctgcacgtgctgaaccgcacctccggcatggcggtgcgcgggcgcatcaccgtatacgcggtcggcgcggtgggaatgctcatgtacgtgggcgcgctggccgtgtattccgtggagcgcggggcgtccggatccacgatcaccgacttcggcacggcgttgtggtgggcgttcgtgaccgtgaccaccgtgggatatggcgacttctcgccggtcaccttccaaggcaagatcattgcggtggtgctgatgttcaccggcatcgcgttgatcggtattgtgacggccacgctggcctcgtggatcgtggatcaggtcaatctggagacggatcggcgcgaggacgctcgggagaaggaagtggccaaggaagccgcgcaagaggctattgcaacatcagccaatcccgaaatcgacctattgcgcgaggaagtgcgtgagctgaccgctacggtagccggtctgcgcaccgaacttgagcgacgttgattggcgaagcgggacaaacaacgattctgccaagaaggtccgcgtcagttgttgtcaccgcggattgcggcagaatcattgtcgccacggctgttttcttcagtcggctcaacccaacttttgataatttttatttttttgatatttttgataatttttattttaggttgattcagcgaggaggcggtccacatgaaggcaaaggaaaacccattcaagccaacggcaggaggggaaccgcccctgctcatcggccgaggcaaagttatccgcgatttcgagaaaggtctcgataacggagtcggtgccccagggcgcattatgcttgtcaccggcgttcgtggaaccggaaaaaccgtgatgctcactgtgttcggagaccgggccaaagcgcgcagatgggatgtcatcgaagaaacggcctctgccggactatgcgaacgccttgttgatgccttacgaaccgggcgaggggcccttgaccacctcactatccgaccatcgttgacttttgctggagcgggcatcggcctcggagaagccgaactatccccgaagcgtatgcccgaaacgttgagaagtgccattgccggacggttggatgcgcttgagaagcgccatgctgggttgcttatcaccattgatgagactcaagcggctgagcgatccgacatgattgccatcgccactgccatacagcatcaaatcagggaacgacgcaatatcgccatcgtgttcgccggtctcccacagatgatttctgatttgttcaatgacgaagtcatcacgttcctacgtcgcgcgaaaacgaacatactcacagatattcctcttgatgaagtgcgcgatgctttcgccacaacattccgcgcctccggcatgtccatcaccgacgctcaattaagcactgcagccaatgtgacagccggatacccctatatgattcaactggttggctaccatatctgggatgccgcagacatgcgggactcggataccatcatcgacgctgatgttacggcaggtatcgaggaagcacgtattgaccttgataacgccgtgtgcatcccggagttgcaaggcttatccaaaaacgaccgtgagtatctcgaagccatggcagcgtcagatggtccctctcccaccgtgaatgttgcacagcgcatgggcaaaacgcctaactatgccgccacctaccgcaaacgcctccttgacgccttcgttatccgcgaaacagaacgaggcgaagtcgattttgccgtgcccttcctgcgcgaatacttgcgtcggaatcagtaatcggcacaatgcacagtatcgatatattccgttccatataatgacttttcgcattcagatacacaatggacggcctgttgagtagcactcagcaggccgtccattctatttagctattcagttatcggagacacacctcaggccttggcctgagcgccagcgacctgctgggaggccatcacgccgaacaggtagccgtcttcggagaagtattcgaaggtacgaccggcgaagtcgcggcattcgaatctgatatcgttatcgattcgatcagcggctcacgatactgcccttgcatcgctgtgccactgttgaatgtgcccggctggctcacctttgggtcaccgccgacacatccttgatgccgatggttatagagtcgcaaattcacgactggcgcacctgcccacgcacctatcctgtcatttcgagcgcataatttgctaccacatccggtcagggcaatcgaccttaatggcgtaaacggcacttctcaatacgtaaacggcatttattcttggctcccctctcagagaggggagccaagaaatatcaagctcggcctcccaggagagagccagaataatgcaccggcaaggcattaggatggagggcatgagcgatttgaacgcgttgaatcttgagcccggcgaagtggttggtgggtatacgctgatctcccggctcggctcaggagctatggggtcggtgtggcgggtgcgcgacgacggcggcaccacctatgccatgaagattctgcgcgactccctgaccgacgagtcagtggcaggctccggctctgcgtccacggccctgcacgaccccgacctcaagcccgatgtcacgccgcgcgagcgcctgcggcgcgaggccatggccttgaagaaggtcaatcatccgggtgtgtgcggcatcgtggatatggaactcgacgatacgttggcgttcatcgtcactgaactcatcgagggcaagaatcttaaggatgatgtggccgccaatggccggtatgtgggcgacgatctggaacgcttggcccgcaagctcatcgaagccaccaaagccgtacatgcggccggcatcgtccatcgcgacatcaaacccaccaatgtgatggtgtcggccgccggaccggtattggtcgatttcggtatcgcgatgggcgagggcgaaagtcacgtgacccgcaccggcctagtgatgggtacacccggattcatcgcacccgagattattgacggtgccgaatccgacgacgccaccgattggtggtcggtggcgtccgtgctcgcttttgccgcaaccggcgcgcctgtgttcggcaccaagccgatgatggcggtacttgagcgcgaggcctcgggcaacgcgaatctttccggactaccggccggcacattggctgccttccgttctgcactggacccggatcgcagggatcgttgcacgccggatcaattgctgaatgccatcgccttggatgcgttgaatcccaacgcttggcagggcgagcaggcgggaccgttcgccgcgggagccgtggctggacaaccggctgcgatcgttgccgaagccgcggaggcgatgcccccttttggcgcggccggcggcgttgaccgcaataatccccgaaccatctggcgcgcggccgaggaagccgctgaggctcccaccatggccgtgttctccggcaataagggcgataacggcgatggcgaaaccgccgtattctcgccggctggcgccgctaccgccacgctgcccttagccgatatgccgccacgtccgccggccggtgcggagcaggccacgcaactgttgcccgacgctgctgccgatttcaccgacgacgccggcacacaggtactcaccggcgcgaccacaccgatgccggaccaaaccacaccaatggccggcgccaccacaccaatgaccaacaccgattcgactccggccccgaccacgccgctggccgagcgcaccaccgtactccccacgccgcagccgtcatcattccccccgtccggcaccgcccagagcagctggaatcccgcaagcaaccagcccacagcggtggaccccgccattcgcccggcattgcagcgcatcatcgaccaaaccgcccaagcggcccccaccgaaaccatggtccaaaatcctcccatgcccaatccggtggacgtgaagcgaggggaatatctgcagcgcggcaccctgccattgatcctgctggcggcgccgctggcggcactggcggcaaatgctccgctcgtggccatcatcgcggccactgcgttgttgtggctactgctcaccctggcctataacaccgaaccccagcttgagcgcgagggcaaacgcggcggcgagcgcaaaaactccgattcgtggattcgcgtggcgacttttccctggcatctggtcaaagccctgctgctggccattccccgcatactgctgctagtcatcatctatatggcgggaaccgccgtggccaccgcggctctggcactgcccgttcacaccatctcctggtatttcaccgcggattggggtattccggtgccgttgctcaatgatgtgccgttctccgcttccgggctggcgctgggcggtttcatggccatcggctggctggtcactgtgttcgccccacagtcgatgatgattcggctggggggcggcgtactgcgcgggctcaaacacagtcgcccggcgggcgcgccatccaccgaagtgggtggggctccacctgctccagtggcgccggcgcccaagggcggcgggcgcggcaccgtgctgttcaccatatgggccatcatcaccgtggccttgtgcgcgatgccgattctgggcatgccgatcaactggatgccgttcgcctagagcggggcggaatctcacacatcagccatccgcacacatggccgttgtgtatccgatacgttcgttccgtcacacttttacagggaattcacctcagatcagctctgggcgcagtcctcctcaggcccggtcattatgatggggcccaaacattgaagcgattgcaaggggatagctatgtcagatccgaagcgtcaggccaagcgtgccacacgcgctgagcgccgagcggccgaggaggccgcccagcaggcacgggccgagcaggcggctaaggaacgtaagcagcagaccatcatcggctgcattgtggtggccattattgtggtgctggtggccatcgctggattcgccgtgtacaaggctatgcggccgtccaacaccagcagcagtagccagcaaagcaacatgaccgtggacgaggcctatagcaagctcaagaaagtcagtacccagccggccaacgccgatgacaaggccggcttcgtgatctcgagcaaggggtacggtcagaaggccgaaggggcgcccaccgtttccatctacatggagccgctgtgccccggctgcgcctcggtgaaccgccagcttgacccgacgctcgtcaagctgatgaacgccggccagctcaacatcgatttgcacttcctcaatttccaggacaacaagagctccgacaactactccaaccgcgcgttcaacggtgccatctacattgccgagcatgatgacaatcccgatcacctcatgagctacctctccaacatctacgctgaggatttccagccgggcgaattgtccaattacgagccggtaagcaacgccaagctggagaagcaggccgtcaatgccggcgtgagcgaggatgtggccaccgcggcattcagtggtaagaacgaatacgtcaagtggctcaccgcctccaacaactacacgatcctacgccccgaactgttcaacagctccggcgcgttctcctcccccacgctcaccatcaatggcgaatactgggatctgaagcagctcacgctggcggacaccagcatggtggacggattcctcaagtccatcggcttggactccgatcaggtgggcgtggaaggccagatgccatcgatcggcgccaacaagaagccgatttcgctggccgattaattaccggcgcggctcggcctgaattgaccactcgagaactaccggtatactagagatttgttcaaaacgatttacgcgttaagaacaatcgcctctttagctcagatggccagagcggccgccttgtaagcggcaggtcgtcggttcgatcccgacaagaggctcgacgcgtagaaaagtggcgtattatatgatacgtagatttttctacgcatataattcttaccttgggtaagtactccaggagccttcccccaactatgggcttcctggaatgagggcggagcgtcccccaaccagctccgcgccttcaggggggcgggaacatccccttctctcccgccccctttttcttttctttttttgagctcagaacaatctgacgagcaggaatggtgacggtggccggtgaaaccgcagtacgggccggaacaaccgttacgatgggtggcgtaatcgttcatccagcaggaagagtatggcaatggcacggcgttggaccccgcagcggtttgttacactgcgtcgcatccgcgtaatcgcctgtatcgcggcgaccagtatcgcgctggctggatcattcgcgttcaccgcgcgtaaatccgtagccctgaacatcaacgggcaaaccacccaagtcaccacatatgcgatgacggccacccgtcttctggaggaacaaggggtggatatcaagacccacgatatcgtcactacctcgtccggcgaccaactcgccaatcatgccgtggtcaccgtacagtccgcctaccagaccactatcaacatcgacggcacgtccgttcccttctggaccgtggccaccagtgccgaccagttgctgggatttttcgaggaaaaccagaacaacgccacaaaaatcaccgtcgacatcgacaatgtgtacaaccagctcaccggcggactggtcatcaatcaggatggcccggtcaccgtcattgcggacggcaagacttccgtggcccccaacggcaaactgcccgcggcctccattcttgactccaaaggcatcgtgctgaacaaagaggaccgtgtgagcgtcgaaaaggacggcgataccactatcctgcgcgtacggcgcgtgacgcatggcgaggaaacacgcacagccatagtgccatactccacacaaaccatcatcgactccaatctgcctgaaggccagtcggagatccgccagcaaggcgtcaatggcgagaaaacccaggtgtataacgtcacgtatgtcgatggcgtggccgaatcggagacgctgaaatccgaaaccgtcaccacgatggccatcgaccagatcatcgccgtaggcgccgccaagtctgataccgataaaggttccgacaaaaaatccgactccgccgataacggcaaggccgattccggttccaacaatcagcacgagtcgtccggtaacaatgccaacaacacaggcgacaagaacaacagcagctctggcaacaacacgaacaccgataccaacaacaatgccggcaacaccggcggcaacaactccggtaacaccggcaacaccggcaattccggtaacactggtaattccggtaacaccggcggcggtacgaacaacaattccggctcttccggctccgattcaggaacaaccaccacgccctccggccgactctggcacgccaccgtagcccaggctcaggcctatgccgccggtgccgccgcgcagcgcgggtggacaggcaacgactgggattgcctggtcaaactatggaaccgcgagtcccgttggctgtggtatgccgaaaacgcgagctccggtgcctacggcattcctcagtcgcgaccagcagacaaaatggctgcgttcggcgccaattaccgtgacgatgccgccgtacagatcgattggggtctgtggtacatcgcacaaacctacggcagcccgtccaaggcatggcaacattccgaacaaatcggttggtactgatcggttacgaagcccacaaggaacacacgcttatgaacgacaccattcccgccaccggtcacctgttaggtgccgccgatatccgtcgtatcgcggccgatgccggcatcagccccaccaagaaattcgggcagaacttcgtcatcgaccccggcacggtccgtcgtatcgtacgagaggcgggagtgaccgctgccgatcatgtcatggaagtcggccccggcctgggatcgttgacattggcgattctggaaaccggcgccaccatgaccgcagtcgaaatcgatccgccgttggccgaacgactgccgggcacagtcgccgaattcatgcccgaagccacgtcacgactcaccgtcgtcaatcgggatgccttaaccgtcaccccggagaacgtgcctgatttcagcgatgacgcatcgtttacgctggtcgccaatctgccgtacaacgtggccacgccgattctgctcacgctgttggagcgtttcgacaacctcggctcgttcttggtgatggtgcaaaaagaggtggccgacagactcgccgccaagcccggttccaagatctacggcacgccgagcgtgaagctcgcctggtatggcaccgccgaacgggtgggcaccatcggccgcaatgtgttctggccggctcccaatgtggattccgcgctcgtcagattcacccggtatcaggccgatgacccggccgccccgggagcctcgaacagcacggccgacggcggcgcacaacgggaactcgtatttcgtctgattgatgcggcgttcggtcagcgtcgcaagaccctgcacgcggcattgaagaccattgcgccctccgaggcattctccatcgccggcatcgatccgacccgtcgaggagagacgctcaccatcgccgaattcaccgctctggccaaggccatcgaatcgtgtggagatggagatgaggcacaatgagtccggtaatctcacatccacgcccagccgctgcccgacatcagttcgatgagctctcccccatcaccattacggtggattgcccggcgaaaaccaatctcaccttggaagtgggacctgctcacgacgaatggggcggacgccacgaactggacaccacctactgtgcaatcggcgtatacgacaccgtcaccgcaaccgccaagcaacccggagcgggattctctctggagctcgaaggcgcttatttgggcgacttggcctcctcacgcagcgacatgcgccgcaaccatgcggtactggccctcttcgccatggcccaggcggccgagcgcgagccggatgtggcgttgaccatcaccaagcgcattcccgtgggtgccggactaggcggcggttcagccgacgccgcggcgaccatgctggcggtcaatcgtctctgggagctgaactggcctatagagcgtctgcgcaccattgccgccacgttgggcgcggatatgccgttctgcctgaccggtggccttgcatacggcaccggtttcggcgaacgcatcacggatatcgcccccggcagccgcgatgagctggcgctgatagaacagggattcagcggcgaagtattggtcggcgcgtaccagtcgcaactcagcactcctgaggtctaccacacctttgacctcgtgggagccgcagaaggcgaccgcaatcatctgcaggctgcggcaatcagcctgcatccccgcagcgggcaggccatcgacgccgccacgcaggcgggtgccagccatgcattcgtctccggatccggcccctcagtggtcgctttcgccgccgacgaggcagcggcacaacgcattatcgatgtgtggcgcgatacggctgtggtcgatcgcattattcgagccaaatctcccgcacaccccaatatcggcgtcagacagtgacgctaaggtagcaaccagccacccgacccatgaaagaagtccaccgatgacgtatcaggttgatgaacgtgaagcccgcaaggcgtacgtgcgccaccgccagaccatcgtcttttccatcagcggcgcggtattggcagtagtgctggtcatagccctactgttcaatttccacgttttcggcctcggcgaagtggagactccggcccgccagccgaattacggcaacgcggcaccgtgcgcggtcaaggacagcagcggcaaagcgcaatacgtgtccaacgcttcggtcggcatccgcgtgatgaacggcacctctcacggccaattcgccaaggccgtgggtgaggctttggccaatcgtggattcagcgtgcagaaaatcgataactattccagcaccggcgttgaacgcaccaccatctacttcggcaagaacgccattaatcaggcgtatacgctgatcggcaatttcaccgacgccaccatgatcatgacggctcgcgaggatcaactcatcgatgtggtcatcggcgccacgttcaacgatctgcaggacaccaaatcctccccacaatccggtaagaccatcaccaatatcgagggttgcaaggccgccgatagcatgaccaagctgcccgccgacaccaaacacgacgcatacacggcggagtaaggcgcatacagcttcatcttcgcgaaaaaccgtacgctgacacgtattcagcgtacggttttttggtatcggactagtatcggactactgaatctcggcgtaccagcgcttgagttcttcgacggccacatcgtggtccaccggaccgttatccaagcggtattccagcatgtgcttgtaggcgcggccgatcatcgggccgggctccaggcccagcaactccataatttcgttgccgtccagatccgggcggatcgcgtcgaagtcctctttcttcttgagttcgcggacgcgctcctccatctcatccatggcctgggagaagatcatcgccttgcgcttgttttgtgtggtggcgtccgcgcgcgtgagcctgttcagccgctcgtacaggtgcccggcatccttgacataccggcgtacggccgagtcggtccacggctcgtccacatagccgtggaagcgcaggtgcatattcaccagttccgagacgtcctcgaccagatggtggtcaaaacgcagcgccttcaaacgcttgcgggtcattttggcacccaccgcgtcatggtggtggaagctcactttgccgcccggctcgaaccggcgggtcttcggcttgccgatatcgtgcatcacggcggccaagcgcagcgtcaggtcgggggcgggcaccgggccgtccgggccggtttccagggcgatcgcgcgttcgagcacaatcatcgtgtgctcgaagacgtccttgtggcggtggtgttcgtcgatctgcaattgcagggccggaatctccgggaagacgatgtccgcaagaccggattcgaccaacgcctcaaggccggcgcgcggacggtcggagagcagcagcttggtcagttcgtcgcgcacgcgctcggcggatacgatgtcgatgcggtcgcgcatcgaggtaatcgcctcggccgcgtccggcgcgatacggaagcccagctgggccacgaatcgcacggcgcgcatcatacgcaacggatcgtcgtcaaaggactgtcgcgggtccaccggcgtgcgcaacacgcccttggacagatcactggcaccaccaaacgggtccacgaattgcaggtcgggcacgcgcagggccatcgcgttgacggtgaagtcgcggcgggacaggtcgccctcaagcgtgtcgccataattgacctcgggcttacgcgagtccgtgtcgtacgtgtcggagcgataggtggtgacctccaccttgacctcggtgccgtccgggcggcggcgcatggcacccagcgtgccgaacttgcgccccatgtcccagaagccgtcatgcccccaccggcgcagtatcggctcgaactgctcaggccgtgcggatgagcagaagtccaaatcgtggctctttctatggagcagcaaatccctgaccgggccgccgaccaatgccagctcgtaaccctgttcggcgaacagtcgaccaagttcgatggcttcgggccatacttcgaaattcaatgggcaccttcccgcgtgcgacgtttttctgccctaccagcataccgttaccccacctgcacacggggttgagtaaggtggagaatatgattacgcccgccgaccttgcccgcatactggggcaaacaccagattcggcggatagccatacccaagaccacctgctgtatacgtccgaaactccgcatcattccgccgatttgggcgattctcccgatgccggcggcaccgcgagccactccaccaatcaggccgttcatcaagacgaagtagacgcagtaccgactgcgcaacattccggtgtacccggcacacccgcaacgcccgccacacccgcaccatccgaatccgaaatatcggacgccgccagcgacatgcccacaccgaagccgatgatgcccacaccggccaccgtcttcggcatgcatgccaccgtcaccatcgccactaccagcggcactatcgaggggcaggccgatggtatcgccggcgaggccggtgccgagacgattgccgaggtcgagccgattatcgccacggcacaaacgtccgtaaccatcgtcacgaacgattccgcggcgaccgcccacgcggccgtagatactgccgttgcggtcgccaaggccgccgccgcgcataccgcagcgataccgactccgcgcgacgtgctgatgccgcctgcggcacgtaccgcaccggccgcaacgccggtcaccatgccggtctcagcgccgtctgcagcaccagtgaggcccgcaacgtcagcgcatcccacgccggccacggtcttcggccggcatccgtccgcggatgttgcctcgccggaaccggcagtgccagtagaaccggtgacgccatccagcccgactccggccatgatgccgcaacgccgtacgtcggacggtccgaccacattcgcttcactggatgcccaggaactgccggtcgtacgcgaatattcggcaggcggtctgattttcgatgaccagaatcgcgtggccattatcgcccgtcattcccgctccggccatctcgaatggtgcttgccgaaggggcatatcgaaaaaggtgagaccccgcagcagaccgctgtgcgcgaagtgcatgaagagaccggcatcctgggcgaggtgatcgattccatcgccaccatcgactactggttcaccggcaccacgcagcgcgtgcataagctggtccatcacttcgcgctcaaacagaccggcggcgaactgacggtggaaggagacccggatcatgaggcggaagacgccatctgggtacgttttgaagatttggatgacgtgttgagctatcccaacgaacgcaaaatcgcgtggctctacgccaggaagaagaacaggcaggcaaacgagtgaacctacccggagtcttacgacattgcacacgtctggcacacgcactggcggctggcgtcgccgttgtggcgatgctggccgctccattgaccgtctacgcgaacgatacgacggacacgactgattcatccgatacgacggacgcaacgggcaatcagaccgagaatcagcccaagcagagcattgccatcacgcaaagcacccccatcgtcacctccaaatcgggctatcatgtcaccgcggtcatcagcaatacggacagcacggccacgtcaagcggcacactgcacctgaccaccaatacgctgttcacctttgtctcgcgcaccgatattcagaattgggccgagaacaacgcccccatccccacccccaacgagttgggttccgttgacgtgccatcgattcccgccggcggcactgccaccgtcaccatcgaggtgaacgccaatcagcagacccttgcctccatagggagctgggggccgaagccgctgatgctgtcgtatatcgtcggcaatcggatactcgccgatttgccgagttttctgacccgatcttcggatgggctcaacaccgcgacgacaccggccatgaacctgaccgtggccatgccctacaccgccagcggctggcaggtcgataacaaggccatcagcaatcgcattgccgaaaccaccacttcctcgacatcaacatcgtccaagtccaacagcacggacaaggccgacaagtccgataacgccgacgccggcaacgcggccaaagccactgatacgcaagccatatccttatccgagcaggatgccgataccgcgcgatcccttgggcagacattcgccaagcaccgctcgctgcaagtgatcgcggatcctctgtattggcgtcagtccgcagtgcaaccgtccattgccggcatcatgcagcccgccgactttgacatcaccgcctataccgcgctgggtgataccgcggcctacgaaaaggccggcatcaccactgaacagtggaacgccaagcaggcggccgcatggtatgccgccggaaacgactccgaaacaccctccgcgtacgcatggcagggcaacaactgttggacgttggatgcgctgaccgcagcacgcgagcagggctatgacacggtgattgccgatgcctctttcgatgccgaccagactgaagccgtacacacaggcacctacgtggtggatacgcctgccggcgatgtcaccgtgctgaaggagcaatcgaccttgggcatgctggccaagggccaagccaccagcacggacgcgcaggccgagtccagcgatgccggtcggttggcccgactggtcgctcagagcgcgttctaccagatggaacagccctatacatcccgatacctgcttatgacgttctcccgcaccacggaggccggctggatcgatcaggtgatgagcgccttcgagcaggcgtcctggttgaatctgacggacctgaagaccatggccgaggccgatccgtacaatgtcagcgattcggtcaatcccgacaaggccgatgatgccaacaccgccaatacccggtcggcgttgagacagttggctgacagccggcatgacatcatgcgcatggccacctccatattgaagaacgagattgattccgacgaggtctcgtcgttggccccgcaggccctggcccggcaggatgccaatgacaccgtctcgcacagcaacgatccgacgcaatggattggctctttgctggtgctgcatgacgatatggcgctgcgatccatgtctggctccccccagccgacagccacgcgaaaagccatggtcagagccgcgaaaacactggccagcgatcttctgaacggcgtacgcatcaacccatcggaatcaatatccgtgttcagcgaatccgcgaaaatgccaatcaccgtcagcaatgaccttccttatgccgtcagcgtgcaggtcaactcgctgactgactccatgcagatcgtcacctcgcgaaccactgacatcgatattcccgcgcatagcgacgctcaggtgaccttcaccatccgcgtttccacttccggctcatcgacggcccatgtgtcgctgagcgaccgggaaggcaacagcttcggcaacacgcaggataccgcgatcaccagtgtgatgcgcgtcagtgatgccagcggtttcattatcatcggcttcgccgtgctactgtgcattatcggcctgtggcggcagttccatcggaagaaggaccccgacgaatgagttcaaccgtaggtcgtaattccctgatcatggccacgggaaccgctgcttcccgtgtgaccggtcagctccgcacgattcttctcgctgcggccatcggcaccactggattggcggccaacgcctatcaggccggttccatgattccccaatccgtgttcacgctggtgtccggcggcatcttcaacgccgtgctggtgccccagattgtgcgcacgttgaaagaaaaagacgcccaagaacgactgaatcgtctggttacgttggccatcggcatcctgttggccatgaccgtggtgatggcggcggccagccctctgcttgcccgcctgtacgtgggtagcgacgatcaccagatgatagccctgaccacctcgttcaccctgtggtgtatgcctcaggtgttcttctacggcctgtatacggtattgggtcagatcctggccgccaaagaccatttcctcacgtatgcgtggagctcaaccggtgccaacattattagttgcgccggttttactggttttattctgctgttcagcaaggccaatgaacagcccctcgaattctggaccgccgacaaaatcgcgcttaccgcaggcacctggactttgggcgtggccttccaagcgctgatactgttcctgccactggcccgtatcgggttcaagtacaaacccagcttcgggcttggcggctttggactcaggtctatgggtcccgtggcgttaggctctttgggcgtggtggtcaccagcgagatctgcggcattatccttacccgtatcgccacatccgcaccacagcgcgcccacgaactgacgggtgccagcctgttcagcgtggcaggcaacgcgacctatcagaatgcgtacacactgttcatcctgccctattcgctcatcgccgtatcggtatccacggctatgttccccaaaatctcccgttctgtcgcagctgcgaatctggatgaggcacggcacgatctggtgagcgcgctgaacaacgtagggctgctgatcatattcttcgccgccgccatggtcgtgttccccgaaccgatcatccgcgcattgcttccgtccgtctcgatggacgagaccatgctgatttcctacgcgcttatcgccctatctgtgggcactcctttgggatcggcgttcctgttgatccagcgcacgttctatgcctttgaggacggcctgcaccccttcctgtccgcggtgatgcagtatgggttcacctcggtattcatgatgatcggcatgatggtacttcctcctgagcattgggtactcggcatcgcctgctcggtgacactcggcggattactggcgttgccgctgacgttgatgatgttgcgccgcaagttcgaaggcaatcttggcggtcgggagatcacgaggacatatgccaaggccattgtggcggcactggcttccggagttgtggtctggctgatcaaacgaccggtagtcgcactgttcggcgcggatattcgatcggtaggcgggcacatgagctggtggtctgc

SEQ ID NO: 1813 - DNA, 7849 bp, Unknown
  MAG_14  MAG No. k141_41361
caggatcaaggtcaccatccgcatggcctacggcttccaccacgcgaacaatcccatcgccctcgtcatgctccgccgcggcggactcgacatacgcccaccacaaccaagaacccaacccacgaaaacagcagaagcctcatatgtattggacatttctgcgcagagagggaggtgtaaccgcagcattacggtgtgagaacgcaaggttacatagctgggcattggctgtggcgttgctggacattgaccgtcgagccggcaatcatggcgcaagcgacaatcacgacacgccgttattgacataccgccgttcaatggtattgtaattacttgtgcgcttttgaagcgtatggatcgggcccgtagctcagctggttagagcgcatccctgataaggatgaggtcggaggttcaagtcctcccgggcccacagaaaaaatgaagcggctgcgagccgctctttttttctcacggggctatagcgcagctggtagcgcatctgctttgcaagcagagggtcgccggttcgaacccggctagctccacagacaacccttggaataataccgattctgagggtttttgcgttcttgttcgagggattctcccagtgcgccatggccctctccatcgaaaaaggggtggtcctgttaaggaccacccctcgaggattcagaccaaccgcgtggtcattgtcgctccgtcttcacggaacggtacacgaaaatccttcgccttgcggcgatatcgcccggacccggaggactacaccttcctctcgggtggaaggtaccggcagataattggctcttccggttttggtgtgtagggggatgcttataggtgggcttgtatggtgtgtctgaagccgccggtgtggaggaggctgcgggtcacgccaaaaccggaagagccgttttcttttccttctccggtggtttcgtcgttgaccgtgttgccggtggcttccttgcaggcttgtttgtaggcttcggctgggctggtgtggtggagggcgcggatgcgtgcagcggcgtgttcgatgtgttcgagcgtggcggatggcgcgtcggtcaggccgtggcgggcgaggacttcgttgcgccacgagtcgtagcgttgctcgcgcaccacgcgtggcttcctccgccccctgacccatgcgtcggcgtacgcccaatcgccttcctcgtagatgtcgcgtgcccaggacgccgtcggacggtcgaacgggtaggggcccgccggcagcggcaacttgtcgaccgtcgggtcgaacacagtgaatcgtcgccgttccctcgcttcgcgttcccgttccggcgctgccagcgcctccgcgacgtccgagtggaacgcggccatgcgctccttggcgccggaggacgtgaacccgtcgtcgggttcgcgcagtccgtgctcctcgagcagcgggtggatgtcgtggtccatgagccagcggagccgggacatgttgaacgcgaggatgaatgcgagcgagattgcgaccatgaggcccatcccggcccccatcagcagtgtgctcatttcagccggctccagcgttcggcgcccgcgcgcgggctgaaacgtccccgccagtcccacggtccgacgaaacgcaaggccaacagaatcggggagcatgtggcgaggaacgcccagaagaaagccaaccatccaatccagtcaggtgtggatctgccggtgtcgacccattgcgcgctcgaccagaacatccatgtcatcgctatggggaagcccgatatcgcgatgaggaacagcgtgccgacgatggggccgccgaacatgtagcgcagcttcgtggcgggcacggaggaggcgaatgccaagtcctccagcgaggcggggacgtaggtgttcggccggccgaacacgagccggcagaaaccccagtacaggaggagtccggccagccacatcacggcgaccgccacgtacgtgttccatgcgtcgcgggatatagtgaccggtctgagaaaagccagcagcgtcacgtcatcggtatgcgtgtggtgcgtcttcgtgtccggggtgagcagccgggcgatgccgtggatcatgaccatcaggccgggcgcagccgcggcggcagcgccgccggccgccgcgccagcccgcgcccagccggaatcgccgccgaaatccagcttgcgcttgaccggcgtcttctccagcgtgtcccagaacacctgcgccccgtcctcaagacgccccaccaacacataccgagtgaacaacgccaacagatacccccacttccaaaacccgagattatccttgaaatgactgcccgggtcatctccaccgcctctgtgcacctgattgtcgtaaagtgcgtctaagccgctacttatcagccatccggctccagtgccaatcgccgttccgacaaatgcgccgaccacggtgccggcaccggggacgatcgatccgacgaccgcgcccacggcaccgccaacggtcccaccgaggccatcaacggcaggcccgagaccctacgcggcatcgccctcggcttccgcaacctcgacaactacgtcacccgcagcctcctccacaccggcggcttcagacacaccatacaagcccacctataagcatcccctctacacaccaaaaccggaagagccggatgattccctgcaagccgatcacgccaatccgacccgacgactaatcagattgaggacggctgaattaagcttgtgccctcatgatacaacatgtcctgcgaccgacgccagacacaacggcagcattctgcccaccatagggcgtgtctttaaccagaaagtaccctcaaatacgttcagcaagatatatgcacgcagaacagcccttccgcattatcttatttgacatagagcatgccccttccattccacagaatcaagcaaataaacgagcggagagactgggcacaccgcaaaacaatggcccaacccctccgctcgtttgttatggaaggaagagggatgaataagtatgtttacttcactgacttgatgaagacgatcagcaccgcgccaatcagcgagcagaccgctgcaagcgggaagagtgcgtgatagcccaccgaggaaattagcgccgccgcaacatcccacgcaccatattcaggacaaatccagtccgttgttgtccttggctttgctcaccatatcagtcaaatcggggtcgtccacagacaccgcgttctgctgactgagcgtcaacgatagcgagccattataggagtcgccgtcttcgtccttgccggacacgcttatggcaatcgaattcatcagacgctttctgccgtagttcagatccacggtgatagtcggcatctccggctcttcatccgtgccgaaatcccagttgcgcacattatcgagcgcctgacggtactcatcttcagcatcgtccacgccggcatcctcgatttgctgaatcacccaggatttcagatgcggatactgcgcttcatgactgatccagtaattcacgaaatgctgagacaacgctttgatatcgatttggtacgacagctgcgtattgccggcagacttggcagacgatgtcttcgggaacagctggctgcgcacattcttatcttccagctccacgccgaaatattgttggatgaatttgctggcctcggccttcacctcggcagaccttttcgtgcccttggcccggtcgatgtcgttcgagtacccatcgtcgttcatcttgtccagctgatcgtagaacgtttgctccgcgccggtgatgtcccaagcaccgttcttgaccaacgcatccttgacgttcaatatcaagtccgccacatcactaccaacgccgttccttaagtcatcttcatattggtcggccgggcagtagatgtagtaggggtcgtcgtcatgccaaacgaatttctcggcgaatgcgcctttgtaccaagcgaaggtcgttgcatattcgtctgttttgctagtgaaggacgcggaggattcgttggtggttttgcccagcgaatacatgccagacatccgcacgtcaagagaatcgtcagtgatgctgtgggttctgagttcgtatttggtgctgcgcagagtggacagcgagttgatcgcgtcgaaggtgacgaccagcggattggtgggccggaagcccagcatcgctttgacggcggtgaagttggggatgatgaacgccaaggccgccaccagaatcgtcgcaagcaatgcgcagaaagcggcgatcagcttcttgctggatttgcgctgcggtgccaggacggcggttgcatcagtcgcctgatatgcggcaggagcgggaatcggcaaagccggcaggggaacggttggtgccggctgtggggcagcggacgcggcgtaaaccgatggggcaaccggcgcggctggtatcgatggtggtaccgcagacgccggcacagcaggtgccggtatcgacgcaggcggtacggctggcgatgcggccggtactggtgccgtcgcaactggtgcgctgtctacagacgctccacatgccgggcaaaatcgtgccggcccatcaactctatttccgcagtggccgcagtacgccatcgtgtgcctctctccctcaaatcggtctgattgccatcgcttcaatgttactcttcagcattacgcctcagccagcccctacgcgtaacgatacgagacgcggcagccttaatgcggttgttttgacgcgatgccaacatcgagctctggccaacgttctggtactcggctacatcttgctgcgagccaagaagcaggccatcgctcgcgccgacgaggccgaatggcggcctagcctcgctttaagcctcaggccagcacctccatggggtgataggtggcggtgtggtggccggtgatggggttccatacccgttcggcgaatgcgcgcagacgggcgacgccctcgcacagctcgtcggcatctccggcgtaggagaggcgcacgaagccgcgcccctcctcgccgaaggcctcgccggggaccacagccacgcgctcttcgtccagcagacggtctgcgaattcaccggagtcaaggccagtcaggcgtacgtccacaaaggcgtagaacgcgccttgcggttcgatcagacgcaataccgggcatccggccagaccgtccagcacgatctggcgcttggcgcggtattcctcgcgcatggcggccacgttatcttgcgggccagccagtgctgccacgcctgcgtattgcgccaaggagttcaccgaggagtgcatgagttcggcgattttgccggtctgttcgatgaccgcttcgggtgccagcaggtagccgatgcgccagccggtcatcgcataggttttcgacaggctttccaccacaatggtgcgctctttcatgcccggcaccgcggcgatcgatggtgccacggctgcctctcccccaagcgtttccccgaacgtttccccaaacacgaacggatggtaaacctcgtcggagatggcccaaatattgtgctgcttgcatacttcggcaatacgcgccagttcggcggcagaggttaccgcgccggtcggattgcccggtgagttgatgattacggcgcgggtgcgcggggtgatcgccgcttcgatgtccgccgcgttcacgcgcatgccgtgctccggacgcagcgccacggtgaccgggcggccgccgcacagcatcacttcggcgtcataggaagtgaagaacggcgagggaataatcacttcatcgccggtgcccaccacggctttcagcgccagaaacaggccaatcgtggcaccgtcaacggcttgaatctcggtttcgggatcataagtaagtcccttcacacaggcggagtaatcggccacggccttgcggtattcggggatgccaagcacgttggtgtaccgagtgcggccagcctgtgcggcctcgcaagcggctgccacgatatgcggcgcggccgtggcgctgggctcccccacggtcagtgaaatcgcgtcaggcacgcgctctacacggtcgaatacgtctcggatgccggagcgcgggatattcagggcttcggcggacaggctcgcgggctcggcggtcggcacagcaacccgaccggcagcaggcatagtagcaggcgcagcagcagatgcaacttcggacagagacatgttggaaaacttctgcatatcatccctcctcaatggaattatttcatcgttctcttatttcaaaaggaattattacatccaattaggactttaaacgtaagcattccaccacacaacagaaaacacaggaagaactactgaaattaccaggcaaaatcggaaagccatcgcattccggcaacaggtacagtgaacacagagcacaacgaacggagaagacatcatgaccgcgattgacgagaccgaccagcgcatcctcaccatgctggaggccgacggccgcgccacgctcgcgcaactggcccaggcgaccggactgtcagtctccgccgcccagtcgcgcgtgcagaagctggagaagcgcggcatcatcaagggatacaaggccatcatcgaccaagagcagcgcggcttgcccatcagcgcgttcgtcaacgtgaccccgctcgactactcagccgaatcctcgattccggacaagctgaacaatatcgacggcatcgtctcctgctattcggtggccggcgcccccagtttcgtgctggtggtgcgcgtggcttcccctaccgcacttgaagaactgctcaatctcatccaccgcacggtgccggtaagcaccgagaccacgatgattctgcagacctacttcgcacactgaccgcgaacccggtaacctgcgcgccgaagacctgcggccacacaccccacaaaccccacaggtcacaaaaaccatacgaccccacggtccagccacaccccacaaaccccacagaccgcacgatccccaacagacacatctgacatcacccaagtccgcctttatgtccactatatgaacgtgcctccggtgtgatgcggcttccatttcgacccgattcacgcatagacagacatccaacaatcgcccgaaaaatctaacaaacggaaacttgagccactccataaccacgccgaaagctttcccgttatccgagcgagactctatgcagcaagggcctgcgcgcatagaataaaaccgtcttaattccctagcagatcgaggagaatcatgctcactgacgagtacatcaagcgtgtctacgaccaggtcgttgcccgtgacggcgatcagccggagttcctgcaggccgttcgcgaggtcttcgagaccctgcagccggttgtcgagaagcacccggagtacgagaaggccggtgtgctggagcgcatcgtcgagccggagcgcgccatcaagttccgcgtggcctgggttgacgacgagggcaaggttcaggtgaaccgcggctaccgcatccaattcaactccgccattggcccgtacaagggcggcctgcgcttccacccgaccgtgaccgagtccgtcgtcaagttccttggcttcgagcagattctcaagaactccctgaccacgctgccgatgggcggcggcaagggtggctccgacttcaacccgaagggcaagtccgacgccgaggtcatgcgcttctgccaggccttcatgaccgagctgagccgccacatcggccagttcaccgacgttcccgccggcgacatcaacgtcggtggccgtgagatcggctacctgttcggtcagtacaagcgcatccgcgacgagtactccggcgtcctgaccggcaagggtctggagttcggcggctcgctcgcccgca

SEQ ID NO: 1814 - DNA, 5788 bp, Unknown
  MAG_14  MAG No. k141_41886
cgaccggacgtcctcgatgagtagcaggtcgtagaagaccatgctcgcctccggtgtggccgcgacgggatcgtgcctggtcggcacgccgcacgattcgcggccgaaatcgtatcccagatacccgatcgcgcctcccgtgaggggcagacgcggatcgcgcgcgccatcgcagggtccaagccgcttcttcacgacatcgaggaaatcaccctccacggcaacgccgtcgacgaggcatccgccccgcccgtgttcgatcacaagataggggaagagtcccaggatcgagtagcgcccctgcgcccccggcatcgaggagtccaggaacgcgaagcgttcctcgccgcgcacgcactccacgatgtcggcaagcggtcggaacgtcctgagcttgaatacctgcgcgctcaccgggactccttcgtctgcgcccgggcccgcgtccgcgccaccatgcgggcgtaggtgtcgttcacgtcgcgcgacacgctccccggttcgaattccacgccgccgataccggccacgggcatggcacccatcagggagttggtgaggaacacctcgtcggcccgaagcagctcgtcgggcatgatcgggcgttcaacggcccccgtgaacccgatcacggcatggcgcatgaccccgggcagcagaccgcaggagacgggaggcgtcacgacgtctcccccgatgacggcgaagatattggagacggccccttcggcgacctcgccccgcgtattgaggaacaacggctcgtcgacggcgcggtcacgggcgcgacgcttctccatgatgttttcggcatacgccagcgtcttcatgcgcgcgagtggggaggattcgttcctgcgcacatcggcgaagtcgcagcggaagacgcgcttcgcccccggcgcggcatacgggttgcgtctcaacgagacgacgcggttgcgctcggtgaccgtgagcttgagggccgaatcgtccgatgcgccgagtccggcgcatgcgcggagcaccatcgtctccagatcggcgcgacgcgcctcgatgccgaggtatcgcaacgtctcacccaaacgcgtcagatggtcgtccaacaacaagggcgcgccgccggataccgcgatggtctcgaaggcccccatgccgaagaagaatccgtcatccgcatccacacgcgcccgggcaccggggccgatcacgcactcacccatcgatcagcgccccctttcccgtctcgcactgccatcaatcaggctatcagtcatgaagacggcaggcgcgccgccgacacgccgtccgtccggcgattccgtgcgtcacgaccggaccgatgcgcaatatccggcttccgcgttacactagtacggttattcgcgcgcgcgtggcgccctctacaccccgagccgcgaggacacgtggattccggccggtcatgccccacatggcaaaccgagaacccgcacacctagcattacaaggagagccattttggcaaccaagattcgtctgaagcgacagggcaagaagttctacgccttctaccgtgtggtggtcgtcgattcccgcaagaagcgtgacggcaaggtcatcgaggagatcggtacctacaaccccaacacccagccctcgaccatccagatcaagtctgaccgcgctcagtactggctcggcgtcggcgctcagccgtccgagcccgtcttcaagctgctgaacatcaccggcgactggcagaagtacaagggccttgaaggtgccgaaggcaccctgaagaccgttgaggctggcccggacgccgaggcccgcatcgcggccgttgagaaccaggctcagaagctgaaggccgccaaggccgaagctgccgccaaggccaaggctgaagccgaagccgctgccgccgctgaggaagccccggctgaagaggccgccgaagaagctccggccgaggcctgagcggaaacgaaaggctagctatgcttgcacaggctgtggaacacctcatcaagaacatcgttgattttcccgacgatgtttccgtcaagtcccatgagaacgcgcgcggcgaactgcttcgtgtacgcgtgaacccggaagacatcggccgtgtgatcggccgtggcggccgcaccgccaacgcgattcgcaccgtgatccaggcactgtctgaccacaaggtccgcgttgacatcatggacgtccgtcgataaccgataaggaacgattcacagcatggcacagcaagacatgcacgacgaccctcagcagctcgagttgctgagggtcgctcgtattggccgcgcacagggcctgaagggcgaagtcaccgtgcgcctgtacaccgatgatcccgagtggcgcttcgagccggactccgtgctctacagccaggatggcgagaccgagtacatcgtcgagggctcacgcacgttcaaggatcgttggattctcaagcttgagggcgtcgacgaccgtaatgccgccgaggccctaaacggtgtcgaactctacggcgaggtcgacgacgcagaagatatgctcgaagccgacgaatggtatcccaaggatcttattggccttgaggcccgtctagtcgagggcaacggtctgggactgcccgccggccaagtggtcggcaaagtggtggatgtggtcgactcccccgctcagtccctgctcaagattcgtttgaccgagccggtggtaaccggccagaattccaagggcgaggatgtggtcgagaagaccgcgttggtgccgttcgtggaggaactggtgcccgacatcgatctggaggagcaatacctcacgctcgacccacccggtggtttgattccgggattgtaaacctcatatacacgtgagaccaaaggactttctggctatttgttggcagaaagtccttttgcgtatgagcagaaacatcgagacgctaaaccttcctcattccagtatcgcatagcagataatcaatagtatactagtgaataaatgattttattcatggaaaactatatgttataacactcggagtatcgcaatgaagtatgtgcccaccaccaccaaacgcgatttacgcatcctaggcgaacagttctcgcaacagcgcaaactactgatgttgacggttgcggatgtagcacaccgctctggtgtcagcccgaccacagtgtcaaatctggagcaaggcaaggctgtccggtcagattcgctgttaaccatcgcgcgcgtgttgcaacttgctgacacactcgtagccgcatgcgacccctattccaccgatcttgggcgtctccgcgctggccaacaactcccgaagcgcgttcggaggtgaatccctgatggcaaaaactatcgaatcaactgtactgattacgctagggcctggaatggaagctcctgccggcacattgtatgcgactggcgacgaactatcgttccgctatgattcgacgtacacaatcagcagcgattccttcgacctcttcccatctatgccccgctcgctggccccattcttcttctctggacttggtccattttcggattccgccccagaccgttggggcagaaaggtgttttcccgcagtcttaaacggacgcgtgtcagcgagtcggaatatttgttcggcgtcaacgatctgacaagacagggtgccattcgattcattgttgatggcaagccagcggcaggagatgaaggagtacccgtactgtcaaagctgccggagttattggacactgcggatgcggtggaacagaaccgcgaggtaagtgatgtctccttacgcaggttgtatcgggcaaccggctcactcggaggcgcacgacctaaagcttcggtgtcggatcgtaatgcgctgtggctggccaaatttccgaaaccgaacggcgatgattgggatgttatcggctgggaagccgtcaccttggaaatcgcgaacatggccggcatcaaagtgcccgaacatcgcgtcattgcaataaaggattcggaggagagaagccggaccgtgctattgactcaccgttttgatcgcgtgtctgcaccatcagttgagcgaatggagcgattaccttatatatccgcaatgaccgcgctggaagcaagagatggggacggcggagactggttggatctagcagaatttacgcgtagggcaggaggagacaccatagagctgtggcggagagcaatgtttggcgcggccatcggcaacactgatgaccatctacgaaaccacgggtatttgcgtaagaataattcctggcaattggcacccgcttttgacatgaatcctgaaccattcgatccgtcgctacccgactcacaccagatgtcattattaggtgacaccgaagtcgatatagataaattgatgtccgatgagagtctgtctttgttcggtgtaagccgtaaatatgcggatcattggttgccaacattgcgatcagccttatctcaggcattatctcgagccgcgatgcgccgcattgacatgcattccatcaatctgatggccgaacgttttgataaggcggttcatgctctgcagtagagcgatggggatctaccgcaaactgttactcgtctcgtggctccggcctcggtatgtctctggtatcgcttaaaaagtcgcggcggtcctcacaccggagagcaacgattgcgatgactgcgtggccgacacgtcatacggcagctgattggcatccgactgctaaaggtcagttcaggcagatgacaaagttccgagaattctttccttacgttttctccatcggttacaggcacgttcgatacgtttatagccaattagctcggacggcaccaaatgaaaaatccttgcctacttccctattcgagcatccccaaaagggcacgccaccgctgcaatggcgtgccccgaatagagcgccgctgggctcagagcgcagagaagccctcttcggcaatcatgcgcatccagatattgaggtgccagtcctgatcattggccaatgggtcggcctgatgcatggaccgcccatcgacgttggagggaaacacataggcacacgtggcggaaccatccgcgccatagttcgccatattggcctcgaaaatcgccttggccaaatcatcggtacgtgcggagcgcctttcttgcggcaaccgtgccagcacttcggcggtcaacgtggaccaataatgagggaacacatcaccgaattgtcggttgatgccgaaccaatacccatcccaatgtcgaatcgccacaccgtagagacgcgagtccggctgcgggccgctgaacgccaatagccaatccaatcgctccacggcaccatccagatattcggcgcgcccggtaatgcgatgcgcttccaacagcagactcaccaacggcgcagtgatggactgttcgtaagacacctcatggtagggcaggtcgatacccaatcccaggaagtagtccgcactgaccaccacacgatcgagcagacgttgggtctcctcggttcgcccggtctgcttaagcacacgcgccaaggccgcactggattcggcgaactcgatgctcaggaagtgttcgccgccaatttcggccgcccgatcggcgatgttcaccgccatatcgagatcgtgcgcatccttggtggccagataatgttcggtgaagaaactgataatccacgggcagtcatagatacggcctccgaatttggattccggcagccccgagccgcgacgtaccgcgccgctggcgtcgatgagcgcggactcggcgaacgtgcgccacgcatcggcggcacg

SEQ ID NO: 1815 - DNA, 4332 bp, Unknown
  MAG_14  MAG No. k141_42051
agtacgcctaccagaccgcgaacgccgtgctcttcttcatcgtgctggcgattatcgccttcgtgcagctgcgcatttcccgcagccaggaacaaatctgatttaggggaggataagaaatgactactgcaacagttaccccgtccaagtccggcaagcccgccaagttccgcagggaccacaagatcaactggtggctgaccgccgccgtggccgtgctgagcctgaccattctgatcccgctctacttcaccatcgtcaccgcgctgaagactccggccgaagccggcaccttcgccctgcccacctcgtggcagtggcacaacttcgccgacgcctccgccaaggtcaactacccgaaggccgcgctcaactccgcgatcatcacggtggccgccgtggtgctcaccttgctgaccaacaccttcgtggcctacgctgtggcccgcaacatggataagcgcttcttccgcttcctgtactacttcttcatcgccgccatgttcgtgccgttcccggtcgtcatgctgccgattgcgaagcagatgggctccctgcacctggacaaccaggtcggcctgatcatcctgtacacggtgctcggcctgggcacgaacctgttcatcgccactggcttcatccgttcgattccggtttcgctggaagaggcggcccgcatcgatggcgcatccacgtggcgcattttctggaccatcatcttcccgctgatgagcccgattaacgccaccatcgccatcctgaccgcactgtgggcctggaacgacttcctcctgccgttgatcatcctgaccgaccagtcgaaccagaccatcccgctcgcccagtacgtcttcagctcgcagttcgccaccaactacccgatggccttctccagctacctgatggccatggccccgatcctcatcgtctacatcttcgcccaaaagtgggtcgtcggtggtgtgatgaggggagcggtcaagtaaaacagcgcaggcgctgctttacttcaccgcgtcgagcgagacgagccgattaaggaaacagccccgtgggctgtttcccggcccgggcggccggataggtcgcgtactcgcgaggtcatgttgggtctggccgtaggccagtcctgaattgcaggactctgtgaagtaaaggtccgcttccgcccaagcctcctccggctctcaccggaggaggctcttctgtcctgttgccatactggaaaccgccacaataaaggcgacggtcggttgatgtggcggtggcgcacaaaggtcatgtggttttgctcgttgtgcgaatgaaaaagtgacgaaaccgtacggcttacggtgcaattgagcgcatctgctgtgtcgccgtgccactggcttgtcccggtccacatatcaaccgtttgacgcgcgaaccgggacagaatccgctgtcccggttcgcggtttcgggcgattttcacgaaccgggacaattttcattgtcccggtatgaatgtcaatcgttttatgtgaaaaccgggacaacatgttgattccgggatcggctctattccgccgattttgtattacggagcatatgaactgcggagattggcttgtccctgtttgtaaaaaaggacaaaaatcgcgaaccgggacagcggattctgtcccggttcagacggcaatcgattgacatacgaaccgggccaacgccgaagtccggagcggttcccgaggcggggtttgcttgaaatccggtgtgccagcgaaatccccaccagattcccgcaggcgtgtcaactaaatcatctatccccgcaccagtgggttcaagcaggcaatccaagcgcgctcgaagttgctcttgcgcgtcgcaatcagaagaaccgttaatatgtgagctgccgcaggtcaggtagattatggcggcggaacaagcgggcgagctccttcataggttcgagcctcgagtgcatcatccacgagcacaggcgatatagccacacccacgcctcgaacaggagcatgaaccctctgccgggctcgaagccgatcgtgatgtgcggctcccgcccgtcgccgtcggcgtcacggaagtccgcagacccgaccctccaaggcgaccgcagccgaagcgcggcggtgaacaggtgagaggcatccatgcctccaacctacccgaccaacatcaccccacggcacagtcacccaccacaaacagcgaaagggcccatatgttgctaaatagcatgtgcagcttatgagaattgagccgtagcagtgccttccggctctttgcggtttttgtttccggcacaccaacgcagttccccaatggaaatgtaattcagcgctttttagactatgagcaacaggcaatgtagaccataaataatggaggagccaacgatgaccacttcacaacgcacagtaattccagattccatccgcaccaacggtgccaccccaaatccgtggtggtccaatgcggtcgtttaccagatttacccgcgttccttccaagacaccaacggcgacggcctcggcgatctcaagggcattacgtcacggctcgactatctggccgacctcggcgtggatgtgctgtggctatccccggtatacaagtctccgcaagacgacaatggctacgatatttccgactatcaggacattgatcctctgttcggcacactcgacgacatggatgagctgctggccgaggcccacaagcgcgggctcaagatcgtgatggatcttgttgtcaatcacacttccgatgaacacgcctggtttgaagcgtccaaaaacaaggatgatgagcacgccgactggtattggtggcgtcccgcccgtcccggcaccactgccggcgagcccggtgccgagcccaaccagtggggctcctactttggcggttctgcatgggagtattgccctgagcgtggcgaatactacctgcatcagttctcgaagaagcagccggacctcaactgggaaaatccggctgtgcgccgcgcggtatacgacatgatgaactggtggcttgaccgcggcgttgacggcttccgcatggatgtgattacgctgatttccaagcgcacggacctgtctggcaagctgcccggcgagtacggttccgagctggacgatctgcccgtgggtgaggaaggctattccaacccgaatccgttctgcgcggacggccctcgccaagacgaattcctggccgaaatgcgccgtgaagtgttcgaaggccgtgagggcttcctcaccgtgggcgaggctcccggcgttaccgcacagcgcaacgaatacatcaccgaccccgccaacggcgagctggacatgctcttcctattcgagcacgttgattttgactgcgaaggcgtcaaatggaagccactgccacttgacctgccgaagctcaagagcattatggccggttatcaagcggccgtgaagaatgcaggctgggcaagcctgtttactggtaaccacgaccagcctcgcgtcgtttctcgttggggtgatgactcctcggaggaatctcgtgtgcgttcggccaaggcacttggcctgatgctgcacatgcatcgcggcaccccgtacatatatcagggcgaagagctaggcatgaccgacgcccacttcacgcgcctagaccagtaccgtgacctcgagtccctgaacgcttaccgtcaaagggttgaggaagccaaagtgcagtcgcccgaatcgatgttggcgggtatcgccgcgcgcggtcgtgataattcgcgtaccccgatgcaatgggacggctctgtctatgccggtttcactgcgccggatgccgctaaggagccatggatctccgtcaatcccaaccatgcggcgatcaacgcggccggcgaattcgacgatccggattcggtgtatgccttctacaagcagctcatcgcgctgcgccacgacatgcctgtcgtggcggccggcgactggcatctgctcgatgcggatgacgcgcatgtctacgccttcacccgcaccctcggcgatgagaagctgctggtcgtggtcaacatgtccggccgaaccgttgatctaccgcgcgaaaccgccgaactggccgccgccggaatcaccgagtcgaacgtggtaatcagcacgtatgatgccccgcacgccgtggtctccctcgccaatcgtgagctcgatccttgggaggccgccgtcattcagctgtagcgattggagcgattgtagcggattgagtacctttctccgttcacagagatacttcagggctattgcgaaatgctatccgccttgaaagaggtaccgtaacgtcaaaaccccgagtataagc

SEQ ID NO: 1816 - DNA, 9885 bp, Unknown
  MAG_14  MAG No. k141_42088
gagaatgattgacaaggttgttgcgtccataatgttctgatgtccctttggtgaagtgatgaattcgggtgaagtgattattgattgcggctgtgccgaggcgacttatgtgttgacgacttatttgttggtggtgtcgccggaggcagcgctgccatcagatttggtgctctcgtcggattcggcgctctcatcggcattatcgttatcatcttcgtcatccttgccgggctgacgccaccacaggattagtgcgttgactgcacagtagacggctgcgataccgatgcacaccaggaaaatgatgttcgaggtgctgatcatcgtgccatcggccattgcttctttggcggattgccatatccaaatcacgcatgcgacggcggtcagggcgtacagcatcatacgggagcggtcgttcatagaagaatctccagacttgttcaaacgacttgattatagccgtatttgtggattgcgtgggaaacgaaaaatgccgccatgtgtgcttcagcgaggagcgcggtataacagcggctcttcgcgatgcttgccatggcggcattcatcaggaatcgttattcagttgttatctcatggattgtgctggcagcgtatcagccgcgcgccttggcgtatgcctcgtacacggcttcggtgggctcgccggtctccacgccctcgatggtgagttgccaggtcagcggttcggcctcgccggacagcacccaggcggcctgacgggcggcgccgatggccacatattcgtcggtggccggacgggtcacgtccatgccgaggattgagggggccagcgtgcggatggccacggacttcgcgccaccgccaatgagcaggatgcggttgatctcggcacccagcgaacgaatcagctcgaggcagtcgcgctgggaacacagcaggccttcgacgaacgcacgagccagattctccttggtggtgttgtgcagggtcaggccagtcagcgaggcggtggcgtccggacggttcggcgtacgctcgccgtcgaagtacggcaccagggtgatgccgccggcacccggctcggccttaaaggccagttcggccagctcgtcgtagtccacgccaagggcggcgcggccggcgtccagaatgcgcgaaccgttgatggtgcaggcaagcggcagataatgaccggtgcagtcggcaaagccagaaatcgctccggtcaggtcgtacaccgggttttcagcgatggccgcggccacgccggaggtgccgagcgatacggacacatcgcccacggccatgccgaggcccagcgaggccatggcattgtctccgccgccggggccgatgatgcagccgccttcaacgtccttgccggcaatggcggggtcggccttgacggcggctgcctcacgcgggcccagcacggtgggcagcacaatggcgtcggcgtgggccttggcggcttcctcgccctcggcgggggtcagcaccatggcgatgagatcgcggcggtactcgtcatgcgcggcatcgtagtaaatggtgccggaagcgtcggaacggtcggtgaacagggcttcgagatgagcgtcctcgccctcggccaccgggccatagccggcgatacgccagctcagccaatcgtgcggcagacagacggcggcaatcttcttggcgttctcaggctcgttctcggccacccacgccaccttggtcagcgtgtaggaagcgacgggggaggatccgacggccttgacccagcgctgcttgccgcgggcggtcacgtcgtccggttcgtcgccctcggccggagttgcaccgagcttgtcgatcagggcggcggcctgcggggcggaactggtgtcattccagagcatcgcatcgcgaatcacgttgccctgcttgtcgagaatgaccatgccatgctgctggccgccaaccgcgagggccgcgacatcgtcaagcccgccggcctgctcggcggccttggtgaaggcctcccaccagaattccgggttgaccgaggtgccatccgggtgcttggcctgcccgaaccgaacctgttcgccggtggcggcgtccgtaatgcggacctttgttgattgagttgacgtatctacgccggcaaccagtactctcgtcatgcattcctcctcgatgagggtcgcgcttgcaagtttcggcgcgccacaaccaataagttagacgattaaactatactgtattgcagtgtatgattgcaaacggaaacacgcgagggtgcgtatctggttcaatcgtttgacgcacaatatcattgtgcgatagacggatgtgagcgcctgtgcggcgttcgagactaggggtgcaaggaggtaggagcctatggcaagtctacgcaggatcaatcaggaggatctgcgcaaccataatttgtcggtggttctcgacactttgttgcgcgcggagaaacccatgagcagggccgacttggccaaggaaacgggcctgaccaaggccacgctttcgctgttggcctcgatgctgatcgatagtggcgtggtgcaggaaggcgagccggtcgtctccaccacatatgggcggcccagcacgccgctggagattcatggcgggtccatcgccggcatcggcctgcagatcaacaccgatggctacggttgcctggcactcgatctgaacggcgacactctcggtcaggagtgggtgagtgaggatatgaccggcactgacccgtacgagatcttcgccaagctcgatgcgatgaccttcccgttggaaagccgactcaaacgacgtggctgcaaagtggtgggagccgggcttgcgctgccgggcatcgtcaccgacgacatgtggctgttggtggcccgcaatctgggttgggaaaacgtcaacctcacccggttcaacgtggtacgccggctggatgtggtggccggtaacgaagcgaagatggccgccatcgctcagattccggggtatgccaccgaacgtgcgtccttcctgaatgtggtggatcgcacggattcctttatttacctgtctaccgatatcggcatcggcggcgcggtggtgcgtgacggcgaagtggtgatgggctcgcacggattcgccggcgagatcggccatctgtccgtggcgatggatgggccgttgtgcagctgcgggcgccacgggtgccttgaggcgtttgcgggccgtcgcgccttggtcgaggctgccggcattgccgaggatggggatgccaccagcagcgaggccatcgatacattcctccagcgttggcgtgcgggggatccagacgtggccaaagtggtcgatcaggccgctgatgcgctggtttccgccatcgcttccgccgtgaatctggtggatgtcgatacggtgctgttgggcggactgtggacgcacttcggcgacgagctggccaccgtgcttgaaggccggctgcgttcggaaattctgggatacccgaatgtgaagatccgcgtgttcgtgccgccggtggcgctgcatccctcgctatatggcgcggccgaaatgggcttgcgacggttcatcgagaacccgttggggtacatgggggagaagtagcgccgggagatgccgcttgttgtgctggcgggtgcatggcatgggtgcatggcgcgtgtgccggcgttggtgggttcatgctacactttgcaagttggctgttttacgcagcgaacgtggggccgtagctcagtcggttagagcatgcgactcataatcgcccggtccagggttcaagcccctgcggccccactcttttgcgtcgcctcctgcggcggcacagcgcgtcttcacgtccagataggcgcgtacaatcccttaggttccggttcacgtcctgccataggggcatgacgacccgggtcccccgaatccataggagacgtaaaatgcagcagggtatccatcctgattaccaccccgttgaggtgacgtgctcgtgcggcaacaccttcgtgacccgcaccgctggcaaggaagatcacatgttcgttgacgtgtgctctcagtgccacccgttctacaccggcaagcagaagattcttgacaccggtggccgcgttgctcgcttcgagaagcgctacggcaagaagagcaagtagcatacttcacgccagtccgattcgattcggcatgctccggcatacccgatcgaggactggcgtttttgtattctttgacatttttttgacctgcacaaccgaatagacaccaccgtacgaaagaaagcgtgttatggcagacgaacagttcccggcggcggcaaccgcgcttgaggagtaccagtccatcgaagaacagatggcgagccccgaagtcgtgtccaacccggacaagctgcgcaagctgggccgtcgtcacgccgaactgggtgccatcgtgggcgcctacaaaacctggttgcaggtgaaggacgatctggcagccgctcaggagatggccggcgaggacgccgacttcgccgaggaagccaagcgtcttgaagccgaactgcccgacgccgaggagaagctgcgcaccgcgctgatcccgcgtgacccggatgatgcacgcgacaccatcatggaaatcaaggctggcaccggcggcgaagaagccgcactgttcgccggcgacctgctgcgcatgtacacccgttacgccgagaagcgtggctggagcgtgaacgtacagtccgagaacaccaccgagctcggcggcgtcaaggacgtacagattgccatccgcgccaagggcacgcccgctcccgaagacggcgtgtgggcttcgatgaagtacgagggcggcgtacaccgtgtgcagcgcatccccgtcaccgaatcgcagggccgtatccagacttccgccgccggcgtcattgtgttccccgaagccgacgaggatgacgacgagatcgagatcgatccgaaagacctgaaaatcgacatcttcatgagctccggccccggcggccagtccgtgaacaccacgtattccgccgtgcgcatgacccacctgcccaccggcatcacagtgaacatgcaggatgagaagtcgcagatccagaaccgcgccgccgcgctgcgtgtgctgaagtctcgcctgctggccatgaaacatgagcaagaggccgccgaagccgccgacatgcgtcactcgcaggtgcgttcgcttgaccgctccgaacgtattcgcacgtacaacttcccggaaaaccgtatcgtcgatcatcgcacgaattacaaggcctacaaccttgacgccgtgctcgatggcgacctgcaggccgtcatcgattccgacatccaagccgacgaagccgaccgtctggccaaccagcagtgatagccgacctgattcgtcaagccgccgcgcagttgcgcgaagccggcatcgagacgcccgaacatgatgccaaactgttgctggccgaggccgtggacgccgagctacgcgatatcgacaaggccatgctgatgggggagggcctcgattcgctggcccccgccggcgggggctgtcgcgcagcgactgggggtggtcaggccgaccccgtcaccaatatccttgccgccttccacgccatgctttcccgacgcgccaaacgcgagccgctccaatacatcaccggccacacgcctttccgctacctcgacctgcaggtgggccccggcgtctttatcccgcgcccggaaaccgaaaccgtagtccaggccggtcttgactggctgacccggcacagcatgatccacccgcgcatggtcgacctgtgcgccggttccggtgccatcggcctgtcgatagtcagcgaagtgcccggcagccaagtatgggccgtcgaattatccccgcgtaccgccgaatggacccggcgcaatctggcggtaaccgcgaaacgatacccctccatcgcctccaattaccaactggaagtcgccgacgccacgtcactggccacgctggcgcaactcgacggcaccatcgacatcgtcatcaccaacccgccctacgtgccacaaaccgacatccccgaacaaccagaagtacgcgactgggacccggaactggcgctatacggcggttcggcagacggcacgctcatccctgaacgcattattgagcgcgcctggcgcctgctcaagcccggcggcgtattggttatggagcatgatctcacccaaggcgagcgattagtggcctatgccaaggccacaggtttcgccaccgcctccaccggcaaagattggaccggccgagaccgctatctcttcgccgagaagtagccacaggcgcggggccgccgctgctactgcgcgtaatactgcagggcggaggcgtccgcgtccgtgatttcgcgaatcggacgggccggattgcccacggccacggtgtgcggcggaatatcgcgcgtcaccaccgagccggcaccgatcacgcaaccctcgccaatcgtcaccgggcgacaatccagcacagtgaagttgaagttggcgaacacgcgctcgctggcgcgcggcatacgcagttcgacgggaggcatggtggtggattcagcattgattccgctcattgaacactcctgtaatttcgcgaaagagcatggacgaactcattgtatctacggtctgtgcgtatggggcgaatcggaaaacagcagtacggcaaacgagcgatgatgaactatgcaagtcggggcgcaatggtgcaatggtagattgtgaatacacaggcgaacggaggtgtcgtgagcgtggagggcggaacaacgctgaaagtcacggatgaatcgctggcacaagcggcgcgtgtcatccgggatggtggattggtcgtcattccaacggatacggtatatggagtggcgtgcgatccgcgtaataaggccgccatcgaccgtatctaccggctcaagcgtcgcccgcgctataaggcgttgcaggtactgctcgcatccaccgaccagcttgatgaactcggtctcgacctgccgtctccactgaatcgtttgtcggcggcgttcctgcccggcgcgttctcgccgattgccgtagcccggcccgactgcacgttggagactttggccgacaccgccgatggtcgccccggcacgcagggcatccgcatccccaattcggcgctgtgcctcgcgattctcaaggccactggtccgctggccgcgtccagcgccaaccgttccggcgacgaaagcgcacagactgtccaggaggcggttgacgcgttcggcaacgaagtcgacctgtatctggacggcggtcccacccaaggccatgtctccagcaccgtcgtcaaagccgatccgtacgcgcgcgacggcatcgagatcctgcgtgaaggcgtcatcgcccaaaacgtgattcgcaaggccctccacctcaacggcgggggactcggcgcatgagaatctacctactgattgccgccatcgccggtggcgtcacctggctggtgactccgctgattcgccacgtcgccatcgaaatcggtgcggttggcgaggtgcgtgcccgagacgtgcacaccattcccacgccgcgcatgggcggccttggcatgctgatcggttttgccgtggctaccgtattcgccagtcggctgccttttctctcgggattgttcaacggcaattaccagatgtgggtgattcttgccggcggcatcatgatcagtctgctgggcatggccgacgacctgtgggatctcgattggatgctgaaactcgccggccagctgctgatttccgtattcgtggcttgggacggattgcagatcatctcactgcctttgggtggttcgctgattaccgcctcgccgagtctgtccatggcgatcaccgcattcctgatcgtcgcctcgatcaacgcggtcaatttcgttgatggcctcgatggtctggcggccggtatcgtggcgattggtggcatagcgttcgccgcctattcgtatatcatcgcccggtcttccccgagttatgcttcgttggccacgctgatcgacgtgatgatggtgggtatctgcgtgggcttcctgctgcataattggcatcccgccaaactgttcatgggtgattccggttcgatgctgcttggctatctcatcacctgcgcttcgattgtgatgaccggacgtcttgacccggcctcgattcatgccagcatctatctgccggtgttcatgccgattctgctgccggttctggtgttgttcctgcctgtgctcgacatgtgtctggcgattgtgcggcgtttggccaaaggccagtcgcccatgcatccggaccgtatgcacctgcaccatcgcatgctgaagatcgggcattcggtgcgtggcgccgtgctgattctgtggggatgggccgcgttgatcgcattcggttcgctgacgattctgttcttcaaagcgcagcacgtggccgtgggcatggccatcgctgtggtggtgctgaccatagccacgatgtacccctatctgcggcatcgtattcccgagatccaagccgagaacctgacgttcgaatccgcacgtaaaaacgcgcagcatacagtgcctaaatcgcagtctgcagtaggggagagccgggattcgattggctctcaggcagcggattcgatgactgattcgcctgcaaattcgcgggactcgcaggtgggtgaggtgcaggacccggcagcggataagtgagcgctcacaagcgtgtgtcgtgaaggtcagcgcattttcatatagtgtttacatggctacaaaccttgatgaattaaacgcccagtcggcgtatgctccccttcccccgattttcgccaagctcggccttgcctatgacgatgtgttgctgttgccgaacgagacggatgtcattccctccgaagtggacaccagcactcatctgactcgcaagatcgtgatgaaggccccggtcctctccgctgccatggataccgtgaccgagtccgagatggccatcgccatggctcgtaacggtggcatcggtgtgttgcaccgcaatctgtccatcgacgaccaggccgctcaggtcgatgtggtcaagcgttccgagtccggtatgatcaccgacccgctgaccgtcaaccccgaggtcacgctggccgacctcgacaagctgtgcggcaagttccacatctccggtctgccggttgtggacaaggacaacaagctcgtcggcatcatcaccaaccgtgatatgcgtttcatcgcctccgaggattacgacaccctgaaggttaaggatgtcatgaccaaggagaacctggtcactggcccgtccaacatctccaaggacgacgctcaccgtctactcgctcagcacaaggttgagaagctgccgctcgttgacgaggaaggccacctgaccggcctgatcaccgtcaaggacttcgtcaagaccgagcagtacccggacgccaccaaggatgagcagggtcgtctgcgcgtggccgccggcgtcggcttcctcggcgacgcctggcagcgtgcctccgctctgatggaggctggcgtggacgtgctcgtggtcgacaccgccaacggtgaggctcgtctggcactcgacatgatttcccgcctgaagcacgactccgccttcgacggcgtgcagatcatcggcggcaacgtcggcacccgttccggtgcccaggccatgatcgaggccggtgccgatgccgtcaaggtcggtattggccccggctccatctgcaccacccgtatcgttgccggtgtcggtgtcccgcagctcaccgccgtgtacgaggccgcccaggcctgccgtgccgctggcgtgccctgcatcgccgacggtggcatccactactccggtgacatcgccaaggccctcgtggccggcgc

SEQ ID NO: 1817 - DNA, 4233 bp, Unknown
  MAG_14  MAG No. k141_42544
ccgccgcgccctgccgttatatcgccgccgatatcgagaacgcgggcggccattacgtcgacgagcagctgcacgtggacgacgccaacggcttcaagctcatcacgtcccgcaagcccgctgatttggactacttcgtggacgcaatcaaggatgcgctgaagtaactaccgctccttagcggccaactgcccgcaggcaccgtcaatgtcctggccgcgggtgtcacgcagtgtggcggtgatgcccgcgcggtgcaggatctccaggaaccgctgttcgtctcccggcttggaggcggtccacttcgagccctcgatggggttgagcggaatcgggttgacgtgggcccagttgtcgccgtaatggttaagcctcttggccagcaactgcgcatgctcggcctggtcgttgatgccgcgcatcagcgcgtattcgatactgacgcggcgcttggaggccagccaataatcgtgcgcggcatccaacacctgcgtggtgttgaaacgcttgttcatcggcaccagctcgtcacgcagttcgtcgctgggggcatgcagggaaacggccagacgcacgggaatgccttcggcagtgagcttcttgatgccgggcaccacgcccaccgtggatacggtgatgttgcgcgcggaaatgccgaagccttcgggaggcatggcggaaatctgtcgtacggcggacagcacggagttgtagttgcccatcggctcgcccatgcccatgaacacgatgttgctcaggcggccctctcccccggccacttcgccgtcacgcatcattttggcggccacacgcacctgttcgattatttcaccggtggacatgttacgggtcaggccaagcttgccggtggcgcagaacgggcagcccatgccgcagccgacctgcgaggagatgcacagcgtggtgcgggtcgggtatcgcataagcaccgattcgatgagggagccgtcgaacagcttccacaaggtcttgatggtggtgccttcgtccgccacttggcgggtcacctcggtgatgagctgcgggaagaacgcggcggcggcctcgctgcgcttggctgccggaaaatcagtgaattcggcggcattcacatcgaaatggccaaagtaatggttggcgagctgcttgactcggaacttcggcaatccgagttcggccgctttctcgatgcgctgctcgggcgtcatatccacaaagtgcagcggcggcttaccacggcgggcatggtccttggatagcacgtcacggaaggcacctgatgtgccgccgggagtaatgccggtttccggagtgtcaggatgctgtgtggtcatgatgggttcgcttcgctctcaatatcagaaaatagtcaaacatgcaatagaaatatcagaatccaccatacggcgtgccgcatacgaatcagatggcccatgtcttagcccatggcgaacgcatattgaacgatgatttcccccatatatgacatgtggcaccgtgcgatatacacacgatgccacattgttcatgcacgaggcatgcgaatcacagtccggtgacccacagcaaggcgcaggtgaacggtgcactcatcaaaatggaatccacacgatccatcacaccgccgtgtcccttgagcagatggcccatgtctttgatgccgatatcgcgcttgagcatggaagcacacaaatcaccgaacgtgcccacggcgccgatgagaatacccgccacgatcggcacccaccaacgagtggcccatttcgaggcatcatacgtgcatgcgaatacggcgaatgcgccagccatggcgaagagcatcgagccgatcaggccctcaacggacttcttcggcgagatacgcgggctgagcttgtgcttgccgagccaggcaccggcaaacaaaccacccgtatcggagagggcgggcaggaacaccagcatgatggcgtgtgcaatcggatgcccattgaaagtcagcgagatgatgatgcagctggccagcaacggaatgtacaacacggtaagcacggacacagccacatggctgagccgggaatgatgctgttccccgccctcatgattgaacgaggattcgaggcgcgcgctggcatccgtgttggacagtttgccggcaaccgccagagataggcggttgccgacgctgatttttgcgctggccgcgatggcgaccagaataatcgacacgatgatactcagcgacatcgtgatgagatggtacggggaataataggtggcgatgagggtgaaggacgagcacagccacagcatgaacaccgggatgtgcaggcctacggtggcgaagtccaccctgagctcccacagcgccagaatcatgaacacgactaccagcagcacgaagaggtcgacgctgagcagcaggcacgcgacaataaggatgaccagtgccgcgcctgtggcgatggcctgcggcatgttgcggccggtcttcttgttgatccggtcgagcgtctcctcggcctcttcatggagttgttcgttgcgttccataattctccggacctggtctgaatcagacctccatgatctccttctgcttggtctccagcagagtatcgatctcgtcggtaacggacttggtgaccttgtcaagatccttcagcaggcgatcgccttcgtcctcacccatctcgccgtccttgacggccttgtcgatggtttccttggtcttacgacgaatgttgcgcacggcgaccttgccgtcctcggccttgcccttggcgagcttgacgtactccttacgacggtcctcggtgagttccggcatggtcaggcggatgacgttgccatcacggttcgggctgatgccgaggtcggagttgcgcagggccttttcgacggcaccggcctgggaagcgtcaaacggggtgacggacagggtgcgcggttcgggaacgccgatggaggcgacggccttaatcggggtgggggcaccatagtagtccacggtgatgccgttgagcagggccgggtttgcgcgaccggtgcggatgccggagaagttttccttggtgttttccacggtcctggccatctgttccttggcctggtcgataagagacatattcactccttgtgtgttggtgttcgtctgtgttgttcgtctatgaacgtttgattcgattgtaggcgtttgcggcttactcggccacgcgcgattcggcggtggagaccagcgtaccgatttcatcgccgacgagggcgcgggtcacgttgcccggctcttcgaggccgaagacgcggatgcgcttcttgttgtcgcgggccatggacagtgcggaggcgtccatgactgccagattgtccacgagggcgcgattgtagctcagggtttcaaaacgcttggcgttctcgtccctgcgcgggtcggcggtgtagacgccgtcgacgccgttcttacccataagcacttcgtcgcagtggatttcgagggaacgctggatggaaaccgtgtcggtggagaagtacggcatgccggcaccggcgccgaaaatcaccacgcgacccttttcaaggtgacggatggccttgagcggaatatacggctcggcgacctgtcccatggtgatggcggtctgcacgcgggtggcctgaccctcctgctccaggaagtcctgtagagcgaggcagttcatcaccgtgccgagcatacccatgtagtcgccacgggaacgatcgataccggcctgctgcagttcggcaccgcggaagaagttgccgccgccgaccacgatggccacctgcacaccctgttgtacggccggaacgatttcctcggcaatgcgacgaatcacatgggtatcgatgccgaccttgccaccaccgaatgcttcgccggacaacttgagcagaactctgcgcggcttgtcgctatcagtcatatcatgcctttctcaaaaccgaaagtgcgaaattatccgtagacaagcgtatcggtttacgacgacaccccctagcaacgacacccttggaatagcgaaacgccatccgattattgaataaccggatggcgtttcgttgaaattacgctaagcgcgtggagtaagccttaggctcactcctcttcgcccttgccgacctcgacacgggcgaatgcggtggcgttgccaccgacttccttgaacaggtcgccgacggtcttggacgggtccttgacgaacggctgctcgagcagcacgacttccttga

SEQ ID NO: 1818 - DNA, 8104 bp, Unknown
  MAG_14  MAG No. k141_43210
aggagtgtgaccaatgcggctgattgagacatggctggcggaccaggaacgcgcgtttgacttgttcgcgaaattcccggcggaggagacgggattcgagaacccagcggccggcatgaatcgtgaacggttcgccgcatatgtgcgagggttgcgtgacgagtcgatgggcatcggcctgcctgacggctgggtgccagccaccaaatacattctcgtcaacgatgagggcgactatgtgggcatcttcaacctgcgtcaccggctcaccgacttcctgcgcaacggtccgggccacatcggctacggtgtcgcccgcgaataccgcggtcacggctacgcgaccgccgggctcaagctcacgcttgccaaggcccgcgagctcggcatcaaggaggcttacctgagtgtccacaaaaccaatccggcaagtcttgcggtgcagcagcattgcggcgcacgtatcgaccatgaggacaagacggaatactacacacgcatcgccacctgcacggagagcgatggcctctatgcgcgaggcgattgacggcgcctctcgcgtataaatggccgattatcaatcggttttaatcgatttcgcctcggtcgataaagtcgccgtcgaggaaccaataatcgtgcggatttccgcgtaacgccatgaacggcgtgagttccacgccctgtgtctcagctctgctcagcagataggcgcggataatccacggatactctagcacgcccgacttgagggtgatgatttgctccactctgctgccgctgacgccaaaatccctgccgccgttcggcggtcagacccagccggctcatgttctcctgaaattcgcggatagtcgccgcgcgttgctcactgttcaaagacatggcttcatgaatgttgcattggcaccttaatcatccatagttaaggcaccacgcaacatacgattcgcttacgcagccatccgacgatggttgggatagattgttcggcgaagcggtctatggcgtcggcggtgacgtaggcgtgggcggtgaggcgcaggtacagttcgccgccgaccgcgctggccgcctcggatacccgacgctccgcgtaatcggcaagatcggacatgtaccggcgcacggcatcacagccccacagtcgctcgatctcgcgcagggactcgggcgcggcgatcggaccgcataaatcctgggtgccttgctcatcgaatcgctccgggaacgggtcagcgaaaccccacgagtcgatcagtggccacaaatcctgaccatcctgaccgccttcgggcggaatcaccagcaatgccgtgccacgcggcgcacacgggaacttatgaaaattgccgacccaccaatcggactgcagtccgccggccggatcggccagttgggcgggagcgtgcgcgccatcaaccaaaatgcggatgccgcggcgatgggcttcggcggcgatgcgctgggccgtaaacagcatagcggtggcggaagtaatctggtccaacacgatgaacgacgtacgctcgctcatctgcgcggtcacggcgccgaccacgccatcctcgtcggcgtcaatggtaactggtgcatcttcctcatccatgcgaatgagacgaatcgcctttcatcccaatgatttcgctctcatggctgatacccgcgtgccgtcatgttccgtaccttggaatcagaagtcgagagtcaaggtccgaaaccgaatggagcggaccgaagcagggagcattgaagatgggatttctcaagaacttttccgaaccgtttgcgttcgcgctggcattgtggccgtttgtgtccatgctgctgacggtgccggtgctggcgttgctgtatcatcgcgacaatcgcatccgactgtcgtcggccatagtggcgtatggcacggtgctgtacctgctcggcctgctgtgcttcacactgtatccgatgccggccgatgcggcagcctattgcgccgcgcaccatctgacgccacagctcaatccattgcagttcatcggtgacatccgtaccgatggtctcaccgccgtactgcaaatcgcgtttaatatcgtgttcttcctgccgttgggcttcatcatgggccgtatctggcgttggccgctgccggttaccgcagtactgtcattcgccacgtcgctgtttctggagacgatgcagctgaccggcctcatgggcgtgttcccgtgcgcctaccgtctgttcgacgtggacgatctcctgtggaacacgaccggcgcgctgatcggattcgcgctggccatgctttcgctgcgcctgattccggcgcgggtcgccgatatgacgccgaccaccacacctggcttcatgaggcggctgatcacgttcatcatcgacatgacgctgatcgggttcgccgtgatgccgacgcatctgttcgtcatgatcgtccgctcaaacctgccctcgggctccaacggctcatggcagtcgatggaaccgttcgactggaccggctcgatcctcttcctggcggcgctcatcctcttcgagggcgtggtgccatggttgcgcggcggctgcacgttcggcggcagcttcacgcacatgacgatagagacccggccgcgcgaagggtggcttcgcgtggcgttctatgtggcgcgcatggcgacgctgatcgccgtggtgtggtggcatagtggcggattcaatctgctggtgttcatcggcctcggcatcttctggctggtcaagcgtcagatgccgtacgacctgatataaaccggcgctccgctgcttggcgttacaggaaaacctccgaccactggtcgggattcggaatgctgcgcagcgggccggccaacgatacggccaatcccgctacggaacagaccacggctacggccatcaccgccgtgaaaccgagatctggctgttgcaacagccagccgaccatcgccgggcatgctgcgcccagtatgccgaccgtggtttcaaatacggcagaagcccgcccctgcatgttgtcgggtgtcttgccgtagagaaagcccagcagaccagcgttcaacgcggggaacggcaggccggccagaatctggcagatcagaatggccgcgtagctgtgcaggaatagcagtggcatctggctgaccacgaacaacgccagcgcgcccgcaatcagtttccctgtgggaaccatatcgactagcttgttggccaacagcgagccgaccaaagtactcacgcccattgccgtgccgagcagtccgatcatgaccgcgttggcgccacgggtggccaacatgatctgcgcgccggtgatactggctacgcaggcgatgttcaccattgcaccgagtatgatcgcggataggaagacgcgcttggtcagggctcaaacggcgaccacggcttagcgcgacgagtcaacgcgcattagctgtctgcgaacgacacgaacaccttgtacataacaatgcccctttgcaaaaaacaaactccaattattgtaccagttcgagcatagaaccaggcgcgtcactgggcacaacataatcggccatcaatggtttctcggcttcgaggggctgatttcgtccggtggggacatctacttggctttcgaggggctgctcaaacgccaaaccgcgagtataaacggctttgcggcaacgccattacgccattgtggagccttgtctactcgggcatcagccccttgaaacggagatagatctccggcaagtgccaaatcagcccctcgaaatcgagttaggcgttgttttcgcgtttgcgctgccgttcgagtgcgtaataagccgcgtagcagcaggcgacgaacgggatcatgcaatacagggtcgaacgctgcgtatcatcgagcaccacgagcaccagcgcgccgatgcacatcacgatggccagccacggcagcaccgggaaaccgggcgcacgatagccgagctcatcggcgctgtgcccatcccgcgcccattcgcgccggaaacggatatggcacacgcatacggagaaccacaccaccagcgtcgccaaacctgacacggcgaccaacaccagatacacggtcgaggcggcgatcacggaagacagcaacgccagcagtgagcccgccatgctgaacagcacggcccacaccggcacaccacggaaattcgtcctagcaaaacgttcgggaatcagccgctccttggccagcgaccacaccatgcgcgaacacacgtacaggccggagttcgcggcggaaagcacggccgtcaacaccacgaagttcatgatgtcgccggcgaacggcataccgattgactggaacaccagcacgaacgggctcgtatccacgccggcctgatgccaggggatcaaggccgccatcaccagaatcgagccgatgaagaaaatcgccaggcgcagcaccgtggtgtgcacggccttgggaatcgcacgcgagggattcttggtttcgccggccgccacgcccaccacttcggtgccggagaacgcgaacaccacggtcagcagagtcgagaaaatcggcgcgataccgcttgggaaccagccgtcggccacgaagttgcccagcaacggcgcggaatcatgaccggcaatcggtatggcgccgaagatcgccagcaggccgatcacaatgaacgcgatgatggcgaacactttgattgacgcgaaccagaactccgcctcaccatatagccgcacggacatgatgttgagcgcgaacaccaccacaatgaacacggccgaccacacccaggacggcgaatgcgggaaccatcgctgcatcaacagccctgcggccgtgaattcggaggcgagcgccaccgcccagttcagccaatacaggatggcgatggtgaacgcggtgccggggccgatgaaccgcttcgcatacatgtggaagctgccggcgtacggcatagccacggacagctcgcccaacgacaccatcacgcagtagacgagcagggagccgaccgcataggcgagaatcgcgcccagcggaccggcctggtgaatcgtatagccggagctgacgaacaggccggtgccgatcacgccgcccagggagatcatcgtcaggtgacgcgactccatcttccgttcaaggccggtatcgtccttgggtgtgccggctgccgccatgctcgggtctcctttggtcgggtgaacagttgtgtctcgtgtcggttgtgcgggcggcgctcgatgccgcctaccatatgatagcggtaacacgaacagcgagtggaacacgaggagtttggaatgatggaactgtatatcggatcgcatctgtcgacggccggcggatggaatgcgctgctggaacgttcccatgaggagggcggtaccgcgttcgcgttcttcccgcgttccccgtacggcaagcgttcgaaggcgctcgacccggccggcgcggcggcgttcggtgcgcgtctgaaggctgagggctatgggccgttggtcgtccatgcgccgtacgtctacaatctagccggcaaggatgaggccaagcgcacattcgcgatcgaggcgttggccgaggacatcgagctgctgaccgccatccgcgaggccggacaggaggtgtatatcaatattcatcccggcgcgcatgtgggccaaggctccgagaccggctgccggctgatcagcgagggactgaatcaggtgttcgagcgcgcggccggcgtcatggtgcttctggagaccatggccggcaaaggcacggaatgtggccgcaatttcgatgagctcgccacgatcatggatggcgtggagaataaggcgaacgtcggcgtcacgttcgacacctgccatgtgttggatgccggctacgatttggtgcacgactacgacggcgtgatgcgccagttggatgaggcgatcggcttggccaaggtcaaggcgattcatgtgaacggttcgcagttcggcctcggctcgcacaaggaccgtcacgccaatatcggcgagggccagctcggcatcccgttcttcacgcgactggtcaacgacccaaccatggccaagctcccgatgattctcgaaaccaaggagcagacgcccgccacgcatcgcgacgagatcgagttgttgcgcggattggtgcaaaagtagtcgtagtcgaccaatgtcgagcagaagagacctgtttttgactgatggccatacgaggttagttatcagcggggtgttgattgatccgtcttcatatacagctgcatagccggttccagctgcaagagctcaaaacagacgcatgggttcggcggaatccaatggctgaataagacgtttgccgtcgctgttcagtggcgcgacttcgtgaaattgcagatgccgggaaagcatggtacccgcttcccgcatggaatctaacagtgcggctccgtcaacggagcggtccagccatgaggcaaccatattccgaggcgccagcaggggcatgcgatcatgcaccttgacgaactcgtccgcggcagggcaggtgatgatggttgcggtcagctgccatggcgatgcgggagacggcctccaccatgagtacaggccggccaaagacaatagttcatcatgtggtgcgtgaaaatagaacggcctgcgacctttccattcgtagtagccggaagcggggatgatggctcgcatggattttgtggattcggcgaacgccggcttgacatgcgcagactccacacgcgcattatatgtggggtagctcagcactttgctggcgctccatcgcggcaccagcgaccaataggcaccggtcagatgacggcggccatccttgccctgtgccaccacgccaatgttctgcatgggtgcgatgttgtaggaaggctgtggcagagtgtcaacgcgcacgtcatcctcgtctaccgcgaactgtgaggccacggcatcccaatccaaatcaagcgcgaatctcctgcacatgcgcccagtctatgccatcaatggaatcaatcccaggccgtatgaccgatattcatggcgattttcctttttgttggccgctctggttccgtagcgatacgaaccaacgaggaatagcccagaatgtaggacgggttcggcaatcgggacggggcgtgacctagagtggcgcatgaccgaacaccaacaaagggaggaccatgtcggttttggacgaactggtggcgggagcgctggaggatcagcgcgcccgtgagctcaccgtatcgcttgaggacgtgaagaaggccgcgctggcggccccggctccgattgacgcgacacgatggcttaagcgcgccgacggcatccccgtgatcgccgagatcaagcgcgcgtctccgtccaagggccacctctccgacatcccggacccggccgcgctggcccgcgagtacgagaagggcggcgcaagcgccatctccgtgctcaccgaaggccgcagattcctcggcagccttgacgatttcgacaaggtccgcgccgccgtgcacattccggtgctgcgcaaggacttcatcgtcaccgactaccagatcttcgaggcccgcgcccacggcgccgacctggtgctgctcatcgtcgccgcattggacgacgcccagctcaagcacctgctcgacctggcgcacgagttgaacatgaccgtgctgatggaaacgcatacccgcgaggagatcgaacgcgcccgcaaggccggagccaaggtgatcggcatcaacgcgcgcaacctgaagaacctcaaggtggacgtgaacaaatacaacgaactcgcggccgatctgcccgataacgtcatcaaggtggcggaatccggcgtattcggcgcggtcgaggtcgaagactacgcccgcgcgggagcggatgcggtactggtcggtgaaggcgtggccaccgctgatgatcatgaacttgcagtggaacgactagtaaaggcaggagcacaagtgaaagcatccgaaaccaccccgctcagcgaacatcagggaccgtactggggacagttcggtggccgctatgtgcccgaggccctcatcaccgccctcgacgagctggagcgcgtgtacacgcaagccaaggccgaccccgaattccacaagga

SEQ ID NO: 1819 - DNA, 8885 bp, Unknown
  MAG_14  MAG No. k141_43255
atggccgcggccagcgccgggcgaagcccctcaggcacaccggccagaatggaattgtcgacgtcgtccgaagcttcgatgtcgcctgcggcgaggctcaggaatgtcttgtcccgctcaagttcggacagtatgccggcaagcgagccgttgatcagatccggatgcacggtccggctgtctgccgcttgtccacgggaagactgcgtgtcggaagttttcgccttagcggccattgaacttctcctgggtcttggcaagaccgcggaagatgatgtcctcggcggcgtcggcgccgtcagccaggaattcgggcagctgcttgcgctggtccggaccgaatccgcccagcacccagttcaccgtgttgtcatgcgcgttcgcaccgcgcttggagtgaccgacgcccatgcgcacacgcgcgtatttcggcgtgccgagggaacggtcaatcgacttgatgccgttgtggccccctgcggagccgcctgccttgaccttgatacgaccgaattccaagtccatgtcatcgtgaatcaccacgatatggtcgggctcgatctggtaataggcgctaatggaagccaccgcattgccggaatcattcatataagtcagcggcttggccagaaagaacttgacggtgcggccgtccaggttcatcacgcttttaccgagcatggccagacctttgtggtcggcgaagttcaccgtccaacgttcggcgagcacgtcggcggtcatgaagcccatgttgtgccgcgtgtcctcatattttttgccggggttgcccagtcccgcaatcagccagaaatccgatgccataatccactcctcgtccgtcttcctatattcccgtatgcacgttctgtacgttccgtacgtcatgcgcgcgttcgcctcgcgcactggcccatgcccggccggattcaaccgtcaagattgtactcaacgccgccgtcaagccttggaatcggcaagcagcagggcacggcattgctcggcatccatcgatcggaccgatgaatggtgaaacgcttcgacgtcacgagtcacgatgacgtcggcgtcattgtcctcggcaacggcacggatgagcccgtcctcgaagtcgggctcatcggatcggtacgacatacacgcatggcgttccataagtggacggatgtcgaacaattccatcagtccaccgatatcgtctcgcgccgcccgctcctcgccataatgcttgcgcaacacgcaatacacgtcattcaatgacgataccggcgccatgatctcaatgtttggctgtgcaacggcttccatgagcaaatcaacacattgtttatggaaaggcgctcgtttgtcattgcacaaatcgagcagaatattcgtgtcaaacagcagtttcatcccgtcccccaaatcgttccatacgtgcctgcgcgagaatctcctcatccgaaagatcgccttccgcctccggcaaattccggtcggcgaaacgttgaatcaactcctgctttttcctacgctcccgctcctgaatcagggagagcgtcagacgctcgaattccggcagttcccccgtatccgcaaggtagtcggtcagatcacgaatcaggtccgaataggtgcgcccattacgcttaagcactttctccgcgtcgcgcttccgttcggcattgacgcgcgccgtcaccatggccatagtcatatcgcacctccttgtaataccagtattacaagagatggggacgagtgaatcgcgtctattaggcggtgccgccagcgaccttttcgcgctgtttgccgttgaggtaccagtaggccagcgccacgaacagggccgccgaggatattgccgagcgtggctgcggacaggttatagaggatgcccgacacgtcgagcgccgcgacgcccgccgcgtcggcgccgaaaccaaacgttttggcgaccaggcccatcggcaggaagaacatgttggccacgcagtgttcgaagcccatcgccacgaatccggcgatcggcagcaggatgcccagcaccttgtcggatacggagcgcgcggcgaatccgatgcgcacggccaggcagacgagcacgttgcacaggatgccgcacacgaacagcgtgtcccagcttggcgtcactttaacatcaactccggttggaaaaaatctcagtatgtagcattcggttctcaaataggagaaacatgcagcggcaatcaacaacttgtcgtttacgacgccaagcaagggaaacagctcagacagatgacgcttccctgcaatcggatgacatattgcgggacggcagcggattttgggcgttcttggcgtggcatcccgcaagcgttatcgcacgttatctgcaccgaatcataagaatggcagaattccaatgatttcgcaggaagagttgcgggacgcgagctatgtgcatcgtttgacgtgtgtggcatcccacgtgattgcgggataccacgtcaaaacggacgaaaatcgcgtgccgtcccgtagtttgccgttatctgggataagcgcgtccgatatatggcgttcgaggaaaagagctgatccgatacaactttttagtgttataggacaccggaatccatggagagcaagggtaaaccgcctcgggcctacaggtccaaataccagtaggacatgtcccgcatggtgccggtggagtcggtggcagcggcgggcatgaggccgaattgggtgaaaccgaagcggcgcatgagggcaatggagccgacgttatcggcgaaaatgatgccacaggccttgcgcatgtggcgggcccgcgcctcggtgagcagcctgtcaagcatgaacgtgcccactcccctgccttgccatgccggatcgatgtaataggccaaatcggtgacgccgtcatacccggcacgatcgtagaacacggagagcgcaccgaagccgatgattgaaccgtcttccgattccacaataaaaacgccgtagggcggcgtatgggattcgacccaggcgcggcgttggtcgagggtgcgcggggtgaggtcggcggtggccccacccgccaccaccgcagcgttgtagatgtcggtgatggcttggatgtcggattcgacggccggatggaaggtgtatggcatgaagttcctttgaatacgcaaatagcccgtccttatgataaggacgggctatgtcagttgaggtaaccgactcccttcagtcgccttcggcgatagctcccctcaccctgagggaagccaagttacttgtcgagctcgatggccttgttgagggcgtcttcaagctcctgctgcgccttgccgtaggcggtccagtcgccgttcttcatggcggactggctgtccttcatggcttgggcggcatcgttcaacgcctgctggagttcggggctgcggtcggaagacgagccggaatccgactttccgtccgtggtgccggactgaccaccattggtatcggaaccagattggtcaccggacacgttctcggcatcgcccgcggccgcaccggaattgccaccgaacacctgatccaaggcctcatccaacgtatccgcgaatccaacctgatcaccgaatgcgaccagcgtcttcttgagcaacgggaatgaggtcacgcccgaagacttgacgtacacgggctgcacgtacaccagtccgccaccgagcggcagggtgagcaggttgccgcgcaccacttgcgtgtcgccggattgcagcaggttcagttccttggatacatcggcgttggcgttgaagttgttctgcgcctggccggggcccggtacgttcgaatccttgggcagctcctgcaatcggatggtgccgtagttcgagcctatcttgcccttctcattgccggcatccgagtcgaccgacaggaagccggtcaggatctcacgggtggactggccagccggaatgtaggtggaggtcagcgagaacaccggttcctcggtgccaccggtctgcaaggtcaggtagtacggcggctgcaggatgtcctggtcctgctgggactgggattcggtcggatcgaccggcgtctgccagaagtcttcgcctgagtagtactggctggcagaggtcacgtggtacttggagagcagctcgcgctgtaccttgaacaggctttccgggtagcgcatgtggctcatcaggtcgccggagatatcggagagctggtggtactggccagggaagatcttctcccatgccttgatcaccggatcggattgatcccacacgtacaggtccacggaaccgtcgtaggcgtccacggtggccttgaccgagttgcggatgtagttggccttctgagagcccagggacgagaccgttgcggaagagacggtggtggaatccttggtggcggagccgaggtcggttatttgcgagtacgggtaggcgtcggaggtggtgtagccgtcgacgatccacttgacgcggccatcgaccacggccggatacacgcggccgtcaagcgtcaggtacggtgccaccttggccacgcgctccttgggggaacgatcgtagagaatctgcgattcgctggtcacacggtcggagaagagaatctgatcggagccgaagcggatagcgtagagaatcctggagaacaggttgccgaccgaagggccgccgtcgcccttgaacgtggtcagagcaccttccgaaccggtcgggtagtcgaactcccaagcctgcgtgccttcaggggcaccgacaatcgagtattcggtggtgttcggcgagaagtagatgcgaggctcgtacttttcggattcggtgagcttgccctgggtggggatgccggattcgaagaattcgggctggccgtcggcggtcaccttgttgccgtaggcggccaccacgccgtaaccgtgggtgtacacggtgtggtcattgacccagttgcggttgtcattgccggccagatcgagctcgcgggcggcaatcacggtgtcctgggagacgccgtcaatctcgtacttgtcgaccgccagggtgtcggcgaaggtgtagtactgcttggactgctgcaactgtttgaacgtggggctgacgacctgcgggtcgagcagacggatctgcgcggtggtgtcggcctccttggccagagcgccctgctcacccttgtcggtcaccttgtattgctcggtcttgagcttgtcaagaccgtaggcggcgcgggtggcgtcgatgttgcgctggatgtaggtggattccatctcctgtgcgttcgggttgacgcggaagcgttgcaacagcaccggccatgccacggtgagtacaagacccaccacgaccacgacggcaatggaggtcaccggcacacgccaggccttgagcgcggcggaagcgcgcacgccgatggacgcctggccttcgagcgtgtgggagcgcatgagccagatgcccagcaccacgccgaggatggcggtcagcacggccatgatgaaggtgacggggatgttggcatgtacggcggtgtaggaggcaccggtgatgcgtgaaccctgcacggtgagctggtcgaagacgccaatcatctggcgcactgcccaagcgaacatgttgagcatcagccagatgccaagctggcgacggcaacgcttggtaatggagaacaggccgcgtccgttaaccggcatggtaatgcggataccgcccatcagcacatgcgtgaccacggaaaacacaaggcccacgcccagcagcatggccacggcggcgagcacgagcttcaggcccggcagcacgaacacgtagaagccgttgtccagaccgaactgcggatcggtggtgccgaacgactgcgcgttgaacatgagcagaatctcgctccagttcgcgttaaactgggaaccgaagatgacgccgacgatcagcgaaatcaccacggccacgcggcgagcggttttcgagctgacggatttgccgacctcgaccacatcgccgttaatgcgaatggtggaaccgtcggccgaatcagggcgtgctcgaatggccagccaggcggaaacgaagccggtcagggccatgagcagcgcgtaggccacccacagaccgattttcaccccgagctgggtccagaccacggactggaagccgagctggccgtaccacatcagatcggtgatgaatcgggacaggccgaagaacagaccgacgatgatggccaaggccagcaccacgccgatcagaatcttgctgccacggctggctcctgagccaccggacgctggcttacgggtgatacgcggattggccggaccacgtggagggcgggatgacccggaggggccagcgttggtgttgtgggccggaccgtccccatcggcctcgacatcgaggatgatcggatcgtcattgttcgcattgttgcgtcgtgaatcgccgccattgccgaacagtactgagaaaggatcgttaaaagacataactcaagcctatcgaaagggcgggaggtcggttatgccctgagcacagaatgaggcaacatcctgttctacgctctgttctacgcttgccggtatggacagacaacggccacaacatatgcgtccctcagcacacgccacacgccaacttcggcacaggagcattccaatcgtggcggcaatatgtgctttggcggtggtgttggccggtgtggcagtctacggatggcatgtcggatggttcgccaaatccacatcaaacggcaacaccaccactccccagacctcccagacgagtgcgttaccgcgcaccgacgttccttccccgaagaagaacgacgatccggcggcacaagcccaacgtgcggtatccgccatgacgcttgaggaacgtgtgggacagttagtgatggtgccgttgttcgccggttccgaaccctcctcgttggcttcaacaatcgccgacgagcacattggctcggccattctcattggcaattggaataccggcgtcgatacggtcaagaccgcgaccgcgcaactccaaggatatgcgccggccggcaatcgtctcatcatcgccaccgatcaggagggtggtcaggtacagcatctgactggtaccggtttcgacacaatgcccagtgccgttgagcagggcacaaagtccgctgacgcattgcgtcaatcggcaggcacgtggggttcgcaattagctgctgctggcataaatgtcgatttggcaccggtgcttggcacagtggttggcaatcgtgcctcaaatgctccgattggcgcgctggatcgtgatttcggattggatgcggccggcaacgccgaacatggcatcgccgttattgaaggtttgcgagacgctcaagtcggtgcggcggtcaaacattatcctgggttgggcgcggtaagcggcaataccgacttcaccaccgaaggcattctggatacgaccaccacgttggacggggccgaggcaggtgcctttgaccaggcgattaccaaggccgatcctgcaatggtgatgatgtcgtcagccacgtatcaatccatcgacccgaataatccggcggtgttttcttctacgattatcgacggtcatattcgcaacgtcctgaagtacacgggcgtggtgatttcggattcgatatctgccgaagcgttgagcagctacgatgtaagccaattgggagtaaatcttgtcgaggcgggcggcgacatgtcctgcatcggtcagacggattatgtaaagccaattgtggacggcctcaacgaacgggcgaagtccgatccggctttcgcttcgaaggtgacggcggcggcgactcgcgtaatgacattgaaaatcaagatgggactgacctgaccgttcatccttgcactggcgaggattgatgcgcgctgattcgcgctaatcctcaccagccctcgtacaaatgcacactagtcctcgtacgaatcgtcagtcctcgtacgaatacagaccatgcttgccgatgtattgcaccacgccgtcgggcaccagataccagaccggctcgtcgtgttcggcgcggcggcgtacatcggtcgaggagatggccaaggccgggatctcaagcgtatcgaccttgccttcgggcaaggtcacgccgtccgggctggagtagccggggcgcgtgacggccacgaagtgagcgaggtcccacatgaggtcggcgtccttccactgcatgatttcggccacggcgtctgcgccggtgatgaagaacagctcggcgtcgggatgttgggcgcggatatcgcgcagagtgtcgatggtgtaggtgacgcccggacggtcgatgtcgacacgcgagacggtgaatttggggttggatgcggtggcgatcacagtcatcagataccgatcctcggcgttggtgacgtgcttgtccagcttgaacacaggtcggccggtgggcacgaaaatcacctcatcgaggtcatacacccaggcgacttcagaggcggcgaccaagtggccgttgtggatcgggtcgaacgtgccgcccatgatgccgacgcgcaggcgtgtatgccagttgccgcgtgcggaaagcctgcctttgccgtggctgctggccccggccggtacggacaggtcggacatgcgccgttcggtttcgccttgggtgacggcaatgatttcggcgggctcggcggattccactgttttttcggactgaactgacgcagccgttttgtggctgccggtaacaccactcatgcctggccgccctcgccggcggcgtcatcggctgattcggtttcctcttcgatttcgccgaccggatcaggcaaggtggccacatgacgcacgccttgggcggcggcggccacgcgcggcacgtcgaacagcaggcggtcaagcttgcccgcatccatgccgttttccttg

SEQ ID NO: 1820 - DNA, 13907 bp, Unknown
  MAG_14  MAG No. k141_43367
gaattcggcgaccttctccaggttggtggagacggcgacgaagtgcttcttgatggcttcggcgttcttctcgtcggagccgtcgatggcgcccttggccttgagctcttcgagcagccaggtgcgggcttcacgggcgttggtcagggtctccagggtggtgaaggtcttggacacgatgatgaacagggtggtctccggatcgaggcccttggtcttctcggccaggtcgttggggtcgatgttggagatgtagcgggcggagatgcccgcgtcggcgtacggcttgagggcctcgtacaccatgacgggacccaggtcggagccgccgatgccgatgttgaccacggtttcgatcttcttgccggtcacaccggtccactcgccggaacggaccttgtcggcgaaggcgtagatgcggtcgagcacctcgcgcacgtccttgacggtgtcctgaccgtcaacgatgtacttgccctcgtcttcgaccgggcggcgcagcgcggtgtgcagcacggcgcggtcttcggtgttgttgatgtgcacgccggtgtacatagccttggtgcgctcatcgagcttgacggccttggcaaggttggcgaacagctggagggtttccggcttgatcaggttcttggacagatcgaagtgcaggtcgccggcgtcgaaggacagcttgtcgacacgctcggcgtcctcggcgaaccacttcttgaggctcacgccttcggcctgaagctcgtcatagtgcttctgcagggcagcccactcaggggtctgggtggcgtcaacgggcggattgatggccataggattccattcctttcatcagtgactggagcgccttcgctcacggctcggatgcgctccgtatcaccaaacagaatactcacaaattcggacatgaacagaacaaaaatcagtcagcgatgtcggattgccatcgtttgcattatcgaacagttcgtggcgcggcacaaccgtcatcttcaaccgagcggtcacgacacaaccgccaagccgccgattggacttttcgcggagatgtcttatacttaatttcttgtgcgcggctggcgaaatgccttccgcgaaccaagccactttagctcagtcggtagagcggctcactcgtaatgagcaggtcgtcagttcgattctgacaagtggctcggatgccctaggctggctggtctgtaatggctgtccggcctagggttttgtatatcttccacacctgtggaaacgcggatatgcacgcgcgagtggcggaattggtagacgcgcaggatttaggttcctgtgtctttgacgtgtgggttcaagtcccatctcgcgcaccggcttgagcctcctggaaacattggatcgccaacgattccgggaggctcttcgtatatgcgtgaggcaattgcaagcccttgcggacgcctctacatatggcaatgccaaggcggcaaatataatggtcacagcattgtgggtctgagcctgtgcgccgtgagcctgtgtgagccaaggagagaagtgtatgtccgccattcttacgccggttggcctattgctgatcattctcgccggctatctgttcaagcggttcggcctgttcgggcagaaggattatcgcgtgttgcaaaccgcggaattcaacatcgtgctacccggtgccatcgtatactcgttcgccaccaatccgcatgacatctcgctgctgcttatttcggtattcgcattcctgtttgcttttatcccgatcgtgttcatctttctggccacccgcaagcgcaatgtgaccgaccgcgccttcctgatgctcaatggcgccggcttcaatctcggttgtttctctttcccggtcgtccagtcattctggggtgcgggcgcggtggtgccggctgcgatgttcgatatcggcaactgcgtgatggtggccgccggcaccaatgtgctcacccagcaactgctgcatattcagcccggcaaaacacttgccgaacaacacgccggttcggttcccaccttgccgtacgaaaagcccaaggatcgcgacgccaaacggcttgcccgccgcgcattgctgcgcaccatcggcaagagcttcttcggctcggtgccgttcgacacgtatctgctcatgatcgcgttgaccgtcgccaacgtgaagattcccgattggatcgcctctataacccagccgttgagcggtgccaacgcgctggtgtcgatgctgatggtgggcatgctcatggatttgccccagtccaagcatgatgtgaaggaagtcatggccgtcatcgcttggcgtataccgttcagtgtcgccttcgcgttgatctcgtggttcctgctgccgttctcggcttcgattcgcgccgtgatggtgatctgcgcgttggctccaatcgccattttctccacgctgttcaccgacaaagtactcggcaacgccaaactggccggcttctcgctggcaatcaccgcgatgatttcactggtgatgatggcatttgctcacgcgctgatgggcgtgtgagcaaatgcgcgagtaggcacacgacgggcacacgacgggcacacggtcaggcgagacgcagcccacataggttcgtcccccggccgccagctgctaccggtgcagcagcttgtgcgccagattgctcacgccgaagcggaacttgtccaccggcaacgtgaatttgcctaccatctgctcgacgtagccgttgaagccctgcttgaattccagcacgccgcggccctcgtcgttcggatcgtcgaacacgccggaaatgccgtagaagttgtagcggctcacaccctgttccacacacaggtgcagcatcgtttcgtactgaatcagcgccgaggcgtagaacggcttgtactcctccaacgaaccggaatactgatagaccacctcattggggtgactgacgaacattgaagccgctgccggcagcacatcgcccttcttggcatatccctccacctcagccagacgcttgtcggcggccgcgagattgcgcgattcctcccccagctgacgttcgatgcgcgtggtcggacgttcatcgtatttcgtctgcagctgtgcgaccttggtctgcaaggcctcgcgcttggcggtcatatccgccacatattcggcgatgtggatttccgcgagcatgaaatgcgcatccgcgccatacgcctgcttgaactggcggaaatagtccgcaccgcgcgtcgcgaacccgcggcgttcaccggtccgccgttcgatatcggcgaacacgtcgaactcgtcggggccgatttcgcgaacgtgcacgcccatcgactgcgcccgcttgacgctccattgagcgcgtttgccgaatgatgccagcagttccttgccgttggtgatgccggtgagatccttgacgtacatccactggcagaccacgtcataaccggtatggaatccgccatgcgtccagccggcatcggtgaatccggtcagcagtgcatcgttcggctcgccgtcgggctgcccgtccgaggaatacagacggtaggcgacgttaggccagcatgccacggaaacagcatggtggcgacgggccgattcacgaatcgcctcggttatggcccgcagcagagccggatcatcgctaatgccgatggggccgaaatatacggagccatctgcaccgaaacgaccattgaggtacagaatcacgcagccggctaccagattgccggatgcgtcgcacacgccaacgcattcggcttcatgcccacgaatcttggcaagacggacctgcccggaccattgctgaaagctgccctggcttgtggcttcggaaagccggtcgaactcttcgggcgtaatcacgccaaacgtatacgtcgtatctgttcgattcgcagtcgcgctcatctcgtcgtcacctgtgccttatttctgtgtccgtgctcgccactgtttgtcagcgatgcagcagcttgtgtgcggcttcggatacaccgaagcgcagtccgtccaccggcagcgtgaacttgcccggaagctcttccacgaatccgccgaagcgagtcttgaactgccagacgccgtaggaaggatcgttggcgtcgaaaatgccggaaatgccgtagaagttgaagcgctccacgccacgggcgatgcagtcaagcatcgcctcgaagtggattagggaagacgggtagtaatccatgaaacgatcgtcctcgccgctggacaggcagacgacctcgttcggatgccagaagtagacaccggcttccaccggaatgaccgggccgtccgaggcgatgatgccattgacttcgccgatggtcttttccagcgccgtgatcttcttgtctgcggtggcgatgcgcttttccagcgttgccgggtcggaggcacccttcttggccgtgccttccggccgctgttgcgcgcgctggagcaggcgttcgaggttgcgcttgtctttggaggccgcattcagcttggattgcagggtgtccagatattcgtcgaaatgggtttcgaccaccttgaactcgatcaggtcgccgaaggtatcgaacagacgctcatagtaggccagatcgcggctcttgaagccttgacgtgcggcgctcatatcgcacagcttgacgaaagtgctcagttcgccgcgttccagccggcgcacgcgcagaccggaatcctgggcgatgcggatgttcttacggcggtacttggagaacgaggccagcagttccttctcattatgaatgccgtcaagccccttgacgaagttccagcggttcaccacggattcgtagcccacggtgaagccgccatgtttccaaccgaagcgggccatgttgtccatcatcgtggtgtccgggtcgctggtcggcttgccgtccagatcatgcagacggtagactgcggccggccagcaggatacgctgatggcgtgatgggccttggccgaacgacgcagggcttcggtcatcgcctcaaccacctgtggattgtcataatcgcacagcggtccgcaccagaccgagccttccaaaccgaaacgggaccgcgtgtacaccacgtagcaggcggcaatcagcttgtcaccgcgcttgacacccacatagtccaccggaccgttgaacgcacccatggcggccatctgcgaggtctgctggaaactaccttgcacttgagctgcggagaacgcatccagctcggcaggagtgatcttggtaggggtgagtgaggcgacgcctgcatcggattgcgtcataatcgaaccttcttacttgtcgttactctgatcgttactctgggctctggaacggcctgtgtgctgcgtccgtttaccgcgacagcagcttgtgcgcaaattgcttcatggcataggcaaccggtttgaccggcagcacgaactcgcccggaagttcctcgacatatccgttgaagccctgcttgaactccagtacaccacgcccctcgtcatcgggatcatcaaagacgccgtcgatgccgtagaagttgtagcgagacagcccgtgttccacgcagaaatgcagcatcgcgtcatgctgaatcagcgcggaggcgtagaagggcttgtactgctcgacgctaccggagaacaggtagatgacctcgcgcggatgctccacgaatagtgatgccgcagccggcagcacatccccgtctttggcgaactcggccgcctcgttcaggcgcttttcggctgccgccagattgcgggtctcctcccccagctgacgttcggttttggtggtggggtgttcggcgtttttggcggtcaatgccgccaccttggccgaaagtgcttcacgcttggccgtcatgtccgctacatattcgtcgatgtggatctcggcaaccataaaatgcgccttgttgccaaacgcttccttgaaacggtggaaatatgcttcgccacggtattcgaagctacgacgttcggcggtttgctgctcgattcgtgcgaatacccccaactcgtcgtccgacagctcacgcacatgcacacccatcgattgggcacgcttcacgctccactgggtgcgcttgtcataggacttcagcagacttttctcatcggtaatgccggtcagatccttgaggtagcgccaacgtggaaccgccgtgtagcccacggtgaaaccgccatgagtgaagccgatcgcctcgagccgttctatcagcttattgtcgggagcgccgttctggtcatccggcaaagaagctccattggtgtcgcgaaaccgatacggggattcaggggtgatttccagctgtgaagcaccctttgccttggcatggcgtttcagcgcatccatgaagaaggtcaatgcttcggtgtcgtgatagtcgcacatcgggccatcatggatggccgcaaatgtagagaatcgagagcggtgagtttcgaacagcgccgccgcgacgatcttctcgccctccttgagggccagatattcgacgtcgatcccctgcgcggcgcgaaggcgtcccatcgccgaggtctgttggaaattgccttgtggatgcctggcggagaaatcatcgaactcttcgtctgtcaacttcaccagcacaaaatcacgcatgcttccctctgcctccgagtcaatcaggctcaccatgctagcataacgcgcacacgacgaatggggtccgagcagatgaggtgtgcacatcgttcgcactattgcctccacaatggctcaaagaacaatggcccgaagatgctgaacgtccggcttgcgttgaatcaaacgcagtgctatattctctacttggctcttggagccacgccaccttagctcagtggtagagcatccccctcgttcgtgggaaggtcggtagttcgattctatcgggtggctcttgttcatcaagaaggccgacgcactaagcgccggccttctttcgtatcgcccttgctaggtcataggcgcttgctagacacttgcccgattcgggaggggctgagttgctgagccgcgactcaactgtggcttagtcgcggctcagtgcagttagacagcctagacgacttagtgcagcagcgcctcgatagcggggaccaaggctttcagcgccttgcctcggtgggaaatcgcattcttctcggccggagtcatttcggcgctggtcagcggctcgccttcatggtcaggctcagtgctgacgcgaccggcaggctggtcgtccgggacgaacagcggatcgtaaccgaaaccgtgttcgccacgagcctcgcggatgatacgacctggcatgtcgccgagttccactgtctccgacttgatggcgtaccgggcatgcaccggggcagggctcccatctgcagccgtggtgtaaacggtgatgccgtcggcagccactccaccggtcacgtcggcactggcctcggtgtccgggaccaccagcgcggcggcgcagcggaagcgcgcggtacgcttgtcatccggaatatcttcgatttgggcgagcagcagcgcattattggccttgtcgtggccgtgagcacccgcccagcgagcagacagaatgcccggagcgttacccatcacatcgacgatgagacctgaatcatccgctacagcgggcagaccggtacggatggccacggcgcgggccttgagcagcgcgttctcctggaaggtgacgccggtttccaccgggtccggcaggtgaaggctgccagcggacaccagttcgatgttttcggcatccgcgccaagatcctcttcgagaatgcggcggatttccacaagcttgccttcgttatgggttgcgacgacgatttgcatgggttctcctttaagaaggctccccttgtcaggggagctggacattgcagaccgtacggcttccagccgacaacctcccctaaaggaaggggagctggcttagtctagggacaaagcggcacgctgggcggcttgcagttccttgttgcccttttcggccaagtcaagcagggtgccgagttcggcacggttgaacggacggtgttctgcggtgccctgaatctcgatgaaggtgccggaaccggtcatggccacgttcatgtcggtcatggcctgactgtcttcaatgtatggcaggtcaagcatcggggtgccgttgatcacgcccaccgatacggcggacacatagtccttaagcacgcggctggcggacttgatatggcggtgcttctccgcccaattgactgcgtcgaccaaagccacgtacgcaccggttacggaagccgtgcgagtgccgccatcggcctgaagcacatcgcagtcaagctgaatctgattttcgccgagcgccttcatatcgatgacgccacgcaggcagcggccaatcagtcggctgatttcgtgggtacggccaccgattttgccacgtacggattcacggtcggtgcgttcggcggtggcacgcggcagcatcgagtattcggcggtgacccagccgaggccggagtccttgcgccaacgcggcacaccaggggtaaaagtggcggtgcacatcacgcgcgtgttaccgcattcgatgagcacggagccttcgggggcgtcggtgaagtggcgggtgatgcgcacggggcgcagctcgtcgaccttgcggccgtcggcacgaattatttggtgattgccaagcatgtctttgatttcaaccatgcgccccagcatacgccatccgctctatgcctggatagcaactcgtcaaccatcatcaaaccccagcgcaatgtcattccctgcttacatatccattccatgacacttggctgcacgccactattttcttatgcaccactcgcttacagagtcaatgcctgcgtacctgatgaggattgggaaagatcgtccgctggaataagaatgccatattccatgaaatcttggttgaattgcttgcgctgcatagcgttgagttcgtaatcgattaacggcaaatatgtatagtccatgtcatgcaacggctcttcatatcgatgaagcacgtgcataattgccgcgctcggcagtggggaccaccatccatccaagccataccggtacggaggaaccaatgtcaagcgtctgttccttgggttgatatcccaacgcagaaaacggtataaaccagcgagaaacgcaatccagcacgcatcgttcacccgtgcaaccgctcggacgaacgatatacgttgatgttgaacattccgagcatgaatcagattgacgcagagcatcttcaacgtagaccaggtcgctccgctttctattgcatcgaaatcaggaggcctacgcagttgcgccaacaacatgtgcaattcgtcttccggaatcgtttgcgagggggccacggcttctaggtgaagaccaaaaccagcccgctcaagcccctcggccaaaacatcaaacaacatacctctttgcccacgcaatacgcgaccaattgcagaccgatccaaaccagtacgctgtgcaagctcataggcattccaaccagtctgcgacatcacttcattcagcacagccgcacacgaattaacagggcaaccagataccacaccgtgatgcacgacatcgcactgttctaacgctcgatgctctacagcgcgccgctctgatacgtcatcgttgcccgccgcgttctcatcattgagagtttcactcatcgaagtcaccttgcctcggccgatttcccggtcatttcatcaaaccgcaatcatcatatcccacaatcccatgacgatacgattcgtcatatcccacaattcagagacggtatgattcgtatcgcatcagttcacacgattcttcaacgattgctccgcaaacgattgctctgcacgcatcacggcattctatcggcacactattcctcccaatcagcccaacgcaacatcacacgcaacatcacacgcaacatcacacgcaacatcacacgcaacacccctcacgcaacacccctcacgcaacacccctcacgcaacactgcgccatctctgtaacatcaccgacaacacggcaatcccacaacgtctcggtgcaatatcctctgaaatggtttggtttttcactccacctcgtcggcatcctgaccaggataggaatatgtgtcgttccgcaccatgtacaaaacgttgtcaactgacaacgttcttcaaatcaattggataagacaaatggccatttcccgccaattcatctgaatcaagacgttgtcaactgacaacaaaatgtacattgcaacagcatgcacatatacatatttccccggtgaacagtaccccccccccaaaaaaaaaacaaggggggccaccctcagctggaaccacgtccggcgaaccgggacgcagttcagcccgaggggacgcggccaatacagccccgggacacagccacagggggtgcaaacacgggggtgcgaccggggttggatctccccgcctcggcggcgatcacaggagtgcggccaacacagacagagggacacagacagagggacacagacagcgggaagagtagccaatgtaaccaaagggatgcggccagtgagatacggtcagagaacctgagtctccgtaggaatcactggctcgcccttcatgaggctctgcgcggtgatgggcagttcggacaacgccttggcgtggtagtcgtgggcggccatgatggcgtcatggccctgccactgagcgtcgatctgcccatgatccacaaagtcgaccagcaggttcttccacgtcggttcaggcgtgaaaccggccagcttctcctccgagccggaaatcacgtgttcggcttcggctaacgcgtattcgtaggagcggaatgccagtttgcgaccgggcactgtggccttgtccttggatttcttcatgaccggaaccatcgtgccgtcagcgccttcacgttcggtgagcttgtacaccatcgcacaagtgggagcgccggagccggtgaccagcatggtgcccacaccataggagtcgaccggcgcggtctgcaatgcggcgagcgcgtactcatccaaatcgttggtcacggtaatggtggtgttcgtggcgcccaaggcgtccagctggttgcgcacacgctgggccatggcggctaggtcgccggagtcgatgcgcacgccacccagttcgggaccggccacctcgacggcggttttcacggcttcctcgatgttgtaggtgtccaccagcagcgtggtgttcttgcccaatgcctcgatctgcgattcgaaggcgtcacgctcggaatcatgcaccaacgtgaagcaatgcgcggcggtgccaatggccttcagaccatacagctgggcggccagcagattggcggtacccttgaatccgcccactacggcggctcgagcggcggccacggcggcccactcgttagtgcggcgtccgcccatatccatgcaaggacgatccttggctgccgacgccatacgtgaggcggcggaggccactgcggaatcgtagttcagcacggatagaatcaacgtctccagtagcgtgcattcgccgaacgtgccttcgacctgcaaaatcggggagttcgggaagaacatctcaccttcgcggtaaccgcgaatcgtaccggagaagtggaagttctccagccacttgatggtctcggggcttaccacgtgacggtcggccaggaacttcaggtccgcttcgtccaagtggaaatgttccagcgcatccagaatgcggccggtgccggccaccacgccatagcgacggccttcgggcaggcgacgcgtgaacacctcgaacacgcatttgcggtcggcggtaccgtctttcagagcggcgtcgagcatcgtgtattcatacatgtcggtcatcagagccggcgaataatcgaccattgcaaggcctttcctacataagtggtgaagttgcacctaagtgtagtccgggcaaagccatacagcccactggcgaagcggtagactcgatgcatgagattcatcgtggcgttgtggcgctttgcgatcgccggtttctgcttcgtgggcacatatgaggcatggtccaaaccgcagttctgggtgtatttcacgttccagaccggtttcgtgctgggcatcgtgatgctgtgggccggcgcggccacactgctcaaaggtattcagccgcctgcatggcctaagggatgcctgactgtgtacgccatagtcaccgcactggtggcgttcttcctgatgcctccggacgacccggcatacgtgccacaggttattggcatcatgaccaatacgatgctgcacaaaatcgccccgattatggcggttatcgatttcgtgctattcgacccgcaccggcgtttccgctggcattacatgttctcgtggctggcgtacttccctgcatacttggtcttcgtgctggcccgtgcgacgatttggccggggtccggaccggcggccggcggcagtccgtatccgtacgacttcatcaacctcgacgcactcggctggcaagggttcggcattagctgcggcaagctggccatagcgttcttcgtgatatcgctcgttgtctggctgctcgaccgcgcactgccgagcaaggccttactcggatagacgcgcccacgatcgacgcacatcggtcttagtgcccagccggcatccagctcagcactcgatggcctcagcattcaatggaataggcgcggtttttgtactcgcgccaatccggccagtcttcaccggcgtagagggctgcatatggaactgcgtggccacctgacgaatggtgtaggacatcatgactccttactgcggcgacacgccgaagcgtcgcagccgtttgcattcaagttcacttgaactggaaccttagtatctaagaacacttacgaataccactcgatcggcgtcggtttgtccatcgcagaccagcattcgtaagaacaaaaatgacattgtaaggagactcaatgttcgagccaaccaccacctacgctcccaacccgcaccgttacgacacgatgacctacaaccgtgccggcacctccggcctcaagctgccggccgtctcactcggcttctggcacaacttcggcgacatcacgccattcgaccagatgaagtccctggtcttcaccgccttcgacaacggcatcacccacttcgatctggccaacaactatggccccgaacccggccaggccgagaagaactgcggcctgctgctcgccaagtacttcaggcaccaccgcgacgaactcgtcatctccaccaaggccggctacgaaatgtgggccggcccctatggcgacctcggcagccgcaagtacctgctcaccagcctcgaccagtcgctcgaacgcctgggcctggattatgtggacatcttctaccatcaccacccggacccggaaaccccgcttgaggagacgatgggcgcgctggctcaggccgtgaactccggcaaggccctgtacgtgggtctgtccaactacgatggtccgacgatggagaaggccgccgcgattctcgccgacctgcacgtgccgttcatcatcaaccagaacaaatacaacatcctcgaccgcaccgtcgaggagaacggtctgaaggagaccgccttcaagctgggcaagggcctcatcaccttctgcccgctggcacagggcctgctgaccaaccgctatctcaacggcattccggccgacagccgcatggctcacgatccgcgattcctcaacgattccgccctgaccgagaaactgcacaagcaggtcgtggacctgaacaatctggccgccgaacgcggccagacgctggccgagatgagcctggcatggctgctgcacgatggtaaggtgacctccgtgctgaccggagcctccaagcctcagcagattctcgacaacatcggcgc

SEQ ID NO: 1821 - DNA, 22238 bp, Unknown
  MAG_14  MAG No. k141_43707
ccagttggcgtatcgtgcctcgccggtggcagcgtgcagcgtggcggcggtgttcaacgattcggcggccgtccaatgcatgcggtcggtgaccaccggtgtgccgttccagtcggtcgtatagacgagcccctccgcgccgtccgcgttccacgcatcgtccaccgcccgcgcaaacaggtgctcggcggcgtcgatgtagggccgcgcgccgtctcggttggcgaaggagctcagcgcccactgcacgatgaggcgcgcccattcgatgccatggcccggcgtggcgccatacggtttgaactggtcgtccttcttgtcggcgttgcattcgaggtccaacgaccagtcggatttgaaatgctcggggatgcgccaccggttgtgtgccgcccattcgatgacgtggtcgatgatgcggccggcgcggacgcgataggtgttgttcccggtggcgtcggccacggccaggaatgcctcggtggtatgcatgttggcgttgagaccacggtacgggtcgagctcggtgaattcggtattccaggtatcgacggccaaaccgatttcgtcatcccagaaatgcttgtcatacgtggcaagcgcctcgtcaagcagttccttggcacccggacgtccggccagcagggcggaggacgcggcgagaatcacgaaggcatgcgcatagcagaccttgcccggcgcatgggtgccgtccgcgaacacctgcggataccagccgccgtgctcgtcgtcatgcagaatgccggtcaatcccttgagcgccgcatcggccagctccccggcgcccggatatccgagcatgtcgccaatcgaatacacatgggccatacggctggtgatccacgtttcgacgccgtgggatgggtcaagggtgccgtcggcgttcagccagccggaaccgccgttcggcgctgggaagcccttgccgaacttcagcagctcataggtttcggaagccatgaaaatgcggttggcttcggtgccgagcgtataccgtgggttattggtcataatgattgttcctttccttaacgagaacatgcggtgggtgcgcaatgagcattcagcgggcacgtcttagtgcttcacacgaatgtcgaaatagtccatgaccagttcacaaaacatcatattcgaccagctgaaccattcgcgcgtgtacttggtcggatcatccacgtcgatgccttcgtgcatgagatgtgtaccggcgtcggtggttacaagacggtcgaggatatgcgccttgaagtccttgctgtcgctggtcatcgcctcgatagacagggcgatgggccacacatagcgcggcggggtgtgcggtgagccgatgcccttgagatactcgccctcgtaatagtacgggttttcgtcgctgagcagcgtgcgtcgggtcgccagatacgtcggatcgtccggtgcgcagtaccccaagtaaggggccgccatcaaggagggcacattgctgtcgtccatgatattgacgtgacccaggccgtcggtctcgaatgcgtagatcgtctcgccattgcggttcgtcgttttggcgtgggcttcgatgccttcggtgatggtgcggcgcagctcgccggcacgggcggcgatatcggcgtcatccagaatctcaccgccgaagatgcgttccagatagcccatcaccacggcggcgaacatgttcgagggcaccagatagtggtaggtgcaggcgtcgtcgctggggcggaagccggaccaggtcatgccggtgtacgccactggcgaccccttgccgtcattgctcagcgattcggtggggatgtccgtgtcgcggatgaagaaatacggggagcgttcatgatgctgctcggtctcgaagacgtcaagaatcttcttgacgccggcaatgaattcggcatcgaagtgatcggcgttgccggtgttcgcatacagcatccaagccaactggatggggtagcacagcgaatccacctcgtacttgcgctcccaaagccaagggctggagaaatcggaccggtcgtccttgtcccaggaggcgccgttcggttcctcgttgaaggcattcgcatacgggtcgatgatgatgtagcggaactgttgccgtatcagaccggcgatcaggttcgcaatatcgctgtcttcggcggcaagggccagatacgggcgcaattgcgcggtcgaatcacgcagccacatggccgggatatcgccggtaagcaggaatgtggtgccgtcgtcatgccgtttgaccgtggtggtcagggtgtcggcaaagcaggcattgaagttctcggcccaggcggtgtgttcggtgccacacaggtccgtgatgtgctgcatgaaatccgagaccgacttcggtatcgcggtggtcgtcataaattcaacttctttgtttgagggacatacatatcaagggaacagcattattctaaaccgctttagttcatgacacgcgaaaggatgtgaagagcatgagtgtgagcgcaccatatgaaaaaccggtgagatttcctgttcggagaatctcaccggttgcgatcagtcgattcgtgaagtcgcacgaatggcggataaggggatgggtggattacttgccgatttcagccagatagtcgggcatctcggccgggtactgcggccaggcaccggcctgggtgcagacgtaggcggcggtgttgacggccttgcggtgggcttctgccagcgtgtcgcccagcaggatgcgggcggtgaaggtgccggagaaggagtcacccgcacccacggtgtcgttcacctcgacgtgcggagtgtccagcgtggagacctcgcccttgcgggagatgatggtggagtaggcggagccggcggtcagaatcacgtagtcaaggccgaattcctcgatgaaccagcgggaggcgtcttcgccggaggtgccgcggatgtcgaacatgtcgcgcagcagcaggagttcctcgtcgttgatcttgaagacggtggccgccttgaggagttcctcgatgaggtccttggagtagtggtcgccacgcaggttgatgtcgaagaacttcatcgcgcccggcttggtgtgcttgagcagctccgtgatggtggcgtgcgattcgggggagcgcagggccagggtgccgaagcagacggcgtcagccttggagaccacgtcgatgagctggcgggtgtacaggatgtggtcccaagccacgcccttgacgatggtgtactccgggatgccgttcttcagcgcgacctcgacggtggaggtcggccaggcgttgcgctggatgacggtgttgatgccggcctcgttggccttggcaatcagttcgtcgccgagctcatcctcgccgaccgcgctgatagcccagccttcggtgccgttcttcatcgcgtggtaggcgaagttgacgggggcgccgccggctcgcttgccgctcggcagcatatcccacagcagttcaccgaggctcagaacgatcggggtagtcatggttggtttcctttcctttgtttcttttaccgggtgtttcgtatggaacatcttgtgatgtcggcgcttggtttaggagacgtcgaagaacaccgaggggtgttcgaggaattgggtcaccgccactgctgcggcaccggagaccgccgcgtcggcggacagggtggataggctgatggaagtggaggcattgatttcggggatggcccgttcggccaccgtggcgcgcacctcatcgagcagtatcgggccggcttcggacacgatgtcgccgatgatgatgtgctcaggattgtatccattgaagatggtgacgcatccgtagccgacgtatcgggcgacttcgcggacaatggcgattgacgcttcgtcgccgtcgccggctttggcgaacagggcgcgggcggcttcggtgtgggtcatatcggccgcgccgggaaccacggtgccatcggcgatgagcatgtcgtgaatggcgggggtggagcagtagcgttcaaggcagccgacgttgccgcaatcgcaggggcggccgttgacgtcgatggagatgtgtccgatttcggtggcggcaccgaggaagccgttgatgagacgaccgttgtcgatgacgccgaggcccacgccttcgccgaccagataataggcgaggttgccgtcggcgtgcaccgacgggtcgaagagataatgtgcgagggctccggcgcgggcgtcctgttcgatgaacacaggcacgcggaaagcggtggcgaattcgtcgatgaagttgattttgcgccagccctgcatgctggacaccacggcggtgcggcctacgttacgcaggtaggggccgggcaccgccatgccgatggccacaatggacgggtcgttgtcaagcagttgttcgacgcgctggtggatggtgacgatggtgtcgttgatggtgttgtcgtacaccgtgggcaggttttcaaagctcagggtgttgccacataggtcgaacacgccgatctgcaccagcgagcgggcgaatttgatgccgatgatgcggaaccgcgtggtgtcgagtttgagaccgatggaacggcggttcttggaaccttccaaatcgccggtctcttcaatcatgccggcctcgataaggcgtgcggtgattttggtgatggccgcgggggtgagttccagtgccttggcgatttgcgcgcgggagctgatgccgttgtgatacaggtgcttgacgatgcgggagcggttggattcggagacactggcttgggaagtggcatgggtggtgtttgttgccatcggtcttaagtcctccttgtctgcaccgttgcgagttgttccgctcgtctttgaatctgaacttgattaagatattaacgctgttaattgattgacgcaatcaatatgtcattcggtgtgtcgtgcatgtgagtgtcgtcttgggggaatttgttaagatggttgtcaatagtcggatgcacactgatatcaagcgaaacgttcgatgaagaacaggggaggactgatgtctgaaaacactatgaacaatctcaaaatcggtgttgacgtgggcggaacaaaaatcgaagctgtgctggttgacgcaatgggcacggtattgggttccgcccgtattcccgccaggcatggcaacgatgccgtgatcgaagacatcgtcgctgtagcacatcaggcagcgggtgagcgttttgacgaggtgagggccatcggtgtcggtaccccgggcacggtggattcggccagcgggcatgtgggcaatatcgtgaatctcgacgtggtctcgctggatatggggccgttggtctcgcagcgttcgggcgtgccggcccatgtggaaaacgacgtcaatgccgccgccgtcggcgcggccaccgtattgggcggtgcggacggcatggccggtaccattgcgttcctgaacttcggcaccggactggctgcgggcatcgtcgaaaacggcgtgctgatgcatggctatagcggcgcggccggcgaaatcggccatatcccagtcgaacctcatcgcctcaagtgcccttgcgggcaatacggatgcttggaaacagtctgctcgggcgcatccgtggggcgtctgtggcccaacgccgacccgccgatgcccgacctgattcgtcgcgcgaaaaagcgggaggccaaggccgtcgatgtgctggacatggtagtgcgcgccatcggcgacaccatacaaatcctggctcagtccgttgatccgcgactcatcatcttgggcggtggcatggccaaaaccggcgaaccattggtcgaggtgatcacggctgagctgcgccggcgcgaatcgcaatgccgattcctcgaaacgctggacctgccggcccggctgcgtctggcacctgtcggccaaccagtcggagccatcggtgccgccatggcggcgtagcctggcatagtgccggggcatgggagatgaggcctcagatttgtctccgaggccccatctcccatgcagtcctatatcgctttatgtcgtgctgtgccgcgcttggtcttgcgcgtttcgttgccggggtgaccggcttttatttggccaagtgttggaagaccacggcgatggcctcgccctgtacggtgatgtcaggtccgcattcgcagcgccggattaccgtgtgtttgtggaaggacgaggacgtggcggcatccagatattgctgggccgcgccgatgaacgtcgcgttgatgatgttcggctggccatagacgcatacgtctgccatatccaaaaggcccacaggcatggccagggcttggccaagatagcggcccgcccgagcaaggataccctgatgctgctccatgtctgccgcgctgagttgcttcttcaatgcggttccggaaatcatcgtctccaagcaaccgtgcttgccgcaagggcacagcggcccgtcaagatcgatggaaatatggccgagctcgccagccgcgtgcagttcgccgattaccggcgtgtccgagagcagaatcgccgaaccgatgcctctttcgatgcgcacgaaaagcatattcggcccgccttggccaaagaaacgttcggtgagcatggctgcggtggcgtcgttgctgacgtttacttcaagtccgaaatgttcggcgattggcgtggacaggtcgagattgttccagccgcgcatcgtggaggagcggaccacgccgttgtctaccacgccgggggaggcgactccgatgccgatgacctcgccatcggacatgcccagcatcttctcaatgagctcgatgatcacatccacggaaacgaatgagccggtgttcagggtgacttcggcgtgacgcagcggctggccgagcagattggtgactgcgccgtgcagcaggtgctcctgcgtcaggtcgatgctgatgatgcgcagtcgatcgatatcgatgctcagcagtgtgcctcgtttgcctttgccgccgctgggtgcctgaccggtctcgcgcagcaatccttcctccagcatccgaccgaccacatcggaaacggccacgcggctcaatccggtgcgtcggccgagctcggcgcgcgaatactggttggtggggaacaacaacctgaagataagttggcggttcttgcggcgcacatcggcgggggaagccttggccgcatggtcgtcggtcgttgtgttgagaccgagatatgacatgtttcctcctacctgatggtgagcgagtggacggcgattgttgttccatacacagcttagacggtgaagcgcaatttcgtcgttgaaactgttatgaaacttcactaataaattccagtgtacctgtgtgaagcgtcaggaaacaccgtgagtgttcatgaggtccaaaattgttactatcattaacaaatagcgaatcaccaatcggcgctacgccgaacggtggttggaacgccgcgcggcacccggacgtgacaaggatgttgccattatccgcaagacgggcggcggtacagcgactcgcatcgggcgggccgcacggaactggaggaaaccgatgccggaaatcatcattgtcaagaacgaagccgaggccggcgagatctacggccgttgcgtggcggacctgatcaaagcaaagccggacgccgtgctgggcctggccactggctccagcccgctggccgcctatcaggcgctcgccaagatcgtcaaggacgaggccattgacgtttcgggcgtgcgtggtttcgcgcttgacgaatacatcgggctgccgctgacccatcccgagtcctatcatgcgaccatccatcgcaccgtggtcgagccgcttggcctggacccggccaaggtccatgtgcccggcgacgtactcaacggcactccgctcgaagacggcgacaaagtcgcgctggccggcccggcctaggatcgtgccatcgaagccgctggcggcatcgacgtgcagatccttggcatcggcaccgacggccacgtcggcttcaacgagcccggttcctcgttggcctccggcactcgcgtcaagaccttggccgaacagacccgcatcgacaacgcgcgcttcttcgacaacgacatcaaccaagtgcccacccactgcatcacgcagggtattggcacgatcatgaaggcccgtcacctcgtgctgctggcgttcggtgccggcaaggccgaagccatcgaggagacggtggaaggcggcgtgtccgcgttctgcccggcttccgcgctgcagatgcacccgcacgccacgattatcgtggacgaggaggccgcctctcgtctgcgccacaaggactactatcgctacgcctacacccacaagccggcctggcagggcatctgagttatcgtgtgctggcttccctctttgtgtgaggggagctgtcgaatgtaatgagactgagggtggttatcggcggcggcatatgtgtattgcttcccgattggaccaccctcagtctcgtttcgcgagccagctcccgttggcgggagcgcatgagcggtaaggagaacaacatgtctgataggaacgagatagtctcgcgcgtgaccgcggcactggagggcaagccggctccggtggcgattcgcaacgcgcgcaaggtggatgcgtgcggcgaacggcgcggatattgggtcgtctccgatgccgccggcgtcatcgtggcggccggcacgggggaggaggccttcgagcactactgccgcacggtggggctcgacccggccgatcgcaacgcggtcatcgacgccgaaggccgtattctgacccccggctacgtggacatccacgcgcacggcgcatgggagaagagcttcgacgacgggtcggatggcatcgatgtggcgcgggccggccacgccgtgcacggcaccacgcgccaggtgctctcgctgatcaccaatcccgtggacgtgatctgccggaacatccgcaccgtccgcgccaagatggagtccggccgccccgacatcctaggctgtcatctggaaggtccgttcctggctctggcccgcaagggcgcacatgacccggaatgtctcaaggatccggtacccgacatcgtcgacgacatgcttgaggcttcaggcgcggcgaacggcaaacttggctgcatccgccagatcaccatcgcccccgaactaccccacggcatctccgccatccgccagttcgccgctgccggcgtggtgccggccgtgggccactgcgacgccgactacgagaccgccaaagccggcttcgacgcgggcgcgggcatcatgacccacatgttcaacgcgatgaacggcctgcaccaccgcgagcccggtccgattccggccgcggtggaggatccgcgcgtcaccatcgagctcatcaacgacggatttcacgtgcaggatccgatggtgagcctctccttccggttcgcgcctcatcgtacggccttcgtaaccgatgcaatggccgcgaccgactgcccggacggtgcctacaagttgggtgcactggacgtgaacgtggtcgacgggcatgcgcgtttggtttccaacggcgccatcgccggctccactctgctgctggaggtcgccgtgcgccgtgcggtgtgcgaactgggcttgagcccggtggacgcggtcgaggccgccacattgacgccggccaaggcgttcggcttcgaccggccgaacccggtcaccggggtgcctatcggcctcatcgcccccggcttcgccgccgatttcaaccttgccgatccgaccgattggacggtcgaacaggtgtggtgcgcgggccgcaagctcaagtagcagtaggccgaccggttgacgaatggaaagcattcgtctacaagcatgttcaaatggtgacatgatagcatgttcatctcaccatttgaacgttattcacgtcgtaatacaagaatccgtaatactgctcgataccgcataaaaccggccatggtcgccacaagcgaaacataagtcgatggctgtggaaacgcaggagtaacacatcctcaccatagtcaggcggtaatccacgcccgcagtgatggcgtggaaacaagttatgagagaggattcctgttgaattccaagaagattctggccgccgccgtctccgtggccgccatcgcatccctgaccgcctgcggcggtgtgaaggatgacaccaccgcaggcgccgattccggcaacgccatcaccatcggcaccaccgataagatcaccagcctggaccccgccggctcctacgacaacggctcctacgccgtgcagatccaggtgttcccgttcctgtatgcccaggactacaacacctccgagctgagcccggacatcgccgccgatgacggtacctggaacgatgacggcaccgaattcaccgtcaagctcaaggacggcctgaagtttgccaacggcaacgacctgaccgcttccgacgtcaagttctcctacgaccgcatcaagaagatcaacgacccgaacggcccgagctccctgctcgccaacgtcgaatccgtgaccgctaaggacgacaccaccgtggtgttcaaggattccgtgcctttcgacgtgactttgaagcaggtcatgtccagccccgccggcccgatcgtcgatgaggataccttcgacgccgacaagctcaccgacgccgacaccatcgtctccaagaaggccttcgccggcccgtacacgctgaccgccttcaagatcaacgagtccgccgcctacgctaagaacgactcctacaagggcctgaccccggccaagaactccgccgtgcaggtcaagtacttcgccgacgcctccaacctgaagatggccgtccagcagggccaggtcgacgtggcctaccgctccctgagcccgaccgacatcgaggacctctccaaggactccaaggtcaaggtcgtcaagggcccgggcggtgaggagcgcttcatcgccttcaacttcaagattcagccctacggtgaatcccagcccgacgccgacgctaacaaggccaaggccgtgcgccaggccgtcgccaacctcatcgaccgcgaagagctctccaccaaggtctacaagggcacctacaccccgatgtactccttcatcccggacggcctggccggtcacgatgacacgctgaagtccgcctacggcgacggcaacggcaagccgagcaccgagaaggccaagaaggtcctcgccgatgccggcgtcaccaccccggtcgacctcaagctccagtacaacagcgaccactatggctccgcctccgccgacgagtacgcggccttgaagtcccagcttgaggaaggcggcctgttcaaggtcgacctgcagtccaccgaatggacccagtactccaaggaccgcgtggtcaccgacgattccgacggtgtgtacccggtctaccagctcggctggttcccggactactccgacccggacaactacctgtccccgttcttccgcgacggcaacttcgtgaacaacggctactccaacaaggaagtcaacgacctgatcgtcaagcaggccggcgagaaggatgcctccgcccgtgaggacatcctcaagcaggtccagaaactcgagaccgaagacctctccaccatcccgctgctgcagggtgcccaggtcgccgtcaccggcacctccgtgaagggtgtcaccctcgacgcttccttccgcttccgctacgcctccgtcaccaagggctgatccagcatgagctcccctctttgaggggggagctgtctggcgacggcagactgaggggagcccaactcgtatgactcccctcagtcggcttcgccgccagctcccctcggagaggggagcctttattgctttatataccgattaccaacaccaaggagcatcgcgtgtcagacagcgccacagcgacctccagcaccactccggcgaaagccaagacgaagaagaaccgactgtcaggtagtttcttccgcttcgtgctgacgaggttcctcctcattatccccaccgttttcattctggtcaccatcgtgttcttcgtgatgcgcgccaccggcgacccgatttccgccgccctgggcggccgcctgacacccgccgaactccagcagcgcatccacgcggccggctatgaccgcccgctgatcgtgcaatacgtcgactatcttggcggcctgctgcacggcgacctcggcacgacgctgaccgataaccagccggtgatcagcatccttacgcactacggcgccgccacattcgaactggccttcctcgccctgatcgtggcgctgatcgtcggcatcggcctgggccgactcgccgcccgcaaacgcgaccgtgccgccgacgccggcatccgcatcttcgccatcctgtgctacgccaccccggtgttcttcctcggcctcgtgctgaagctcatcttcgccgtctggctcaacatcctgccagcctccggccgctccgacctgaactccgaaatgcagttcacccgtctggtatcgccgaccggcttctacatcatcgacgccatccagctcggcgacatgaacgtgctcgtcgacgtgctgcgccacgccgtgctgccggccgtcgccctaggcctgctgaccgccggcgtgttcatccgtctggtgcgcaccaacgtcatctccacctacaattccggctacgtcgaggccgcccgctcgcgcggcgtctccgaaaagcgcctgctcaacaagcacgcctggcggccggccctgatcccgatcatcaccgtcatgggcatgcagatcgccctgatgctcgccggtgcggtcctgaccgaaaccaccttcgaatggaagggcctgggcttcatgctgtcccagtacctgaaggcccgtgacttcgtggccgtgcagggcatcgtgatccttatcgccatcatcgtggccgtcgtcaacttcctcgtcgacgtcatcgccgcgcttatcgacccgagagtgaggtactgagatgaccaccgcatcctccgacaagatcaccgtccccggtgacgaccgcctcaccaagctcaacgtcagcaccaagacgccgttctggaccaagattccaatcatcaaggaactgcgcgtggcggtcggctggcagaagggcatgctgatcaccggtctcgcgatcaccgcgttcttcctgctcgtggccctcttcgccccgctgatcgccccctacggccacgcccagatcaaggccgccgacggcacgtccttcccggcgcaggccgcgccctccgccgaacacatctggggcaccaccgccgccggattcgatgtgttctcccgtgtggtgtggggtgcccgcaccgccgtcatcgccatcgtcgtggccgtgctgctctccatcttcgccggcgtgctgcttggtctggtgtccggctactacggtggctgggtggaccgcatcctggtgatgatcgccgacgccgtctactccttcccctcgctgctgctcgccattctgatggccatcatgatctcccacggccagtccggcctgtggagcggcatcctggcctccggcatctccatcaccgtggtgtacatcccgcagtatttccgcacaattcgcgccgaagtgatccgcatcaaggaatccgcgtatgtcgagtccgcgcgcgtggtcggcgcctccacctggcgcatcatgaccaagcacctgttcaagaactccacccgcacgctgccggtgatcctgacgctgaactcgtccgaagccatcctgaccctcgccggcctgggcttcctcggcttcggcatcgagccgaccgccgccgccgaatggggctacgacctgaaccgttcggtttccgacgtgaccgccggcatctggtggaccgccgtgttcccgggcatcgccatcgtgcttatcgtgctcggcatcacgctcgtgggcgaatcgctcaacgatctggccgacccgcgtctgcgcgcccgcaagtccgccggcgaagtggtcggatcgatcgaagacacgtccgtcgacccaaacgagaagccgtccgcacgcaacgaggtgatcgccgaactcgacgcgaacgtcgacccgccggccaccgtcaccgaccatgacccgaccatcgtcgcctccgaatggaccggcgaaggcaagccggaaggcaaggagtgagagatgagcgaagacaacaagaatctcgccgatatcaaggacctgtccgtctccttcatgaccgacgccggttccatcaaggccgtcgaggacgtgaacttcaccattccgcgcaagaccgtggtcggcgtggtcggcgaatccggttccggcaagtccgtgaccgcgcgctccatcatcaagctgctgccggagacggccaccacctccggtgccgtctacctgtccaagcgtgatggctccgattcgctggacgtgctctccctgagcggcgaacagctgcgcgaagtgcgtggttccgaggccgcgatggtgttccaggagcccaattcggtgctgaacccggtgtacaccatcggctggcagattgaagagggcctgcgcgcccacggcatgaaggacaagaaggaactgcgcgccaaggccatcgacatcctgaagaaggtcggcatcccggatgccgaaacccgcgtggactactacccgcaccagttctccggtggccagaagcagcgcatcgtcatcgccatggcgttggtgctgaaccccggcctgattctggccgacgagcccaccaccgccctcgacgtgaccgtgcaggccgaaattctcgacctgctgcgcctcgcccgtgacgagttcgacgcctccgtgctcatcatcacccacaacatgggcgtgatcgcggacatcgccgaccaggtggtcgtcatgtaccgcggccacgtggtcgagcagggcgacgtggagcagatcttctaccatccgaaggacgactacaccaagcgactgctgggtgccgtgccgcgcatcggtcagaagctggtcgtgcgcgaccgcgagggcaagccgatcgagcgcaaggccgattggcgcgaacagccgatcgccgttgaggccaagaacctgaccatcacgtacccgggccatctcatgcagcccgacttcaaggccgtggacggcgcgaacttcaccatccaccgctccgaagtgctgggcctggtgggcgagtccggttccggcaagtccaccaccggccgtgccatcgccggcctgcagaaggtgtccggcggctccctgaacgtgcttggcatcgagatgaacggcgtcaaggagcgtgacttcaagcccaagcgcgcggacattggtttcgtgttccaggatccgggctcctcgttcaacccgctgatgaccatcgcggagaatgtggccgagccgctgctcgtgcaccacaagtacggttccgtggccgaggccaagaactatgtgggcgacctgctggagatggtccagctgccgcgcgcctacatgaaccgtttcccgcatgagctgtccggcggccagcgccagagggcgtctttggcgcgtggtttggcgttgaagccgtcgctgctgatcgccgatgagccgacttctgcattggacgtgtcggtgcaggccaaggtgttggagctgttcaagcgactgcaggcggaaatcggcttcgcgtgcctgttcatcacccatgatttggcggtggtcgatatgctcgccgaccgcatcatggtgatgcataagggccagatcgtggagcacggcgatgccgaccagattatgcagcacccggagaacccgtacaccaagaagctgctggcctccctgcccgtgcccgacccgcgcgaacagcagcagcaccgcgcccacctccacgagctcctagcccaagaggcgtaatcgcatagcattggagctccctcgtcagagggagctaactttatatccgctagtactgctgcccatcgaactggaacagggcgtgggcgtcgccgtgctttttgttctcgatgtaagtatggaacagctccagccgctcgctcgtgctggccgccaggggagtgggcaggtcatccagatcgaaccagccgacgctgaggctttcctcgtcgcccacgaacggctcggcattgccgccgggcttcagggcgcacaggaacgaatgatccatgtacatggtgttgtcgccattggcgtaggtcagcaccttgtttgacgaggtgacggccaccaaatcggtgacgatggcatcgatgcccgtctcctccttgatttcgcgcaccaccgtgtccgccggctgttcgcccggctcgttgatgccgtagaccatcgcccattcgcccgtgtccgaacgacggcccaacagcagttgaccatgttcgttcagtacacaaccggtcacgccattgagccatagcagatcatggccgatcttcttacgcaattccaacacaaattccggagtaggcacattgcctccttagtagaaaaaaggagctccctctgatgagggagcttaagggttacttggcttgggcagcctgcttaatatggtgcgcttcgcgcatgatttcattttcctcgcgcttgtcagcgttcggcgtcgcctacaatcagtccaccggactgattgctttacggctccgcatccacgcttcgacgtcgtcgatctgcttcgggatgccggcggaaatccattcggggccgttctcggtcatgagcacgtcgtcctcgatacggatgccgatgccgcggtattccggcggaatcagcagatcatcctcgcggaagtacagaccgggctcgatggtgaagatcatgccgggcgtgatcttcgcgccctgataggactcatagcgggcctgcgcgcaatcatgcacatcaagacctaggtggtgggccacgccgcaggcgagccaacggcggtgctgctggccttgcggggacagtgactcctcgacgctcaccggcagcagaccccaatcgtgcagacgctcggcgatcacacgcatgcaggcgtggtggatgtcggaataggtggcacccggcttggcggcttcgaaaccggcctgctgcgagtccagcacggcctggtacagacgcttctggaagtcggtgaacttgccgttggtcgggaaggtgcgggtgatgtcggccgtgtacagggaatcgacctcaacgccggcatccaccagcagcatgtcgccggtcttcaccacaccggtattgcgcatccagtgcagaatcggggcgtgggggccggaggccacgatggagtcgtaaccgatggcgttgcccagctcacgggacacggcgttgaacgcgccttcgaggatacgctcggaacgcggcttgtcgagcgcggccggcagtgcggagagcagacggtcgaagccgtgcttggtggcgtccacggccttgcgcatctcgttgatttcgtagccgtctttgaccatgcgtgcctcggcggcgaactcgtgcagcttgtcgtcggatgcggagttcttgtccggatcggcgaaaccgttggcctcgcggatggactcgaccatcgaggtgatttcgggatcggtctcgctgaccacgcgcacacgcacggcgccggcctcggcacccacgtccttggacagggcgtcggccagctgggcgatgtcgtgggtctcgatgccggtcatcgcctgcatctcctggaggccagcacgcgggccaacccagtattcgccgtagtgggcggacatgaagaagtcctcggtggagttgtcggcgcgaggtgccacgaacagttccggagtgtgcgtcttgccggcggcgacttcgggggagtcggggtcgaccgggttcaggaccagcacggcgccggcctcgtaatcggaacccagaccggtgtagtaggcgaacgtggtgtccgggcggaacatgtaatcgcaatcattgttgcgcaccttcggctggccggccggaatgaccagacgctcgcccgggaaggctttgcccagcgcctcaaggcgggctggcgtgaacttggaggattcgagaggcttgatctccggatcatcgtcggcccagccggacttcataaactccttgaatgcagccgactgcgggcgcagcgagcggttgttcacacggtcgctcatcgactggttcgcgcccggcgccgtagcgcgctcctcggcctcatattccttgtccttggcggtgatcacttcacccattgccactctcctgtatgtagttgttgtcgaatcatcgattcccacctcatactagtcggctttatgcgatgtgccacgattgacggctgacggtaaaaccaagtacggaatttggacggtcttccggacatgcccatatggcgagtgcatcgggctggaatgcgggcccgtttattgttctcggtagggaaggaggggcatgggctggagcttgccgattgatattggcatattttgcgggctgaatccatgtgaacccatgcgatgaaggttcatcgcatcacgggacccgctgctctgcggatgcctccatctggggcactctggctttgagcagttttacccgcagcggagtgcgttcgatgacgtcggcgtatgtgaaatggacgatttcggtggcaccggctcgtttcagtccctcgtcgcgtgctcgttccttggccaccacctcctgaatgctgcggttatcggtcatggctgggtccacgtatttttgtgtgccgtcgtattcggccactatcacgcgcccgtcatcgagcttccatacgaaatcaacgcggtgctcggtattcgtctgcgggtcggtcaccgttacctgaatacgcggcgtgaggaagcgatcctcgatgatggtgcctcgcgcgagggattctccaccattctcgctcctttcgtttgcatagcgcagcaggcggaatactcgggcataatcgattctccattgaacgcagtcggcggctatctcttccttggttattcccttggcaagggccgagtcaaagatcggcaacgcaaaccgaaaatcaaggtctatagcggcctcgaccaaggttctagccggtgatatcagggataggccggaggcctcgtaatgtgtcttcggattgttcatatcgggcatatagacatgtcgtaagcgctgatggcattgacgagatccatgatcggaagtcacgatggttatgcagccatcatgcaaatgccattgatgttcgaatccataagcacttactgccaccaagccgccaaaaacccactgaggatgctcttgcgcaagagcgcgggccatatgcaacgttcgctccggcggcgtcaaaccatcccagtatgcggtatttgcataaagactgggaatgccgtcatacactttcaacaactcgccactctgggcacggcggcgtagagcggtctgttccgcttcatttcttgaatagacgcatctcagctcattctgcgcggctgatatgagcgaggccactgctttgtgtgtcttcatgacgtcgagcgtagccggaacgaagcagcgtaagtatgaatttcagccattgtggttctagcctcggagcttggctgtcttggagtgagatattcccgataatttcaaggtattaggccgctaattcggaatagtggataacatacaaaacttatccaccatcagtaatgtcattcgaacaacgtgctttggggattcgaacaagatatcatcggcgaagacggatgtagctggtagagggcggcgaattgacggttaacggtgcttatgctttgtacgccgtcggtgctggttcagatattggctggcttctgtctgagtgtggaatctagcgtcggcgtgagtccaatggttgtatcgtggccgacgatttgctgcgatttattggcggcatagatccagggcttggacggctgccgacggtgagagcagtcataacagtgaatgagcctctgcgagttcaaaagatgatgtagcggacgtttgtgagagtcgtttccggggcaagacatggtcgattgacaatgttgaaatttctcagcgacggcagaatggcatgccttggcgaggagacgacactgagaggcgatggagtcgggattaatccaggttttggccagctaccgactcgcaagagcatcatagcgtcggtgtaccgccagaagctggcactgtaccgacgctgaatagcatcagcgtcgccggacatacaagttttggattgcagccgactaagaatgggatgccgacggcaagagccgcattgcaactatatgagatggcttcactgtgcgcgctgcaggaaaaggccgcccgcgcggcggcgacatatgagacggtttcactgtgcgcgcacgataaaccaccccggcggctaggatagagggaattgagggagtgcggctccacgcgtgaaggcaagaatcccgaaccatgcagggcaaacctgtgcgaggggagcttcctgcgcatgcggaagcggaatatatgcgggcatgcgtagacatgacgagaatggcacgaacacgtaagtggcatacgcactccgaacggttcaacagcaacacgagcagaggtcagaagaggatatgtcattcgagcatccgaatcggaacaacgagagcatgcgggacgtcgaactggacatcatgagccgcccgccggagcataacaccaccaatctggatctcgaccggatgaccctgatgctcgacatcctgggccacccggagcagtcgttccgcgtgattcatatcaccggtaccaacggcaaaggctccaccgcacgcatggccgaggccatctgccgcgcctacggcatgcgcaccggcctgtacacgtcgccgcatctggagaagatcaacgagcgtatcgccatcgacggccagcagctgtccgacgacgatttcatcgacatctgggaccagaccaaggatctcgtggccctggtggacgccaagatggaggagcaaggcaagccgaagatgagcttcttcgaggtgctcaccgccatggccatctggaagttcgccgacacgcccgtggacgtggccatcgtcgaggtcggcatgggaggcctgtgggacgccaccaacgtgctcaacgcggatgcggccatcatcggcccggtggacatggaccacatgcagtggctgggcgacaccgtcgaacagatcgccaccgagaaggccggcatcatcaagccgaactgcaccgccatcatcggcccgcagccgcatgaggaagccgtcatgccgattctcaccgaagccgccgaacgcaaccacgccatgctcgtgcgcgacggctacgaaatgaccgtgtccgaccgtatggccgcagtcggcggccaggtcgccaccctgaccacgcccaacggcacttacgagggcgtgccgattgccaagttcggcgagcatcaggcccataacgcacttgccgcgctcgtcgccgccgaagtggtgattccggtcaatggcccgctggacggcgacttggtgggcgaggcgttgagctcggtcaagattcccggacgcatcgaacagatccgcacctcaccgaccatcattctggatggcggacacaacgtgaatgccgccgaagccctacgcaaggccatagaggaaagctacgacttcaagcagctggtcggcgtggtcgccatgatgcgcgacaagcaggtcgaggaatatctgggtgttctggagccgatcctgagctccgtggtggtcaccgagaactcgtggcgcgagcgtgtgatgccggccgatgagctcgagaagattgccgtggacgtgttcggccgtgaccgtgtgatcaaggaagcgaacctgcccgacgcgattcaggctgccgtcaacatggtcgatgccgaggacgagctgggcgtgggctacggccacggcgtgcttatctgcggcagcttcgtcaccgccggcgacgcacgcctgatgcttgaggagcatgccagccccacgatgaggcaggccatggccgtccatcagccggcggtcgacccggacgattcggatcggccggcagacaaggccgaggatgaggccgccgacaacctcgaggattcggtgagcccggacgacttcgacgtgttcgacgtcctcggcctcggcaaggaacaggccagtgacgccggtaacgccggcaccggcacggccagcgccgacacaggcgccgtcaccgacgattccgccgacgcccggtaacccgaatccaaggcatatcggatacccggacacacggaaaacagtctcacgccatgtatctcaaggaactcaccc

SEQ ID NO: 1822 - DNA, 2926 bp, Unknown
  MAG_14  MAG No. k141_43787
atggcatgttcgcgcccggtcagatcggtgaccttgggctcgatctggttgcgctgcgcgcgcagggccttgagttcctcgtcatggctggaggcggcggcctgcagctcgtctcgtttggcggccacgtcatgcagcgtatgttccaccatggcggccactgctcgcgcgtcatcggccacgccttgcaggtgtgcggcctgctcgcgtctgcgatcgttcaacgcctcgatgcgggcgcggcgttcggcggcttctctggcgttgtcccgcagcagcccggcctgtcggctcagtgactcccctttgcggcttgcttcggtccacgcgattttcgcggcgacctcatgctcgcgagtcaggttcagtccgcgctccagcgtgcgttcacgttcatcaagttcgtcgaaatcggcatgttccgctgtggattgccgggccgatgccaaagcgcgattgagatcgtcgagcttgagctgatgctcgttgcgattctcttgggtctcggtgattttcctatccagctgctcaagctgacgggtgaacgatgcgatgcgatccgtggcggatttcagagatttctccgcctgttgggctttgagccgggcttcggtgcgtttggcggattcctggtcgacgagtcgggccgcttcatcgcgtttggctttggcctcggccacttgctcagccattccgccgtcttgggcggccaactgtttgacctgtgccaatgctttgtctcgacgggcggccagagacaggtccgattgagagatggaagagccgccgaccgccgccacgccgtgtgtgaaggtctcgccgttcttggtgacggcccgcatggcttcgccggatgccacgatgtgctgtgcttcgtcggcggtgccggccatggctacatcagccagcaggagacgcacggtgtgcacgacagcttcggcctgtgccgggttctttgcatccgggttcgcggtgacgagtgctgccagcgcgttgcccgatcgcggggcggccgccgtgttctcggcgctactctcctccgactccgtgcctggctctgtggcgggatcgccggcaatgctcgcggtcagcaccacggctttgccgagcttatcttcccgagcgcgttcgagggcgtgcaacatgttgcctgcctcgggtaccacgatggcgctggcatactggtcgagcgcgtgggccacggcttcttcccagccttcggccacatggatgaagtcggtgagtcggccaagcgaggccacgtccgtgtcgcgttccaacgatccggaggcattgcggctgcctagcgtgtcggcaagcgcatcggccttggatttgagcgagatgatcttggactgtatctcgcgctgcttatcggcgagttcgttcagtcgttcgcggcattcggcgagcgtcgcacgcgcggcgtccaatgcggcaccgtcatcgtcggcaatggagtccgcttcgctgcgcaatgcgtccagctgttgctgggcatcgtcgcgctgggaagtcagcaagtcgcgttgggaggcataatccttggcgcggctggtcgccagttgcacggcggattcctcgcgggcgatgagttcgcgcagtcgggcgatctgcgcatcgcgctcctgtgcggttttgcgcagttccgtcaaggtctggcggactgaggcgagcttcttctcgtcgtcggcgcgttcctcggtggccttgtcgagtgcgatgcgtgcatcggccacggccttggtttgtgccgcggcctgagactccagttcctcggctcgtttgacgagcatgccgggatcctcaccgaagttggtgacgatctggccggtgagtgaccggctgcgctcttcggccaactgggcgagcgcgttcagtcgttcacgggtctgtgagaattcatgccagtattggttggccttggcgatggtcggactggattcagagctcaacgcctcgacctgttcgatgcgtactttgacgtgggcgagttcacgttgggcgacggccagctggttgcgcacatcgccaagctcttgacgtaccgtgtcgcggcggttcatcgagcgttgggcgtcttcggcatacaggcgtgcttgggcgtcgcgtacggatatctgaatcgcgtcggcgcgccgggagatgcgtgcctggcgtccgagggggccgagctggcggtgaatctcccccagcaaatcgtcaagtcgactcaggttcgtttcggtattggccaacttgcgcaacgcgcgttccttgcgcttgcggtgcttcaggatgccggcggcctcttcgatgaacgcacggtgaccggacgggtcggccttcagaatcgcatccaatcgtccctgacccacaatcacgtgcatctgctggccaagaccggtatcggagaggagttcctgaatgtcgagcagacggcattgcgagccgttgatcgcgtattcggagcctccgttgcggaagatggtgcgggatatggtgacttccgtgtaatcgatatcgagcgtgtgatcggaattatcgatggtcaggctcacctgtgcacggcccaatggcgggcgggaggacgtgcccgcgaaaatcacgtcctccatcgaagtgccgcgcaggtttttggcgccctgctcacccatcacccaggtcagggcgtcgacgatgttcgacttgcccgaaccgttggggccgacgaccgccgtgatgccgggctcgaagcgcagcgtggtggcggaggcgaaggatttgaatcctcgtagggtgagttccttgagatacatggcggggccgtttcctaagtgcgaggtccgtaccggtcagagcgcgtcggcgcgcccgtcatccgtgccgtctgatgaggcggaatcgtcggcctcgttatcggcgccggtttcggcaccggcggcattgtcctcgttaccggttgcgc

SEQ ID NO: 1823 - DNA, 8780 bp, Unknown
  MAG_14  MAG No. k141_44089
cggtgacccccgctccggcgcccgctccggcgccggagccggagccggagcgggcgccggagcgggggtcaccggagtagacggcgtaccgccctggttaccggtatccacccggttggcggcgtcctgctgttccttctggtactgacgattgtaggaatcgacctgggaagcgatcagtacggtctgggccgcctgcttggcggattgggaatccagactgtcgatcatggaagacagttcgtcacgccttgtttcgccctcctggcgtagcttgtccaaagcgtcacgttcgctttgcgcggtttcggcggcggtctgtgcggaagcggccttctcatcggactgggtcttgagcacagcgatctgcttttcgatggccgccagacgttcgccacggttcttcgacgtgctcagtgaggtcgcggcggaggaagccgcattcgcctcgttgcgggacaacgcgtcccgggactgcatggagttgacgaagtcctgtgtgctggtggcacccgtcaccacgctcatcacgtcggaagcattcgagccgtgcatctcgtcacgggccagctgggccacggcggcgtgcgcgtcatcgtagtccttgccggtctgcttgatccgctcctcgagcgtctccttgtctttctgcgcggcggaaagacgtttggatgcggcgtcggcctcgtcctgagcggtggcggcatcctcgttggcctgcgtgaccttggcctgcgcggcgacaatcttgttgttggtcagatcgtccagctcaagtaccttattcgccaggtcctggctggcaccggccagctgctgcttgagttcggcctcgcgctgtaccgacgcggcgtgctggttctgcgcattgatcaggtcggaataggtgtctgcctgggcaggctgtgccgagctgaacgccagacctcccacacaggctgcggcggccaccagtgccgccagtgcgggcttgatcacacgtacgttcgtcatatgtgaatagtcctttcgctcacttaagccaataccataacatgcgaacctgagaggcttgcacacgatgtcatcacatttctcgcgggtaagccggtcgcgttacgccctcaaataacgccgcaacgagatggttgaagcgatgatggacagcagtatcgcgcccacaaccaggaacggcgatatcaccagtaccgtgagctgattcacataaggaatccatgtaacggatttcgccagccagccggtgacgaacacgttgacgatagccgaaagcatcaggcacgagagcaccgagccgatcagcgaggcgatggtgccctccagaatgaacggcagacgaatcgtccagttcgaggcacccacgtacctcatgatttcggtttcggttcgtctggatgcggcggacatacgaatggtggttccggtcagcaggatggcgaccaccaccatcacgccggcgagcacagccgtaaccgccgtggctcggttgagcacggcgaacaccgggtcgaagatctggcgctgatcggtaacgtcttccacaccctccttgccagagagcacttcggagaccacctgatatttggtggggtccttgagcttgagccagagggagtcctgcatatcgtccgcggtcagcgtacggccttggaattcaccgttcgggtactgcttggtgaaggtgttgtcgtagaaatcctgcttgctgacatagtcgatgttggagaccacgtcgttgagttcatcgcgaatggttttctgcagtgccgtgatctcattggctgagggcgatttgccggaagcacagttcgcggactggctggtgccgtcgggacatagccacaccacgacctcgaccttgtcgtaccagtcgcccttggctttggtgatctgcgcctgagtaagcaccgaagcgccgatgaacaggaatgagatgaaggtgaccagcgtcagcgacagcagcatcgacaggttacgggtgaggttggcccacgtttcggacagaatgaatcgtgctcgcatgatgatcccccttactccttcgcgccctcagcgggttgatcgtcggatgtttggtctgcggcggactgctcgtcggcggactgctcgttggccggcggtgcgggcggttccggcggtgcgggcggctccggcggggccggcggctcggcggcggatgacacggacgtatcggcaaccgcggcggtcgcggcggactcgtccttgaacgggtcgaacgcctgggtgctttccagggcggcggcctgctcatccaacgaaatgcccttgccccaggtcagcgtgtcttccagcggcgcaaacgtctcgccatagcggccggtgcggccggaatgcacggaattggccaaacgggcgatgccttcagacggctcgtcactgccctcgatggccttggtcgccgccgccagcacatgatgggcggtgtcggacttggcttcgacttcggcatccgggaagaacagggcggaatcgtaggagccatgagcctcgtcacgcacgatcttgccgttgtgcagttcgaccacgcgcttgcgcatcgagttgacgatctcttcgttatgcgtggccatgacgatggtggtgccggtgcggttgatggcgtccagcacttccatgatgcccagcgaagtggtcgggtcgaggttgccggtgggctcgtcggccagcagaatctgcgggtgattcacgtaggcgcgggcgatggccacacgctgctgctcgccaccggagagctcatgcggatagttcttttccttgccggtgagtcccacggtattcagcaccttgggcaccaacgatttgatggtggaccgccgcgtgccgatcacctcaagggcgaacgccacgttctcccatacggttttgttattgagcagcttgtaatcctggaacacgaagcccagcgaacggcggtactgcggcacttgacggttggtgatgcgccgcagatcgttgccggccacgcgaatctcgccgctggtggcctcctcctcgcgcaacagcaggctcaagagcgtggtcttgccggagccggacgcacccacaaggaacacgaaatcaccgcgttcgatatcgaggttgatgtcgtcaagcgccggtcgggtgcctttgggatagatcttggacacattgtccagtgagatcagtgccataatgctgtttactcctcggtttcggcggcgcggcgctgttcatggcgccagcggatgccggcctcgatgaacgcgttgatgtcgccgtcgaacacggcctgagtctggctggtttcgtagccggtgcgcaggtccttgaccatctggtaggggtgcagcacgtaggagcgcatctgatcgccccagctggccttgatgtcgccggcgagctccttcttcttcttggcctcctcctcgtggcgcagcacgagcagtcgggactggagcacggccatggcggaggcacggttctgaatctgcgaacgctcatcctgcatggtcaccacgatgccggtgggaaggtgggtgatgcgcacggccgagtacgtggtgttcacgccctggccgccggggccggaggaacagtaggtgtccacgcggatgtccgtatccggaatgtcgatgtgatcggtggcctcaaccagcggcaccacttccacggcggcgaagctggtctggcggcggccctggttgtcgaacggggagatacgtaccagacggtgggtgccgccctccacggacagacggccgtaagcgtagggggcgtccacctggaaggtggcggacttgatgccggcctcttcggcgtaggaggtgtccatgaccttggccttgaagccgttacgctcgcagtagcgcaggtacatgcgcaacagcatctgtgcgaaatcggccgcgtcgacgccgccggcaccggagcggatggtcaccacggcggaacgttcgtcgtattcgccatcgagcagggtctgaatctccatctggtcgagatccttctgaatctcgccgatttcgctttgcgcctcgtccagagagtcctggtcgccctcctcgtggccgagttcaacgagcgtttccacatcgtcgatgcgctgggaggcggagttcagacgcttcagctgcgattccgcggcggacagccggctggtgatcttctgggcgttttccggatcatcccacaggcccggggccgcggcctgcgtttcgagatccttgatatcggccttgagccggtcgacgtccagcgccttggcgatggattcgtatttggcgcgggcttcgccgatcgcctgggtaaagtcaaattctgccatcgtggtttaccttactgttggttctttgagattccttgggaagtcacgtccttgttggcagccttcgcacattcctctggcgttggcgggcattgccgcgccacacacgcatccgcctgcaatccatgctgccagaaggttccgggcctgccttgccgatagccggccgggcgacctcacaaatccctcgcatcagacgtgttcaactgcgggcacgaatatgcgaaggcaacgtcaaagccccgcgtaaatcgccgggatgatcagggagccgagcatggccacagctatgacgacacacaccacacgcacgatggtgcggcggcggttctcacgctgctgtcggccgtcctgatagttactcacgagaccaatagtgtactcaccgcttacgaccgcaggacttgccgccgacgccagccctgccggcgggcccccacggccctttcctttgcgctttcagcgccgccagatggtgtttcatggccaccagcatgatgtgcgaatcctcaaggcccaagtggcgttcgttgtgggcggaatcaagcgcgccctgacgtttggcgtaggcgtcgagcgtgttgtctccgtaaggatgctcgttggtgggtaccgcgccggggtcccactgccggctcatcggcagggtatcgatgatggtgatgcgcccggcacggtagctttccgcgtatccggcgacgttcagcatgaaccagctatgttcgaaggtggcgttatgcgccacgtacggctgctgggtaagccgcgcgagcaggccggcctgggcttggggccattcgtcgaagagtcggtacccggcctcgctgctgcggccgcgtacatcgatgccggtgagtttggcgatgagggcgttgccgagcgccgcgttttccggcggcacgccaaaagcgagacgggactggccgtaggcgtcgccggcggcgtaatagccctgctcataggcgtatgtctcaggttcgccggccgggcgcggactggccatgttcatgaactcgaagccgacgtcgatgatgtagtcacgcgccggatcgatgccggtggtttcgatgtcgatgcccatcaccgcgtccacgtcgcggccgggcagataggcgtcgcgccagtcgggcttgggatggtggccggtagcgttgccagacgaggcggcaccacccggcgaagtcgcgccggagagattggcgcgggccatcgccgcatcgcccgcacgcttctggaagcgctgggccttacgtcgttcggcgcgtgcgtcaagaatcgccgccgtacggtcttggatatcgtccaaggcgactgttgtggggaacttgacatcgctgttttcggcagcagtgtttccggcagatgcgtcaccggtttcaccgctcagattcagcatgccttggtcatcgttcgatgggcggctgccggagtacggcctgagcacggcaacggtagtcctcccccgccgttcgcgactgaccacccataggtgttgctgttcgcccagatgcaacagcgtgttgatgttgtcgttgagccgacgattggcgtaggcgagcgcgcgaggcagacgataggagccgatgaatcgatcgtaatcggtcatgaatgtgctgttgcattgggcgatgattgattccagatgctcgcgtgtggcgtaatcgaccttcaatgcgtcgtggatagcttgtggcgtcagttccggttggtccaacccgagctgaggctgtgctgcggtttcgccatattgctcaccatctgcagcaagcgccagcaatacgctgatgccatgcatcaggtccagcgaacgcacccagtcccagtcaatggtggtgccgtcggcgtctttgggcatggacgccgcccattggggaatgtctcccttggcggcgtccagccatgtgcggtcgatcatagtgcgaagccgagttcttcggcggcctcggtgggtaccgggtcgtcgcaccaataatcctcgaggttttcggtggtggtcagcgaacggatttcggcgcgatcgatatacagttcgccgctcaaatgatcggtctcgtgctggaagatgcgtgcgggccagccgtgcaacggctcgctgtggtgcttgccgtcttcatcatcccattcggcggtgatgtcgagccaacgcttgcgcacggcctggtatccgtcgaagctcaggcagccttcgtagaacgaggcggttttgtcgctggtgggtttgtagctcggattgatgatcacgtggaaggggaattccgcgatttcgcgcggatcatcctcgtcgtcgcgcacgtggtcttcgaccacggcgagcgcgagccccaagccgatctgggtggcggcgagccccacgccgggcgcctccagcatggtggtgtgcatcgtatcgatgagtttggcgagcgtacgcttggaaagctggccatggtaggccaccgtccgttggcgcaacaccggttcgccggcctgcacgatgggcaggagcttctccttgccgccggttttgataagttgttcgacatcacggttgagttcgaggtcgactttggcgttctttccaaacattgcttttccttagggaagggtgctacagcgcgagttcttcggcgacgatcttggcgaggcgggtgcagacttcgtcggcgtaggcctgggtggcggcttcggccatcacgcgtacgagcggttcggtgccggaggggcgcagcaacacacggccggtgtctcccagcagttcctcctcgcgggccacggcatcctggatgcgcttgttggtggcggcggctttcttgtccacgttcggcacgttgatgagggtctgcggcagctgcgggaagtcggcggcgagctccttcaggctcttgccggacttgacgacctcgttgcacagggtcagtgcggtcagggtgccgtcgccggtggtggcgaattcgcggttgatcacgtggccggactgctcgccgccaagcgagtaatcgcccttgagcatttcctcaagcacgtaacgatcgcccacggcggtttccacggtcttgatgcccatgtctttcagggcgagcttcagaccgaggttgctcatcacggtgaccacgagggtgtcgtggttgagcttgccttcgcgctgcttggcacgggccagaatgcccatgatctggtcgccgttgatcatgttgccgtcttcgtccacggcgaggcaacggtcggcgtcgccgtcgaaggccacgcccatcacggcatcggtggccttgaccatggcctgcagctgctcggggtgggtggaaccggcgttcttgttgatgttgtagccgtccggcgaggcgttgatcacgattacatccgcaccggcacggcgcagggcttcgggagccaccacggaagtggcgccgttggcgcagtcggccacgatcttcaggcccttgagcggcttgggctgggttttgtcatcgttcagcggagcgatggtggccaccagatgatcgatgtacaggttggtggcggtggtctggtcgtggctcacgcggcccacgccggcaccggtcgggcggtcccagtcctggccgagcacggcctcgatgtcgtcttccttctggtcgggcagcttgaagccgccgcgtgcgaagaacttgatgccgttgtcgggcatcgggttgtgggaggcggagatcacggcacccatttcgacgttgagcacggaggtcaggtaggccacgccaggagtggggatgatgccggcatcgatcacgtcgaagccgccggcggccatgcccgcggacagggcggaagccagaaaatcaccggacacacgggtgtcacggcccacgagcgcgcggcggcgtccctcaggctgatcgtcttgggtgccggcgtcgccgagcacacgcacggcggcatcgcccaaatccaacgccagacgtgcggtcaaatccctattggccagtcctcgaacaccatcggttccaaacatcttcggcatatgaagttccactccttgtatcgcgttacccgcaccatcgtagtcgttgtgctccaccctaggacccgactcggcaaaaaacgccacggaatctgctctaggaccagacaatggcattcccgatacccgcaatgtgtgagagaatacaagaatacagtagacctttgggagtttattgagaagaggaagcaccctatggcatcgtcgcatcgccacacgcccgccggaccgtccatgatgccggcaccgccgcgcatagcaccacacgttccggcgccaacgcccgtaccttcgattgcgatgggagtgccagccaatcagccctcgccttccgcatcatccccgcgcgtggccatcactgtggtgtatggcaaacgctccgcgaaactcaatgttccgtcgacacttccggtagctgaactgctgcctgatatcgccaagaaactaggtgtgttcgatccgactctggtgtatgccggctaccgactgacccgtgacgacgaa

SEQ ID NO: 1824 - DNA, 7862 bp, Unknown
  MAG_14  MAG No. k141_44456
gacccgcgacgagggcaccgacatcgactgattggggcttgtcctcacattgggcgaataactgaacacttgtcctcctatggtttgaggaggatgcctgaaagcggcgatccggctacggctggacgccgtttttttgttgcttctgggcggtacaccggcgtatccatggggcggcaaaacacccatagggcggtaacttgcccatggggcggtttgaaggatatgtgaaaccgcggaattaagccattctggcataccgccccatgagggttttaccgccccatgagggttttaccgccccatggggtaatcaccgccccatggggtaatcaccgccccatggggatttggcaggcatagcaaaggggagccacacattatgtgcgactccccttacagcttgtaccgtgttagcggcttaggctcacttctggccttgagcggcgacagcggcggcaccggcagcagcagcctccgggtccaggtactcgccacgcggcttgatcggcttgaagttctcgtccagctcataaagcagcgggatggcggtcgggatgttgaccttggcgatctcatcctcggacaggttgtccagcatcttgacgatggcgcggagggagttgccgtgagcggcaatcagcacggttttgccggccttgagctccggctcgatggcggactcgaagtacggcttcacacgctcaacaacgttggccaggcactcggcttccggaaccggatcgccggcgtagcgcgggtcgttgttctgggcgtactggtcgttcgggtcgatctcgggcggcggggtggcgtaagaacggcgccacagcatgaacttttcatcgccgtactcttcgcggatctcggtcttgttcttgccctgcagagcgccgtagtgacgctcgttgagacgccagtcacgctgaaccgggatccacagacgatctgcggcatccagagcgatgttggcggtgttgatggcgcgacgcagcagggaggtgaacacgatgtccggaaggacgttcttctccttgagcagctcgccgccacgcttggcttcggcttcaccctgctcggtcagcggtacgtcgacccagccggtgaactggttggttttattccatgcgctctgtccatgacggagcagtactagtttataagtcatacggttcagtctacagccgcgtgcgcccaaacacgagtattcgtcttattatttcgctctcatagcgccacggcaaccgccagcaccaccgcaaacagcaaggtctggaagctggcggcgggcagagccgggcggaattgacgtttattcacgctggagaccatgcgcacaggtattccggtgcccgagagcaacagcaccgcaccccacggccaccataatgtaccgcacatcagcagggcgatgatccatgcgatgacgcagcacacaatcagcaacgtacgcgcgccggactcccccagccgtacggccagcgtgtgtttgccatgctcacgatcctcgtcgatgtcacggatattgttcaccatcatgatcaggcaggagaacaggccagccgccacagcacccaatagtccgccgacgtccaccgtgccgcacagcgcgtattcggtgcccaataccgcagccaagccgaagaacaggaacacgccgacttctcccagcccgacgtatccatacggatgcttgccaccggtgtagaaccagccggccagcaaggaggccgcgcccacggccagcaaccaccatgcttgggcgagcacgaccgccacaacaccgcatatgcaggcgatggcggcgcaaatcatcgccgcgaacagtacatgcttggccggtaccagtccggatgcggtcagtcgctggggtttgcctgatttcgattcgtccgtgtcacgcccggcgtcagtgccgcggatgccgtcggaatagtcgttcgcatagttgacggcgatttgcaggaacagcgcgactagcaggcacaggatggtcaccggccagaatcggtccatcagcagggtctgctgttcacgggccgtggcgcaggaggccggttctggatatattgcgatgcaggtgcccgaccgctcgatatgcacgtacgccatcaccgccccaaccatcaccgacgcgatggaagtgaccaaggtcttgggacgcgcgccccgaacccacaagccgatagacataagcaatccctttcatatataactctggctcccctctctgaggggagccagagtatgcctaatcagccaacgagcggcttgaccagcgggaaggtgatggtctcgcgaatcgtggcaccggtcaaggcgataagcagtcgatcaatgcccatacccataccgccggccggaggcatgcccacgccgagagcctcgaggaagtcctcatcgatgtcgcaggcctcttcgtcgccggcgagtgcgtccttggcctgggccacgaaacgctcacgctgcacgatcgggtcgttgagctcggagtagccggtagccagctcgaagccgcgcacgtagagatcccacttctccaccacgccgggcttggtgcggtggcccttgaccagcggggaggtttcgaccgggaagtcacgcacgaaggtgggctcgtaaagcttgtcctcgtagaagtgctcccacaggtgttcgacgagcttgccgtggttctccacgtcgtcgcgctccacgccgagcttgtcggcgatggcgcccaaatgctcaacggaggtgccgggatgctcagggccgccgttcggcacgatttcctcgcccaatgcctcggacagcgaatcgtacatgctgatggtcttccattcgccgccgaagtcgtattcggtgccgtcgagcagggtgaccttgtgcgagccgtagacgtccatggcggtcttctgcacgagctccttgaccagctggccgatggaatcataggtgccataggcctggtaggcctcgaccatggtgaattcgggggcgtgcgtggcgtcgacgccctcattgcggaagtcgcggttgatttcgaacacgcgatcgatgccgccgaccaggcagcgcttgaggaacagttccggggcgatgcgaaggtacaggtcaaggtcgaaggcgttcatgtgcgtggtgaacgggcgggcggccgcgccaccgtgcagggtctgcagcatcggggtttcgacctcgaggaagtcgtggtcgtcaaaggtgcggcgcagggaggccacggccttggagcggttgcgcaccatgttgcggatgttctcgtccgcgatcatgccgatgtacggcttgcgggtgcgggtgtcttcgttcaggtccttgtgcagggccggcagcggctgcagggccttggaggcgatagcccactcagtggcgaatacggacagctcgccggtcttggaggcgatgacgcggcccttgaggtacaggtgatcgccaaggtcgacgagctgcttgaactgcttgagcgagtcggcgccaatctccttcttggagatcatgccctgaatcttggtaccgtcaccggcggacagctgcacgaagcacaggccgcccgcgttgcgcaggaacagcacgcggccagcaatgccgaccatgtcttcggtctcttcgccagcctcgagcttgccgtcatacttggcgcggaccgcctcgatggtgtcggtgacgtccaagtgcaccgggtagggggcgatgccggcctcaagcatcatcgcgcgcttggccacgcgcatctgcacctgctcggggtgagccagcgggccgaactccttgttggaggggtccacggcttcgtccagcgtggcaccggacttgatcttctcgcggatggtggcgtcctgctcgagcagcatttccgcacgttcgacggtgctcatctgcgggacggccggggtttcattctcagtgttttcggtattttcgacaacttcagccatgattcatcagtgtacgcaaggccggcgattatgagcccggcagaccgtacggccatctgaacacccgctcacatgacgcaaaaccggctctgcacaaggcttgagagacctgtacacacggcgaatccaccatcacgcaacactcgcgacatgccgatttgcattgtccaccaccacaatgtaatatctacgtctgttgccaaacgggctgtagcgcagcttggtagcgcgcttcgttcgggacgaagaggccgcgggttcaaatcccgccagcccgacaactggaccggattgttgagaaatcagcaatccggtttttcgtttcctaacccaacaatcagaccaagcgatcggacagcggtaaacaacccgccgcgcacagcgacaaaccgcgtcgcggcaaggcccgtatttgttggcggaccaccgtaatatatcgctcgaatcaatcgattgccgcactgtttttgtaagtaatactgaagtaattagaggaaccatgaagaagagtctgcttgcactggcttcgggcgcgttcattctcggtgccgccgagttcgtgatgatgggtattctgccgcaggccgcggccgccaccggcgtggacatccccaccgcaggccattacatttccgcgtatgcgatcggcgtgtgcttcggcacactgattctggtgttcggccgcaaggtgccgccgaagaacctcatcatattgtttatggcgattgcgcttatcggtaatctggcctccgcgttctcggtcaatgccgccacgctgattgtcgcgcgcttcattgccggcctgccgcacggcgcatttttcggcaccgccacactcatcgccaaaaccttggccgacaagggcaaagaagcacaagccgtatcggtaatggtcaccggccaaaccgtagccaatatgctcggcgtaccggcgggcaccttgatggctgagttcctatcctggcgcctcgcattcggtattctggctgcatgggcggcaatgacgattgtgctggcgttggcgtggattccgtacgttgcgccgattaaggacgccggcatcgccggtcagttcaaattccttactcgtcgtggaccgtgggtgattctggccgccgtattcaccggcaacgcaggcgtgttctgctggtggagctacgtctccccttggctgcagaagaccggtggctggtcgtctaacctggtaccgctattgatgatgcttgccggcttcggcatggtgataggcggtcttatcggcggtcgcatcacagataaatggcgccacgccggcactgccgcgctgggtcagacgatttcctgcatcggcttgctgatggttttgctactgccgggaaaccagggcactactgctttgctgaccttctggatcgccttcggcctgttcttcatctccgctccgcaacagctgttgatgaccgaagccggccaaggcggcggcgagctcatcgccggcgcagccgtgcaggtggccttcaacttcggcaatgccatcggctcgattgtcggcggcgcgatgctcaccactttctcgatgaactatcgctataccggtctgggcggtatgccgctggctctgcttgccgtagggctgctggccttctactcgtggcgctgcgaaaccgataccgacgccattcaccgcatgcgcgaaatcaaggtggactgagaccaagctcacagcaaactccctgacgcgtttgttcacagtattaatagactgaaatcagacacgattcagggaggtctggcggtatggacgaggaagcactgctcaaacaattcgccgcacaattcgcgcatggtccagacgatgccgacgacaccgatgcggcggccgcagcgcaaggtgccgattctactgcgaaccaggccacggacgatgccgatcaatcgcccgcaacctttgatacccaacaattcctgaacggactggacgcgattttcgatcgccacgcggcagccaccgaagccggtccgtacttggaacaggcgatggtggacgcggaaaacgccggcgacgaggccggactgctcaccgtactcaacgaaacgatgggcttctatcgctcgcagggccggcacaaggagaatcagtggattgtgcagcgggcgctggaactggccgctcgtatgggcttgaccaccggcacatccgaggcgtgggccaccacgctaatcaattgcgctaccgcgatgcgcgcggcccaacaatacgatcaggccgaggatttgtatcatcaggcgcagagtgtctgccggcattcgctggcacccaccgaccgtaggctcgcagcactgcacaacaatctatcgatgctctacagcgagacgaatcggcccgacaaggcggaactggagttgcgtgaagcgctgcgcattatcgaagcctcgagcgtgaacccggacgcggatatcgacgtggccagctcgcacacgaatctggcgttgaccctgctgaccgaacacaagttggagggcgcgcattggcatgcagccaaggcactggaaatctatcgcaccggccatctggaacattccgcgcattatgcctccgcactggcgggcttcgcgcaggtgtgctttgccgagagacggtatgcggatgcggttactggataccggcatgcgctggccgtgatcgagaaatgttacggcaaggacaccgattactggcgtatcaccgccgacaatctgcggcaggccgaggaagaggcggcgaaggccggggtgacggttgacaatgcgggtgttgccggcgatgcaggcgcgctgccccagtccggatcacggctgccggacagcccggcacaggacaagaccggtgcggacgcgacatcttccccatccaccgtttcggtgtcgaacggttctgcgggcgcggccgaggccgtttccgcatgcccggtgtccggactgaagctggcccgcgcgttctggacgcagatgggcaagccgatgattgcagcgaagtatccgcagtatgccgggcgtatcgccgccggtctggtgggtcatggctcggaatgctacggattcgatgatgcgtattcgcaggaccacgatttcggcccgcgcttctgcctgtggcttacggatgaggattacgcggccatcggcgagcaacttgagaccgattacgaggcgctgccgcgcaagttcagcgtggatgcgcaaggccgcgtgacgttcgaggcgcatgccagatccgatgcttccggggcattcccctccgcaggtgcaggctccaccgtcatacccgatgcggcaaacgcacccacccccggcaccgctacggacgataccgccactgccgagtcaggcgcggcgtcctctgatgtggcggaagcgatgacgactccgattgatgcaccgctctcccccgtcacgccgcgcgcacagggcgcgaatcgccgtgacggcgtgttccgcatcggtgacttctttgagtcgatcaccgggtatcgcactgcgcccgcgcagaccgcgccgcacgagtggctgatgcttcaggaatcgaccttggccgccgccaccaatggcgaggtgttcgccgatcccaccggtttgttttccaagacgcgccaagggttcaaaaacatgccagacgatgtgcggctcgcgctgatctccaagcgactcggcatgatcgcccaagccggtcaatataatctgccgcgttcgttgaagcgcggcgacggcgcggctgcatggctgtccatccacgagttcgtgcaggccaccgcctcgttggtgttcctggttaacgtgccgatggtggtgggctatatgccgtattacaagtggcagttcgcagcattgcgcaagctgtctggctcgatgttcgcgctgttgccgaacgtgggcgaacagttggaaaccgtgatgcgattgagttcggca

SEQ ID NO: 1825 - DNA, 4551 bp, Unknown
  MAG_14  MAG No. k141_44478
agggaccagtggccgagcacatcgtccttggtcacttcgtggaactcgttgttctggaatgcgttcaccttgaaatcggtcagttcatgctgcagaagagtcattttcggtcctttcaggattcttcaggcgattaccagaacccatcgtagtgtggcggcacagggctcgcacggacagaacatatgagccttatcacaccagccacagcccttgtgttgactatcatcacggcccacccttaaacaggattgagatcgtgagcgttctcattatgctttgggcaaagccagattatgcacgcagtcgcgaatccgcacttccaatcgctaatatggcaatcagcagtccgctgataatggaggtttcatggctcagtcagactttgaacaggaatcaaccgcgaacgcaacgtggagccgcatgctgcaaggcaaccggcgctttgccgagggcaagcccgaccacccatggcaggacaaggagacccgccagacgctgcttgatggccagaacccggatgccgcggtgctctcctgctcggactcgcgcgtacctccggaaatcatttttgatcagggcctgggcgacctgttcaccgtgcgcaccgccgggcaactcatcgatagcgcggttatcgcctcgctggagtacgcggtcaagaaactgcacgtcagcctgatctgtgtgctcggtcacgagcactgcggcgcaatcgaggccgccgagcaggagctggacgacctgatgcacaccatcacttccgaagccgacggctcactggaggccgcggatgcgatggacgacctcgacgagcacatcgccgccgccgaatcgattattctgcgccaggccggcatgtccgtctggcaggcgcgcgaagccgagctcgacgcgcatgaagacatcgagcgcgtacacgtggcccacaccatcgagacgctggtggaacaatcccccatcattcagcaggcattggctgccgaccagctgatgatcgtcggcgcccgttaccagctcgacaccggcaaggtcgaggtgctgagtttctgaccatcagtcagaccccgttcaccgggggtaatgcggtcgtggtacatctgtgtgcagagagatcgaagaacacggaagtctgaaccaatgccacctgcccttactattcactacggatccgccacctatacccccaatcctgcacgtgccacgaccatcgggcgtgcgccggattgcgatctggtgattcacaacccgtacgtatctcaccatcatgctcgcgtcacctttaccgacgatggttggctcttggaagacacgggtagtgcaaacggactgtccatcaacggcattcacaccacttccgtactgctgctgaacagcaccaaagtgacgctggcacaaggtgccaccatcgtctgcatcgtcggaaccagcgggccgtccacgccggcacagcccccgcgacgccctgcggcaaacgtggcccagcctgcgctaccgccggcaccatcagcgcaaccggcacaacccacgcaactcgcgccgcaacaggcacgcccagtagtgcaacccacaccaccagcaccgcaaccggcacaaccggtacaaccgcaaccaacgccagccccgctggccccgcaccgcgtatccccggccctcgcgcacctgcaacagcaaccccgcccaacagcagtggcaccgacggcagtatcgccagtgccggtatcacccgcatcaccatctccgtctccctgcgcatccccttccccatcgaatgccgccggcaccgttctggcaggcagcacgcaagcggtaaggctcgaatcccaactcaccaccaaccgcgtgcacgggtccttcagccccgagcacgacaccacaggcgtcatcggccgcgataccgcctgcctgattcgcatcaacgattatctggtctcccgcaaacactgctcgctggaaaccaccagcagcggcatcctgctcactgacctgaactccgccaacggcacttacgtcaacggccgccgcgtcgcgaagatctggctgcgggaagacgacgtcgtcaccgtcggcaacaccgacctgatcgtgcatgaaggcgtgctgtgcgaccgcacgccgtttgtcagcaacgacgcggttatcgccgaaaacatcggactgaccgtgggcaaaggcacccggctgcttgacggcatcaacgccgtattcgccaagggcacgctcaccgccgtaatcggaccttccggcgccggcaaatcaacattcacctccatcgtcgccgggctcaacagccccacggacgggcgcgtgctgtttgatggatacgacgtgcatcagaacatcgaactgttgcgcagccgtatcggattcgtgccgcaggacgacgtggtgcaccgcaagctctctgtggatgcggcgctcgaatacgccgccaagctgcgcctgcccggctcaaccaaggccgagcgcgccgaaatcatcgacaacgtgctcaatgagctggaactcacgtctcgccgtaagaatcgcattgacagactgtccggcggccaacgcaagcgcgtgtccaccgctatcgagctactcaccgaacccgaactgctgattctcgacgaaccgacctcgggcctcgacccggcgctggatcttacggtgatgaccatgttgcgccaactggcggatgccggccgcgtggttatcgtggtcacccattcactgtcgtatatcaacaagttgtgcgataacgtgctcatgctcgctcccggcggccatccggcattcttcggcaccgtgcaggagatgagccaggcgttcaacggcaaggaatgggccgacatcttcaacgatgtcgacgaatctccggaacgggtgtattcgattactgattcacgccagcgcaccatgcaggccgagtccaccatcacgcggcacaccgagcatgagaaaccggcaaagccattccgcatcaaacagaccatcactctggtgattcgtcagctgcatttgatcatcgccgaccccggattgctgatcttcctgctgttgctgccattgctcctaggactgctgtcgctggttgtgcccggttctcatggcttgggtgagcccgatttcaaagacgccgccaccgagccgaaccagctgcttgtgctcgtcatactgggtgcctgttttatgggatcggctttgtccgtgcgagacatcgtctccgagcgagcgatttacggccgcgagcgcgcggtgggtttgtcgcccacgtcatacaccgcctcgaaactcatcgtgatgggtttgcagaccttgttgcaggcggcgattctgaccactgcggtcagcctcggcaagcccggcccggaccatggtgtggtcactgattccggcatacccgaactggtgttggcgatttggctgactgcgtggacttccgcattgttgggcgaagtcggctcggcgttggtgaagtcgggagaacagacgatgccattgctggtggtgctggtcatggcccagttggtgttctccggcggcatgattccggtcaccggccgcgacagcctcgagctggtcagcatgatcttccccggacgttggggcttctccgccgccgcctcggatatcgggctcaacgatctgctgtatggccccaccaaggtgccgatgttcaaaaaggatgatctgtgggagcacaccacggatcagttctggttcaacattggcattctggggattatggtagtcgtcttcaccattgtgctgcgtatttgcgtcagcaatgccgtggccaagatgcgtcggcgctcatagaactggatcgaaactagcccgcaaccggcttacttcattcattaggtcaattatgcgttcatttggtcactgcactccaacactgaccattgaaatgccgccattccaacgcctcaccatgccgacaacccaccaaatgaacgcgcaacctaccaaatgaatgaacccagccctatatttggtgctacaacgactgcaaatactgccccaaatgcggcaccgcaaattccagctgcccatgacctgccgggcggatgagtttgtccttgaatcgtcgaaggcgagcagcgcatcggaaacaccggtcgacacgtcgtccgcggtaatgacatttgaacctcgacgttgtgtggattgccacatgtagtagccaacaagctgcaccatgtacgggtatccttcagactggcgagcggcttcaagcgcatcttccccactgatggtcttgccggaatccgcaactgtttccaggaacgcattcttgacgtctggaagcggcacgttatccaattcgcggcgtagcgcacggcgcaggaatgtggttacctcgttatccagcaaatcgttgaccatatacggcaagccggcaaatacgatgacaacgcccttcttatcctcatcaggcgtatcactttcatcggcatccgtaatgacgtgctgcacggctgtagcaatagccaccaaatcatcatgcgaggccgcttgcgtctcatcgatggtgatgagaatgcccttccccttgccgag

SEQ ID NO: 1826 - DNA, 29619 bp, Unknown
  MAG_14  MAG No. k141_44587
acgcccgttcggaggcatccaggtcgtgctgtccggcgacttcttccaactgccgccggtttcggtgtccgggcgcaaccgcgacctcatcgcccccacccccgaattcatcgccagtcgcgaacggtatgcccgtgccgggcttaacccggaaggtttcatcaccgaatcattgatatggcctgaacttaacccggtaatctgctatctgaccgaacagcaccgtcaggacaccggcgagctgctgaccgtgctcaccgacattcgcgaaggcaacgtgacccagtccgaccgtgacgtgctcgtcacccgtctgggcaaactgcccgagcccggccaggtcgccgtccacctattcccggtgaaccggcaggccgacaatctcaacgacatgcgcctgaaccagatcatgcttgagccgcacgagttccacgccgagacagcaggccctgccaacctggtcgaccggctcaagaagaacatgctggcccccgagcgactggtactcaaggaaggcgcggctgtcatggccctgcgcaacgacaccgatcgccagtacgtcaacggctcgctcggcaccgtgcgcggcttcgcgcaggagaacaagggcggctggccgatcgtggaattcgaaaacggcaacatcgtcaccatgaaacaggccacatgggaaatgatggacggcgacaccgtgctcgcctccgtctcgcaggtgccgttgcgttgcgcgtggggcatcaccatccacaagtcgcaaggcatgacgcttgatcgtgcggtcatggatctgaagcgcaccttcgcgccgggcatgggatatgtggcgttgtcccgcgtcgaatcgctgggcggactgtatttgactggcgtcaacgaacgcatgttcctcgtctcgcccgatgccgtggtgctcgacggcgacctgcgcgaagcctcggcctcggcttccgaccagttggccgatgaaggtgcaagcgcgttcaaacccgccgagccggacgaattcggtgtcaatcccgatgatgacttcgcccaggacgcgttattctgacggtcgatatatcgaacgaccgctaatttgagtgtttctgcacttcgaggggcggattttgagttttcgggacatctacttccgtttcaaggggctgatgcccaagtagacaacgcttaaaaacggcggaatgacgttggtatgaagccgtttctatgtgcgattgggcggatgaccagcccctcgaaatgcaagtagatgtctccaagaggcggaatcggccccttgaagccgaagaagacactgcgaacttgtcttcattgaggaactgaacggctaccatggaataagaggtggtagttatggtgctatccgagatatttcgtggaaacaatgaggttcgcgaggccgcccgggccggtgtgcaaatcgatacggttagtgtggctagtgcgtcagatgcagcaagcgcggcagacggcagcggcaaaatcactggcgcaatacgtccgccagcggtggctggttcgttctaccccgctgaccgcacaacgctcaagcaactcattaaccatcaattggattacagtcgagaggttctgcaacagttggagcccacgcttccagcgggagtgccaaaggctgtaatcgtgccgcatgccggttatgtgtattccggcacggcggccgcgcttgcctatgctttgctcgaacgagggcgggggagtgtgactcgcgcggtaatcgtgggaccgactcaccgtgtggccgtgcgaggcgtcgcctgttccacggcagcggcgtttgaaacgccgctgggcactgtgccggtagacattgcagccgagcgtaaggctctgggcctgtctgtcaatgagccattgcgctccggtacacatgcccgtccgggcgcgtcggctcccgcaatgatcgtcaatggcccaacccacgcacaagaacatgcggtagaagtgcagattccgttcctgcaaaccgtgctcggcccagacctcactattgtgccgttgaacgcgggcgatgccacgccacaagaggcgggtgatgtgttgcgtgctttgtggggtggcccggaaaccgtcatcgtgattagttcggatctctcgcactatcatccgcacgaagtcgcccgcgcgttggatgaccagaccattgcggacattgcggctttgcatctgccgattcaccctcgccgggcctgtggcgcatacccgatcaacggccttctggatgtgttaaaaggccgcaaggacatgaagctcttcgagctcggctgttccacttccggcgacgacggcgtggtggcgcttgccggccaacctcgccccgcaatgcgagacgccgacgagccggtagtgggatatgtctcgtttgccgcgtgggaatccaaaccagaagcagatgctccagccggtgcagatgacttaggcgaatcgggaacagcccatggtgatgtgctgctgaaactcgcccgtgccgctatccgggaacggctgcatatcgagcatccgaccgccgccgattcgaccgcgtccattcttgccgcaaacccatggctgaacgagtccggtgcctgtttcgttaccctgaccgagggtggccggctacgcgggtgcatcggttcgctggccgcccaccgctcgctcggcaaggacatagctgcacatgcggtggacgccgccacccgtgacccacgtttcaacccggtcaccgccgcggaatacccgttactcaatgtggaaatatccgtcttaggcgagcccgagccgattaccgcgaactcctgtgacgccgattcgcgcgataccggctcgaagaccgcgactctggcatcgctgcaatccggacctcagaccgacgccgtcaaacgggacggcagtaacgtcgaacgcccggtgcgttcgcgcactgaacttgaggaagtattacgccccggcaaagacggtctgattctcgccgaccgtcgtggccgcagcgccacattcctgccacaagtgtgggatgagctgcccgattcgcgcgatttcgtcgctcacctgctcgccaaagccggtatccgcccgtactacgactggaacgatggcgaaatcgactgtcaacgctacgaggtgaccgcctatgccgagcactaacgcagcaaccatgtcccctcccgctggcgggaggtggcgcgaagcgacggagggtggtcaccgagaatcagagggtggtcaccgggaatcgtgcggtcatacggcgtcagtcacagatgttcgtaaccccgccatagcccgctggcaaacgcaattccacgacggtaccaaccgcgctcgctgcgaactatgcccgcgccgctgcgtcctcaagcccggccaacgcggcttttgcttcgtccgctcaaaccacgacggactcatcgtctccgacacctacggccgcagctccggcttcgccgtggacccagtggaaaagaagccgctcaaccacttccaccccggttccagcgtgctgagttttggcacggctggctgcaattccggttgccgattctgccagaattgggatattgccaaagcccgcagtttcgaccggctcggcgtggaagccagtccggagaaaatcgcgcaggtcgcggccgaccggggcatcgattcggtggcgttcacctataacgatccgatcgtgttcgccgaatatgccatcgacacggccgaagcctgccgagcgctcggcattcatcccatcgccgtgactgccggatacatgagcgccgaagcccggcccgacttctacgccgccatggacgccgccaacatcgatctcaaaggcttcaccgaagaattttattggaaagtgaccggcacgcatctggccgatgtgctcgaaaccatcgactatgcggtcaacgaggcacgcacaccagaaggcgaacacgtgtgggtggagctcaccacgctactcatccctggactcaacgatgacgacgcccagctgcatgctgaatgtacatggatacgcgagcacttgggcccggacgtgccgctgcacttttccgcattccactccagttaccgcatgatggacgtaacgcccaccccgcacgagactctgacccgcgcccgaggcatcgccctcgaagagggactcaattatgtgtacaccggcaacgtgcatgatcgtgaaggcgataccacatattgcccaaaccctgaatgcagggccaagctcgtggaacgcgattggtatcgaatcattgccaaccgtttatctgccggatacagtggcaatgggcactgccccgtatgcaggactgctatcgccggacgttggtaatctgcctcaggtcgcccgcgcgatttagcgcagatcgccaatacgcgcggcgatcgtcctcatcgatttgaggctcgcctcatagcgcgcggctgccacaatcagaatgatgccgcccaaagcaagccgcacccaccggtagtggcgggagaattcgacccgccatggccacagcacagtcaccgtgctgacgataagaatcaccgtgccgtagatcaacggtgcttgcagcaaacgcacacccacaatcagcgcggccgctccggacaggccgattgttccgggaccgacataggcgattgcgcaaatggtggcatggccattggctgttgcgataccggttgtcgcggaactgtcgttgggaattgcggggttgcagcagaaaattgcggggcccatgctgggccggttgatacaccggttgctccgcgggttccggctgattcccctgttgctcggtcggctgcgtcatcgtgccctcctacccttctagccatcattgttgtacgaatgagtccgaatgccaagatgaaggccggaatagtgcgaatagcaggcgggcttgtcggttcacgcgaatatcttggaacacatgacttccaatacccttcgtatgtcaaccatgttcctgcgcaccctgcgcgaggaccccgctgatgccgatgtcgattcggccaagctgctgcagcgcgccggctatatccgcaaggccgcacccggtatctggacctggctgccgctcggtctgcgcgtgctgaacaagatcgaggccatcatccgcgaggagatcaacggcatcggcgcccaggaagtgcacttcccggccctgctgccgcgcgaaccctacgaggccacccatcgctgggaggagtacggcgacaacatcttccgtttgaaggatcgccacgaggccgattacctgctggcccccacccacgaggagatgttcacccttctggtcaaggacatgtactcctcttacaaagacctgcccgtcaccctgtaccagatccagaccaagtaccgcgacgagttccgtccgcgtgccggcctgatccgtggtcgtgaattcatcatgaaggacgcctactccttcaccatcgatgaagaaggcatgcgcaaggcctactatgacgagcgcggcgcctacgagcgcatcttccagcgcctcgacctgaagtacgtacctgtgttcgccatgtccggcccgatgggcggctccgcatccgaggaattcctggctccgatgccgatcggcgaagataccttcgcgctggcaccttccggcaaggcatggaatgtggaggccctgagcactccggagctgccggaaatcgatgcttccgccactcccgccgcttccaaggaagccaccccggatgccaagaccatcgataacatgattgagcgtgccaacgccgaccacccgcgtactgatggccgtgaatggcaggcttccgacatcctcaagaacgtggtgattaccgtcaagcaccctgaggatgaagagcatgacgagccgtggcgtgaagtgattgtcgtcggcgtgcccggcgaccgtacggtggatatgaagcgactggaagcccagttcgctcccgccgagcttgaggaggccactgaagaagacctgaagcagcaccccgaactggtgccaggctacatcggaccgatggtgcttggcccgcaggccgaggctgctggcgtgaagaacccggttcgctacctggtcgacgcgcacgtggtcaagggttccgcttggttcactggtgccgatgagaacgaggtcgactactacaacctggtgtacggccgtgacttcaaggccgacggcgtggtggaagccgttgaggttcgccacggcgacatgagcccggacggttccggtccgttgagcttcgagcgtggtgtggaaatcggccaggtgttccagctgggtctcaagtactccaaggcactggacctgaaggtgctcgaccagaacggcaaggccgtgccggtgtggatgggctgctatggcatcggtgtttcccgcgtgctggcctgcatcgccgaaacacaccacgacgaagccggcttggcttggccgtccgtgattgccccggctgccgtgcacgtggtggccaccggcaaggacgctgcggcgtttgaaggtgccgagaagctggtcgccgagcttgaggccaagggccttgaggttatttacgatgaccgcaagaaggtgtctccgggcgtcaagttcaaggatgccgagctgatcggcgtgccgctggtcgccgtggtcggccgcgattacgtcaacgacggcaccatcgaactgcgcgaccgcaacggcgaaaacaaggtcgccgtgcccgccgccgaagccgccgacgcgctcgccgagcgcttcgccgccctcagctgagtcccacttactcagcctcggcgttaatcgcatcaagcgccattctgcccagtcgcagaatggcgctttgttgtggataaccgaaacttatccacattcttaaaatttcaactgcgtcacagtatccacatttgccagttgcccttgtgcacttcaaacgtcatgcctcacagtggaggtaccgctggggcgtgcaagccggcaatgaagccggagacaggctccggcggtccacatccaaacaacaggccagcaggccgaggaaaggaccgatcatggcaaatcaacaagcagcagtgaccgtcaccggctttgtggccggtgatccgacactaggcggaactgagagtttccgcgtgctgacattccgtatgggcagcacccgcagtcgactcaacccgactaccagacaatgggaggattacggaactgcatgggtgggcgtcaaagcgttccgtgctttggccgtgaacgccgccagttcggttcgccgcggtgaccgcatcattgtggtcggttcactcatcaccgagcagtggaccaatgagcaaggcgaaccgcgcagtagaaccgttctcgaagccaccaacattgggcatgacctgaccttcggcaccacgtcgctgatcaagccacagcgtgccggtaatggtaacggaggcaatggtggcaacggtaacggcaatgccaacggtgccgccgaaggtatggatggcggaaacgggcaacgagcatcgtcgccgtacgttaggccaatgcaatatggcgcgggcggtgccgcatccggtgtgggtatggacccgtatgcgacctcgtcggaatctggccccgtcgaatttggggtcacctccgattccggccaatcgccgtcgccatcaaccgagtcagcggctgcgtccatggccgatgccgtcatgtcgcaaccggacgctggcgctaatcagccacagtccgcagcccaacaaacctatgtcgacggtttcgccgaatcttccgatcccagcgaatccgaattctgagtgccaaccatacatcatgaaaaaccgctgtgttcgcctgtaatcgaggcaagcacagcggttttctcttacataacggggattaccaaatgctcacacggtccttgggcgcgagccacatggcgtcgccttcggtcacgccaaaggcatcgtagaagaggtccacgttgctggcgatgccgttggtgcggaattcggccggagaatgcgggtcgatctgcaggtactgttcggccagctcgtcgcggttcttggtgcgccagatggaggcgtagctcaggaagaagcgctgcaggccggtgaatccgtccatttcgggggcggtatcgagcagtgccttgatggcggcgggggagccgtcttcttcggcgtcgggcttacctgccgccttgccgagcgcgaatgcatacgccttgagcgcgatgttcacgccgcccaaatcgccgatgttctcgccgatggtcagcgcgccgttcacgtgcggcgccttatcaggctcgtcagcgtacttctcgaccagctgcagcggcacaaagctgttgtactgggcgatcaatgcgccggtacgggcctcgaagttcttgcgatcctcgtcggtccaccagttgttgagcttgccgtcgccgtcgtactgcgaaccctgatcgtcgaagccatggccgatctcgtggccgatcactgcgccgatgccgccgtagttcgccgcatcctcggccttcgggtcgaagaacgggggctgcagaatcgcggccgggaacacgatgacgttcatgctcggctcgtagtaggcgttcaccgtctgcggattcatcagccattcgtccttgtcgaccgccttgccgaccttggccagctggtagccggtctcgtacaggttcgcggccttggcgttctcggcgggcagcgcatccgcggagacactcagtgccgagtaatcgcgccagtggttggtgtagccgatctttggcgtgaacttggagatcttctccagagccttggccttggtgtcttcgcccagccaatcggaattggcgatggacacgcggtaggcgtcaatcagattggcgaccagctcttccatgcggcgtttcgagctttcggggaagtgcaggcgcacatactcgcggcccacatcttcaccgcagacgccgttgaccaggctcaccgcgcgcttccaacgatcgcgctgcttcttggcaccggagagcaccttgccgtagaagtcaaagttggtggtgtcgaagtcgcgagacagggaggaggcgaagcccagaatcatgtgaacacgggcccacagcttaaggtcggccagatcggcctcggcccagaacgcatcaagaccagtgaggaagctcggctcgtgcacaatgatgcgcgcgaacacagacttgaaatcgatcgactgagccttggcagcctcggtggcgtcataggcggtctgccaggcgtcgatccaggaagcgagatcgaagttcttcagcgtggcagccaaatcggcgtaatcggtggggttgtaggtcttcaccgaatcgcgcgtggccacattgtcccaatgattggcggcgatcttggtttccacggcaaggaagtggcgggccatatcaagcgcggcttcgctgggaaccgtggtgggagcattgctctcgtcatcgccggtgttggccggcagttcatcgccaccgttggattcggcggcgggcgcgtacccggcgttcaccagctgggtggcgaccatcgccacgtatgcttcgcgcacggggacgtagtggtcctcacgatagtaggcttcgtccggcaggcaaaggccggcctgctcaaggtgggcgatattgcggtccgggtcgccggggtcgccgtaaacggccaagccgaacaggtcggggccgccggctgggttgatggtgccgagcacgcgcgtgagagcggccttgtcgatggcggaatcgatgaggtcaagctcatcgcggatcgggtcaaggccggcggcctcgatggcgtcggtgttcaggaacgaatgatacagagcctgcgatttggtggccgggcagtcgtcggcgtcgaggatgtcgcgcacttggttttcggcgtcttcggcgagcttgtcgaaggagccgtagcgcgaacgatcgtcgggtaggcggtaggtgtcgatccatggaccattcacgtagcggaacaggtcattggtcggcttgatgacggaggagaacgatgccgggtcgatgcccgacgtcagcgtttcggtttcgttggtcatggccctaagcctaatcgcggcgggggagaagcgttggtgatgcagatattgcgttatgggtattgcgctgtcagtgaactagacggattgcctaactgtagtgatggttcaaattaggtaacttgcctaacatggtatgtggaacctgaatatggaccttgagttaaggagttacgatgagcaatccaaacgagggtcagtggaatggccagacgggccagcccaaccagagccagccgagccagccgaatccggcgggccgacctggccaaccgcagtatggcgcgtatgacagcaatcatggcggccaatatcctccgcaaggtgcgccgggagcgcaagacactcagaatcagcaggcgcagaacggccagccacaaggcggaccgaaccagaacccgtactacggcccgtacgcctacaatccgaactatggcccgaacggccagccagcatggggtccggacggtcggcggtatcaggcggacggccaatcgaatagccaagcggacgggcagccgaatggtccatggggcgatcaaagtcaacccggctggcagcagaccaactggtatgtcggcaatttcagtccattccacctgatcgaggaatggctgccggaaaaggccaagaccaagattcgcatcatttacggcgtggtgggcgtggctgccatcgccttgggcgctgcgctgttgttggtgccgaacaagacgctggctttggccgcattgttgctcggcgtgtatttcgtgatttccggcgtggtgcgcatcgtcagcgctctcgtggagccgggtctgccgggcggctggcgtgtgctggacgtgttcgtcggcattctgctgaccttcggaggcgtcgtagtcgtacgaaactacggtatgaccggtcagaccttggcattactcatcaccctgatggtcggtttcggttggattatggaaggcgtgatggctctagtcgaatcatggcgcatcccgcgctccggctgggccatcgcctatgccatcatctcgattatcgccggcttcgtggtgctgatgagcccgctgagctccgccgtattcatgattatcttcggcggatgtgccatggtggtgatggggattacttcggtgattcgcgcgttcactttcggcaagcgtcgcaagtaatctcgcgctccagacaatcaatctccggacaatcaatccaaagcgcccgtgcaggttatgtatctgccgggcgctttttctcggccttggccgttgataggctactagcggaccctaggcagaccacgggtgatgctctggcggttgaccccgggctgggctagagttgagaacaagtctcaacaaggtagaaagaacctcatgatcgaattgaagacccctcgtgaaatcgaggaaatgaagccggccggccgtttcgtcggcggcattctgaaggaactgcaggagaccaccaaggtgggcaccaatctgctcgaaatcgacgagttcgtccacaagaagatcgtggaccgcaagggcgccgaatcctgctatgttgactacgctcctgacttcggcaccggcccgttcgcccactacatctgcacctccgtcaacgacgccgtgctgcacggtgtgccgtacgattacagcctgaaggacggcgacctcgtctccctcgatctcgccatctccgtggatggctgggtggccgattccgccgtcagcttcgtggtcggcaaagacccggaccccgaagacctgcgcatcatcaagtgcactgaggaagcgctcgccgccgccatcgacgtggccaagcccggcaaccgtctcggcgacatctccaacaccattggcgacatcgcgcgcgaatacggctacccgatcaacctcgagttcggcggtcacggcgtgggccacatcatgcacggcgacccgcacgtaccgaacgacggccgcgcccaccacggctacaagctgcgcgaaggcctggtcatcgccatcgaaccatggttcctcaagaccaccgacgagatcttccaggatccgaaggacggctggaccctgcgtgcctccgacggctcgcgcggtgcccactccgagcacaccatcgccatcaccgagaacggcccgatcatcttcaccgatcgcaccaacctctgattggcgtttggcgtatggcgggtgcctgattggcctgtgatgggcgatcggcatctcatcaaccgtctatatgtttgcggttttcccgcgaattcgagacgtaacaagccgaagtgcgtttgctttgatagcatgagcgcacttcggctttcgtgtatcgaccggtgtctgccggcggtaacacagaagacataaagtaccgaacactagcgttcgcgaacgcgtgaacgttaatgtttggggtaagtggttcatgaagaggaaggtgcgcgaatggcaacggcacaacttgatgtcgattcgaacaagttcaacctgcccgtggtgaaggctagtgcagggccggatggcatcgtcgtttccaagctgcgcaatgacggctgggtaacgctcgaccccggattcctcaccaccgcacagtgcgaatcgaaaatcacctacatcgacggcaagcattcgatcctgcgctaccgtggctaccccatcgagcagttgtgcgagaactccgattttctggaagtggcgtggctgctgcgccacggcgagctgccgagcagggctgagtatgagcagttctgcgcggacatcaaccacaagacgatggttggcgaagacttccgtaccttcatgggttcgttcccgcgctccgctcatccgatgagcgtgcttgcctccgccatcaatgcgctggccacgttctatccggacaccaccgatatctccgacaccgaccagctcgatgaggccgccaagatcatcatggccaaggcccgcacgattgtgtcgtacatcttccgccgtcgtcgcgatgagccgatgctgtaccccgattacgcgcgcggctatgtagacgacttcctgcgcatgtgcttcgctgtgccgtacgagccgttcgaatctgacccgttgtatgtgcatgctttgggtcgtttgctgattattcatgccgatcacgagcagaactgctcgacctcggtggtgcgtatcgccggttccgcccacgctaacctgtattcggcggtggccgctggcgtcaatgccttgtccggaccgttgcacggtggcgcgaatgaggccgtactacgccaattgaaggcgattcgtgattccggtaagtctgtggccgagttcgtgcgtgatgccaaggaggatggccagaagatttccggccttggccaccgtgtatacaagtcgtatgatccgcgtgcggcgattgccaagaagtatcttgagaagatcatggagcgcgaggatacgcagaaactgccgtccgacgagcgtgcgttgttcgatgtggccaccgagcttgaggatattgcgttgaacgacgagtatttcgtatcgcgcaacctgtatccgaacgtcgatttctacacgggcttgatttatcgggcgatcggcttcgatccggccatgttcaccacgctgttcgcactgggccgcattcccggttggattgcgcagtaccgtgagatgctggccgacccgaacaccaagatcggccgcccacgccaggtctacaccggtccggtcgagcgcgatttcatgccgatggacgagcggtgattattggtttgagaaagcgcttcgctggagattccagtgaagcgctttctatatgtacagcgcaaaccagctatgctgcgacggccgcataagaacgagcagggctagttctgaaattgaaataatgtgtgcggtatcgaagcgtaccgagggaaggcgtacggaagtacgtcgaccgaggagcaacgaagataacgctccattatttcaatttcagttcttgtgcagcttggcgttgagctcaattcccaccttgcggtagcgggcttcgatacgtccattcaccgagttgcggatgaacaggatgttgtctttgccggagagctcagcacccttgacgacttcgagcggctcgccggctgcggccttggccttgtcccagatgctgatcttggtgccggcggtgatgtacagaccggcttcgacggtgcagttatcgccgagggagatgccgataccggcgttggcgccgagcagcgagtgctcgccgatggagttgcgcagcttgccgccgccggagagggtgcccatgatggaggcaccgccgccgatatcggaaccgtcgcccacgaccacaccttgcgaaacgcggccttcgaccatggagacgccgagcgtgccggcattgaagttcacgaatccggcgtgcatcacggtggtgccggaagacaagtaagcgccgaggcgcacgcggtcggcgtcgccgatacgcacgccggtgggcactacgtaatcgatcatgcgcgggaatttatccacaccgaacacgttgacggtggtggcaggagctgcggcaggcagtccggcctgagcagcgaaagcgagagcggcttcggtggaggcgcgttcgacatcggccttgcgtagtgtgaagtcctcaacggcgaaaggaccgtagttggtccacaccacattggcgagttgggcgaagatgccgtcaaggttcagcgtgttcggcttggccatgcgcatgctcatcagatggagtttcaggtaagcgtccgcggcgttgctgatcggctcgtccaactggctgacgacgaataccggcacgcggcggatgccacgggcgtcggcttcatcgtgagccagagtgccgaaattgtggtttggacgatcggcctcggccggtgcctcaccgagattcagttcggggtaccagacgtctagggtggtgccggcggcgtctacgctggccagaccccatccccatgcggtacgctcttcgctcatagttgctccttacatatcgttgcgtttgcgttgcatgtgcatcgcggcatgtgatggttccaccttagcgtcaagtacggctaggcgggggccatagttcgtggaatggcttgaaatcgagttgttcggtaaaaaattaccgaacgtgattggcgatgggatgataggttctccggtgaaattcgctggtgaacaactcggcaaggaggtgtgcgatgtgatgctgcatcattcgggagcataggctgtggccatgcgacgcccggcatcatagagtttgcgcttgagcgaatcgggctcaagaatcactacgcggccatcccaggaatactgcaatgcccaccagaacacggcgcgttcgggagcatcgacgatgacttcgaactgtgtgccgtccggcgaatgtttgatctgagggtcgtcgaaccattcgaacacattgttgagcatggattcgtctcgtacggccatgcggatgcgaatcggggcatcggctacgggatacgggcggtgacgcatgaagttcactgcgtcaaaatcagccggcgctggtttttccagtggaactgtgccgttcctgcctttggcgctgacgttggcgattcggttgaccacgaaaatgcggagattatcctcgccatgtagatggcagatgaggtaataccgtccgttcttgtacaccatctggtaagggtcggcggtgtaggtaattcgacctgcgcccgtacggcttttatgcggtatcagggtgccgtccgggccgtaatcacggtattggaaggttacgccgtggccttcttcaatggcctgattcagttggtcgatggtggataggaactcgccgttgatatgcgtgtaggtggccacgtgatcaaggtaacctactgcttgcccagcggcacctgcgagttcgcggattttaccgatgagatcgtccatggtgtcgaggctgatgcgagacaaggtgaggctgtcgagtagcagtcgcatttcggcggtggataggaatgcgtcaagataccagccgggttgtggattcttgcattcgatgccggcaaggtcgctttcggtgagatgcccgatgtgtctgccgagaaattccgtggcggtaagctttttgagctgatttcgtatggttttctcggtcggcagctcgcttggatcttccagctggtgtttacgggcaagttcatcgagtatttgccgcacggtcaggccatgtccaaagtagctgtgacgccacagcacctcgaagatttcgagggtggtgttccctgcataggatttgcgttgcgccggcttgtctgcatccatacattaaggctaccgcgcgcttcgtctaggatggaagtgttgggctgaaatgcattcgctggaaaggaggctcgcccatgagcaaagggtatggtgtatttggccatgttcccgataatgcggatgacgatgacctcctgccttatgaggatgatgattccggcgtttcctggggccatgcgttgcgccgtcgcaatccttggaaaaggggaggcgacgaaggtgccgattacgacgatgatcggtatggcgcagatgacacagattgcactaatgaggacaggggcctctttgccggcaagagcagcggtataggcggtatctctggcgaggcaggtggaatgcttgggggcacaggcgctgccggcagtagagccgtaacgtttggcggaacggacagtttgtccgccgccgatgcggtgatgccctatcgtttcaggcaaggacgttccgtatggttcgacgatgaggacgaaggccatttcgccgggtctgcgaagcgtgccgaagcccatgccgtccctatccttgcgttacgcaacgatgtggaatcgtcatcgtcgaataccgtgctcgctcgtgcccgtagcattgcgcgcaaagcggccaccatggttatcaatccggtatacagcgaaaatcatcgaaccgggtatgccgagcttgacggtattctacgtggcaccaccagcccatcgagtaggtatcgtaccagcgtgcaattcgacctcgatacgggagaagccgtcggtggcaagtgctcatgcccggcttacggccgtggctatggcatgtgcaagcacatgattgcgctcgccttcatattctgcgatgatccgcagcgttttgaagggtaccgtgccggggctgtgaggccgtctcggacgctgatcgactatatggagcacgtcgataggcaagatgttcaagccaaagcgcgtcgccgcaatgcgctcatgcgccgattcgatactgcaaaaagacgaaatggcgcaggtggacgacgtacgaatagcggatacggctctcgtgccggcacccgaggcggcgggtatcagggcgatagtgagactgtgggcttggggcaggtgcagcttgttccgatattgagtttcatcgatggcgtgtggagcgtggagttcaagatcggatcgacttccaatgggtccagctatgtactgaaatcgattccgcaatttgtgcttaccatggcgaacggcgactatacggattatgggcagaagcttgcctttacccatacgccggatatgttcgacgatgattcgcgcccactgctgggcttccttgacgacgcgatggccgtgcgtcgtgcggccgagcagcaggaccggtattacgggcatatcgccatcgatcgtcacctgacactttcagcaccggaagtggcccggttgctgtccgtacgtgagggcagaggcgtacagctcgtgttgaacacatggttctccgggcagcctgcatcggtgccggttgatggtggcgagccagattttcttatgcgcattgcgcggcgtgatttcaatacgtatggtccggatgccggatacctgcttgccggagtgccggcggtggaaaccgtgattgatggtggcaaggatgtatggctgttgctcgcctccactaatccggccggtgcggtatccgccatgatggcgggctctcagcgtaaaagcgcagcgggatgccgattcgtccgttgcccgaaacgattgattccgttgcgaggactattgggagacctgtttgaacccgatggcgaggggcaggtcattgccggcgatgacatcgccctgttcgcacgcacgctattgcctcagctggttggtgccggactgttggaggccagtgagattcctcgcgagctggctgaattaagtcctacggaatgcagcctccagttttatctggatcgtgatgagcatggtgtgcaatgcgaggtcaaggcacactacggcgatgccattgtcccgttgctacccgatggcccgacggtgcatgctagggatgagcgttccatccccttgtctcggggcgtgattgggcgtgatttcgacgctgagcatcttgcgattgatgtagtgcgtgaattctttaccatgcctgaccagcgcaagcgcgttgcggccgccactcatcagacggtgaatgggttccgaacgccggccgcgcgaaagaccgccaaacaattcgtgtctgatgcggccactatcgatcgcgatgacaccacgcagattgttcgtctttttgacgagggattgcccgcactgaaggaagtaggggaggtcttcaccacaccggcttttgaccggctgatcgcgcccaagccgccaagcgtcaaagtcggattgtccatcaaaggcaatttggtggagatatcacccctcgctgatgaagtaccgccggacgaagtgggtgccttgctgtcttcgtatcgtcggcgtcaacgattccatcagttgaaggacggcacgctggtcaaactcagcggcgcgaatctcagcacgttggaccgattggccagcgaccttgatctgagcgagcagcagctcaactccgggctgatcgagttgccgggcggtcgagcattcctactggatggtgagctgccggatgacggctccgatgtagtcaaggacgcttcgttcaccgaatacatcgacgatctcaagatcatcgaccctaagtcgtatgaagtgccggatagtctcaagcatattctgcgcccttatcaggtcgaaggcttccaatggctgaacacgttgtgcgacaagggttttggcggcattttggccgacgagatgggtttgggcaaatccgtgcagcttatcgccctgttgctgtcgcgataccacaacgaatctagtggcatgccgaccgctcaaggcatggatgccggtaatgctgttaatagtgaatcagccgtaaccggtcatattactttcgattccgaagatggcgggccgcatccatcattgatcgtgtgcccggcgtccttggtgtacaactggggtgccgaattcgccaagttcgccccgagcttcaacgccgtggtggtggccggtaccaaagccgagcgccgcaccgccatcggccgcgcgttccgggcggatgaccccaccgtgctcatcacctcatacgacctgctgcgccgggatgtcgatgattacaccgccaatgagcaacgtttcaatgtcatggcgctggatgaagcccagtacatcaagaatcacaccacgaagatagccaaagcggtcaaggccgtggccgccgaccatcgtttcgccttgaccggcacgccgatcgagaaccgactctccgaactgtggagcatcttcgacttcctgatgccgggactattgggctcatacaagcgattccatgagcgctacgagttgcccatctccaacgcccgggctgcagatggcagcacggccgaaggtcgggccgccgcacaggtcaatcctgaggccgcccgggtgtctcgccaattgcagtcgttggtgggcgtgttcatcaagcgcaggttgaagtcccaagtgctgaccgatttgccggacaagttggagaccacgctgaccgtgcagcttgccggcgaacagcgcaaactgtatgcggcccacgagcagcggctcagaatgcagctcgaacacagcgaagaagccgatttcaacacgtcgaagattcgcatcctcgccgagctgaccaagttgcgccagatctgctgtgatccaaggctgctgtatgccgatgccaaggatcagtcggccaagcttgccgccatcaccgaactggtggaaacctgcgtgaatgaaggcaagaaggcgctgatcttctcccagttcaccagcttccttgatctgatcgccgaacgtttcgacgcgcaaggactacgctactacaccatcaccggatccacgcctaaaaagaagcgtctcgaactcgtcgaccagttcaatgcggacgatacgcccgccttcctgatttcattgaaggccggcaacaccggactgaacctgaccggtgccagcgtggtcatccacgccgatccatggtggaacgctgccgcgcaggatcaggccaccgaccgagcacatcgtatcggccagaccgaagacgtcaacgtgtatcaggtggtggccaaggacaccatcgaagaacgcatcttggagcttcagcataccaagagcgagctcgcccgccagttcaccgatgcttccttgcttgccgacgaagccggcaccggcgccagcgccctcaccgaagctcccgcctccatcgccaccctcaccaaggacgatctcctcaatctgctgggatgagaagatcctgctcggtgctcttgagcttgggaggcggaaacagtctaggctttgtggacccgttcgctaagccgagaccggagtcgatagcggtgtggcatggtgcgtgcgtggggagcgtgattcagttgttggctgaggcgattcggacgctgtcgttttgtgctttgttttgccgttgaccaattgaaatgctcgttggtaggagacccccaataaagctccgatttgtcgatacgtgagtccctcgttgcgtagggcccgtgcggcgagtcgggattcggcagccgcttgtgcgttggctttttttgctatttcgcgctgccggaacatttctgttacgtgttgtttggcttgtttcggcaacacaaacgtcaccttgagctccggattgtcgtcgtcgttcatgacagtgatgagatctttagccattggctcgatatcgtcaagtcctttggcctgggtcgaccgttcgatagctggtacctgaacgtaccaatatcggccatcgggttgcacaagcacgtcatagttgctcattgccaccacccctttccgagtttctgctcgctctcgttgatgatatccagcgtggttcgttctgagacttcattatggcgggggatgggtatcctcaacccgtccaggcagtaaacctcatgtctgctgccttgccgtaacaaatagaaatcgagccctcgctgctttgccgcttgccgaagtttcttgatgatgagttttcttcgtgtcatcataactctcaatctcgcactagacaaaatgcgtatgccgaattgccgggtgggagttgtgggtaaacgtagagatgttcattggtccttctttctgttgtctgacgcgtcgttgcgtgcgggtgcatctgacggtatgggatgaggtttctgattggcaagctgaacgggggtatgtggttctagcttccgagttatccacattgataaagtgcttttttaaagtgactttcccgtgttggtcgtggatgctgcgagcaaggcaagaacggtcgatcacgtcgcgatgtgtgtgggtgaatggtgaaagtgattttcgatatttttatattgatattcgatatattatgatggtgacatacggggcagtgcaggttcatccattgatattggattaaggagcatagccatgaacgctggtatcgcattcatctctcgcaaatctcgcaaagcagacgtcgcttggcgctataccattgcacttggtcggtggcgggggagtcggcgttatgttcgacgtcagtgccgtcattggcagatggtgcaaccgccacgaacacaggggtctgatcgttggccagaatcgccttcaattcctcgtccgtgtatttcttgacaccgcctttgaacagatccggtcggccggcatgatgcacttcgagcacctgccgcagcagttcgtcgatttggggaatatcggccgccgtggccctacgaatcatcatgtcatccatttgattcggtctaatcgtgcagtctcgaccggcagatgatcattgcccgcgataagagacacggacgggcaagatgggtgattgttcgttcaggctttcatcctcgccgcaacgtcacggtagtctggagtgcgtgaatcgcaagaaacagccagtggagaagtatgagcggggcacccgttcgtacacgatgtcgcatattcgtggcaaagacaccaaaatcgaggtgctggtacgcagctatctgtttcgcaagggtttgcgattccgcaagaacgacaagcgttaccccggccacccggatgtagtactgccgaaataccacaccatcgtgttcatcaacggctgtttctggcacatgcatgaaggctgttccaaacattcgatgccgaaatcgaatgtggaattctggcagacgaagctactgcgcaatcacaatcgagacatcgcgcagcgggctgaactggaggccgccggctggcgtgtaattaccgtatgggagtgcgaattaacgaaagccgtgcgtgacgaacgcctcgcacggttgtatgagcagattgttgaaggagatgcagattcagcggaataatttcagctcccctctggaggggagctgaaatcagacctcaaacgggaacttcaggccccaacggtcgcgaatcgcatccatcagctccatgatgcggatggtgtcggcgtgcggcatcgcctcgcattcgatcttgccatccagcagcgcgttggctgcatcggccacctcatactcataaccggtcaactgcgacggcaccgcaacactgcgcacgggcttgtgatcgttgttgtagatatcgatggactcgggattgttgatattggtgaccaccaaatacccttcggtgccccacacgtagccgccgcgatcggaggaaaccagcatcgaactggtggacacggccatcgtgccatcatcgtaatacaacgtggtggaattctgtgcatccacaccggtttcggcggccatcatcgacgtatcgaaatgatccagcgtgcggccatggtcggcaccgatcgccatatccaggaagttcagcggatacacgcccacatcgagcagcgcgccaccggcacaggccggatcggtcatacgtgccttgccggacaccggatagcacaggttggcgctcgccgctttcacctcgccgatctcgccggactcgataacttcgttgatgagcttgcggctgggcatgtagcgcgtccagatggcctccgtgcacagcatgccggtttcctcggccacggccagcgcctcacgtgcttgcccggcgttcgcggtgaacgacttctccaccagcacgttcttgccggctttcatacacaggatcgcctgttcggcgtgcagactgtgcggggtggcgatatacaccagatccacatccgggtccgccgtcaactcctcatacgatccataagccttgtcaaaatgccattggtcggcaaaagcctgcgcgcgcgtaatatcacgggccgctaccgcatacgggtgaatccatgaggaatacagtgaaccttcagccatctgggtcagggtgtcggccatggtgtgagctatgcggcccgcacccagaatcgcgacgttgatcttttcgccgctggcctcgaactcggcgcgtttgccattgaatcgactcattattcctccttgaatacgggttggtacactcaatcggcctacagtgattatagaagaagaaaccttgtcccgtgaggcggatagaaccgaaatatggaaaacgaagcagcgcagcagccccaatctccggccgcgtctccagtcatgtcccgccgagcgcgtgaggccaatcccttccgtgccatggtattcggcgaacaagcagacaagatgatcgcccaaggtatcagcgtcatcaaattaagccttggcgagcccgatttcggcgcgccgcccgccgtacgcgacgccatgcgcgaacagtacgacggccgggccctgccgtacaccgccgccatgggcctacctgaactgcgccaagccatcgccgacttctaccgcgagcgtcatgaccttgacatcgaccccaagcgtatctgcgtgaccgccggcggttcggccgccctgctgttggccaccgcgctgaccgtggaccccggtgacgatgtgattgtggccgacccctcctacccgtgcaaccgcgaacttgtgcgctcctttgaggggcgggtcatcgacgttccgacctcggccgccacccgcttccacctgaccgccgacctgtgcagccagtactggacaagcaagaccaaggccgtaatgatcacgtcgccgtccaaccccaccggcaccaccatcgacttcaacgtattggacgaggtgtgcaagctggccgccagccgcggcgcatggcgcatcgtggacgaaacctaccttgatttggccgaccgtgagccggacggcaccgaagtcaagtccgtactggcctgcgatcccggtgccatcgtgtgcaacagcttctccaagttcttcggcatgaccggctggcgtctcggctgggctattctgcccgacgaccccaccgtgctggaagcggtcgacgacctggccaccaactactacctgtgcgcccacacgcccacccagcatgcggcgctcgcctgttttacgccggagagtttggccgaatgtgaagctcgtcgtcaggaattgcttgcccgtcgccgcattgtgattgacgggctcaagcgcatcggtttgccggttgaggtggagccgaatggcgcgttctacgcctacttcaacatctcccgtactggtctggatgcctggacgttctgcgaacgcgcgctggatgaagcccatgtggctctgactcctggccgcgacttcggtgcggccacagcggatacgcatgtgcgcctgagctatgccgcctcacgtgaggccctgaccgaggggctggaacgtctcggaacgttcgtcgaatcgttgtgaacggcgcggcatccggtgtgattgttgtacggtagtcgagtttgtgtgatgttcggctggcctcgcggtgttggttgccggccgaacgactcgccatggtggcgcacggctggctgattgcgatggtcggcccgttgttcggccatcacgggttgggtaaggtcaggaatagggatcatggtcaatctgcgttcgcgcaccacgcgacttggtgtgcttgatatcggttcgaacactatccacatgcttatcgtcgacgccgctcccggcgctcgccctgaccccgaggccagcaccaaatccacagtgcgcctgatgaagtatttaaaggatgacggctcaatcaagaagtccggcatcgaggcgattctggaagccgtgtcccagtgtatgcggctggccgaggaatacgaaatcacccaaccgccacggtagccaacaacgccgcatgatcggagccctcgactttgaccaccttgcattgcccggccttcatgccctgatcaagcaccacgtggtcaataccggcgaacatcggcatatacacgcggttcgtaggccacgaaaacgtaaacccatgtccggattcacgtgcggcatccacgaaccgggagccaagaaaatcacggaatggcgtgtgatcgtaagtggcattgaaatcgcccatgaaaatataccgtgtatccgtatgcccgcgcatcggacccaactcatccagcgatcgcttccactgccgccaatagccgggtacgggagcggtggtgtgcacggatacgaatcgaatctgctgaccacccatatccaccgtgccgccgggcatgaatgaggcgctggaattcacgtcatcgtcggccggatcggcaagtggcgtggccgaccagaggccgttaccgaatacgccgtcagacgatgagacctgcgcatacggcagatagtgctcaatgccagcctcgttgagttttttgacgaaatcctcggtggtctcctgcaaagcgagcacttcgacgcgctgatcgcggactagttcgacgatggcttgtgggtcggcctgccccttgtatacattgaaggtcatgacgcgcgcgtaggcatcgctggtgttgggggaggccgcagccacggcgttctgcgcggcttgggggagcgggtcggtcgagtagaagaacggatattgccaatagccattgcatgcgattgcggcgatggcgattagtgcggcaaggatacgccgcgacacgatggccaacagtagggcaatcaggccaagcaacgtgaaccagggcgttgccgataccacaatcggcacaaatggcagttcctgtaaatcggcaggcagcgcgcgggcggcagtgccggcaagggcaagaagcgcgaacatcgtggcgagaaaaccaagcagacgatgccgtttgtgtggcttcacggcagacttggatactgggcgtgccgtggctttggcagagcgtggcttggcagcggcgcgagctcgtacgcttgcacctgtggtagtacttcgtgcctttgccatgctgccctttcctccggcttgtttactgttaccttgcttttcgtgcgatttgccactgtaccgtgtgcggcttgtctttcggtgtcttttcgccgtgcgcaagagcagttcgcaccaaaccagcacgaaaaccggccatgccttggtggcgggttctgccaggtagcttacacagactgccatgcgtcttatgtaggctgccacgcgaacatgatgcgactgggcgtgcggccgtgtacaatgaaacgtcgttgcccgagtagctcagtggatagagcaccgctctcctaaagcgggtgtcgtcggttcgaatccgatctcgggcacttggcttcggaaacatgacggtatctcagcctctattcatcggtgatgagccataggcattaggcatgtgtaaacgtataggttccaccatccatcatcccgtcatgtgaaactatgcaaagacatgtggggcttcacggttatcgtgagggtccatggctatcgaatacacggaagagaagcggtttactgtcgaacaggttgaggcgctgttcaagtcggttggttgggaatcggcgcagtggcccgaacggttgttcaaggcattgcagcattcggatacggtaatcagcgcatgggatggcggctatttggtcggcttggttcgcgtgctcgacgatacgggagggggcgaaagtggcggagtgtgctgatcgggggcaacgtacgtagtcattgacggttatcccgtagtaatgttcacgatacgaccccttgtccatacagtgaaaataacggctggcgtccgacgttgctgcgctatgactagagaccatgagtgaagacaaacagtatgacttctatgtggccggtccgttctttgatcctgaacaaacgtcaagtatggaacgtttggaaaagatattggaagaccatggcaaggtactgttcaagccgcggtttgtcagccagatcgaagaagtcggccctgaaggatgttttgcggatgatatccatggcattaatgctgctaaagccgtggtcgccaatcttatggacgaggacccgggcacgatgttcgaaatcggatatgcgcatgcgctgggaatcccggtgtacggctatttcgaaaaccttacaccaatggatcgtgtcaatctgatgattgcgcaagcggtcgaactggtgttcgccggtcctgatgatgtggcgaaatacttggaaaccggcgaacatacggaagtcgattacattcagttctaagcagctctaacaggttctcagcaaacaggggtggcggcgttctcgtacatagtcacgtacgggacgccgcagtggtatagggatattccaacaagcggcataatggagtcgtgggaaaactagacggattgccggggccatttggtctggacaatccgttgtttcgcgcgtgttttgtagcatccgtggagttacatggggagtatgactgaaaacatcgctgataaggccataaacgatactcgtatcgtcaagcagttcaccaatcccgtcaaggagccgattgacagcgacatcaacctgttcgatttgctcgatgagcgagccaagcgcgatcccgatggcgccatgatcgaatataaaactgaggatggcacctggcagccgtacagcgcccaggtcttccgcgacatggtcatcgatctggccaaaggcctgattggtctgggcgtcaacaagggcgactccgtggccatcgtgtctcgcacgcgttgggagtggaccgctctggatatggcgatcatgtccatcggcgcactcaccgtgccggtatatgagaccaactccgccagccaggtcagctggattttcaacgattccaaggtcacgctcgccatcgccgaggatgacggtcagcgcgacaagattgaatccgtgcgcagcgaggtgcccaccctgcgcaacgtgttcgtcatcgaagcaggcggcctgaacgccatcaagacctatggcgaaagcgtcaccgatgccgaattctgggaatacaagagcgcctcccacggcgacgaccgcgccaccatcgtttacacgtccggctccaccggcaccccgaaaggcgtggagctgacccaccgcaacttcgccttcctggtgttttccgcgctgcagtacatgccgcgcgccggcgcatggcccaaccgccgtctgctgctgttcctgccgttgagccacgtgttcgcccgattcatggaattcttcagcttcggcggcacgatttcgctggccctgagctccaatatgaagaccatggtcaaggacttcgagaccttcggccccacgctgctgcttgccgtgccgcgtgtgtacgaaaaggtctacaacgccgcctcccagcgtgccggcagcggttttgcgggcaagatgttcatgcgcgccgccgaaaacgcgcgcgaatggtccaaggccgagcagaagggcgagaagctgccgcttcccggtcgtattgctcacgctttctacgagcaggtggtgtacaagaagattcgtaccatctttggcccgaacgccgactttgccatcaccggtggagccccgatggattccgagctctctcacttcttcaacggcattggcatgccggtgctggaaggctacggcatgacggaaacctgtggtccggtgtgcgtgagcttgccggaagacaatcgcatcggcaccatcggcatgccgatgtgcggcatcaccgccggcatcgccgaggatggtgagctggtagtcaagggaccgctggtgtgcaagggataccacaacaaccctgaggtcactacccagcagatcactgatggttggctgcataccggtgatttgggtgatatttccgaagacggattcatttccatcactggccgtaagaaggacctcatcatcaccgctggcggcaagaacgtgtcgcctggccttctggaggcttctgtgatgacctctccggtggtcaaccagtgcttggttattggagacaagaagccgttcgtggctgccttggtc

SEQ ID NO: 1827 - DNA, 3959 bp, Unknown
  MAG_14  MAG No. k141_44933
ccgccccggagtatgacgtcttggccactggatcggcgcttggcatcgccatgcatcttgggttttcattcccggttggcaaggtcggtagactcaagctgtatcctatgtcttttgttgaattcctgtatgcgtgcaaacagtatgccttggccgaaatgcttgagcccaaggattttccgctaattaacgtaatgcatgacagggtcatgacttggctgcggtatttcatgtatacaggaggcatgccggagatcgttgaagcgttcgccagtactctgccgaatcctgacttcacggcggttcgtaaattgcagaatagtctggtctccgattatcgtgacgatttctccaaacatgttgatatgcgtgatagtcccgccgtcaccacgcttcgtctcaatcaggtatgggattcaattccttcccagttggcgaaagagaacaagaagttcgtatacggcgtggtgcgagctggtggacgtggcaaggattttgagagtgccatacagtggcttgtcgatgcgtcgttggcgttgcgcgtgaatcgggtgagtacgcctcttgaaccattggcggcatatgcagacggctctgcgtttaaactgtacagcctcgatgtggggctgctaggagcgttgggcggtctgaatgttcgtgtgttgctggaaggtgacgcactgtttcgagagttcaaaggttcgatcgccgaacaattcgtatgccagcaattgaccatgatgaacggccattcaccctattgctggtcggccgagaactccagtggtgagttggattttctgttcgaggggaatggcaaagcggtgcccgtggaagtgaaggaggggactcatcgacagaccaaatcgcttgtaatcatgcagaagaggcacggttatccgcttgcttatcgtttctctgctgaccggtatcgggatgtggggccgatccgagatgtgccgttgtacatggctggcatcgtttagagcgttatggcccgttgcgctgaacgatggaatgcgaccacaacggatcctgtacggaagtagtcggtctcgtacctgtggctggcgttgcgcgcatccgccatcgcgcaagcgggaacgatcgcattcccggtcacgaggattccgctggttccgcctccggggatcggccggttggatgaggttacgccgtcttgcgagccgtcgaacgatcagggccaaaggtaaagaaattcggtattcttgcaaggctttttgggttatcccgcgggcatgggtagactggcatgcggtaggagagatactcgctgaaaggtgcatgccagctcatgggaacgggtgaccagccggaaaagaccaacaactaaaccagcgattgctgtcggctggccggtaatagccgtaactgcagcggacgttccccgctgcaggtgacacgcatcgccggagggcagctgcaagtccaggtaccggtccgcggccaccccagtcagccgcgctgacaacccccggcatcatacgcggtgcgcacgtcgtgcactgctacgtgccgtccgccgggctacccgtccagcgaaagcgtaaccgggcagccagccagtatcgatacatgtcataacgtaaggaagtagcccatgccatcacacgcacgcacggtcaccaggacaacccatcgcgttcgcaacgcgctgctcgtcgtgctgctgttgctggtcgtgtgcgccgcggcggccggcttcagcggattcaaactgtacaagtcggcgatgagcgccaaagcgcacctcaacaatgtcgtcaacgcggccaaggtcatcaaggacggttccaccgacgacatggtcaaggcgctgtccgacgtgagctacatccagaaggaggcggccgccgccaagcaggatgtcagtggcggtctgtggacgctggcggagaagatgcccgtggtcggcggtgacgtgaagacggcgcgcaccgccatcggtaccatcgatgacttcgcgcagaccacgctgccccagctgggcaaggtcgtcaccacactgaccggtgccagcctctccagtggcgatgggcagctcaacatggagccgatcatcgccgcggcgcagcagcttgccacggtcgaccagtccgtgcaatcgcaggccaggacgatccaggatcttcccgacgccaaactcggcgtggtgaacaacgcgctgcagaacggcaagacgcagatggccgccctggcgcaggtgaccgaaaacctgagcggcatgctcaacatgctgccgaacttcctcggtgcgaacggcgcccgcaactacgtgctgctggcccagacgaattccgagatccgcggaaccggcggcctgatcggctcggccggttccttcagcgcggacaacggcaagatcgcggtgggggagttccacgcggatgccgagttcccctccaacgccgcgttggatgacgtcaaccaggacggtgacggcacgctgtacagcggactgtacttcggtcaagtcatccataatctttcgtccacgccggacttcccgcgcgtcgcgtccatggcccagaagttctggcaggcggctccgttcggcggatcgtccgacggcgtgatgtcgctcgaccccgtcgcgctgcaggcgatgatcggcgccaccggcgacgtgaccctgtccgacgggcgcgtgctcaacgggtcgaacaccgccgaattcctgctcaacggcgcctacaaggaactgacgccctccgctcaggaccagtacttcagcgagaccgccgcccaggcggtcgcccacctgttcagcgacatgaacacgcagaagctcatgaccgtcgccaagacgatgctccggatggccgagcagcggcacctgtacttctggtcgttccacgaggaggatcaggcggtgctgcgcagcgccggcgtcaccggcgagatcaccaacgacgcgaagaacccggtgaccggcgtctacttcaacgagatgcaggcctcgaagatggactggtacatccagcgcaagtcgacggtgaagaggaccggcgacaacacctaccacgttacgtattcgttcaccaacaccctgcagccgggcgaggccggatccctgccggaatacatcacggcgaacgccaagggaggcgtggcggtgaaccgcgtggtcatctacacgccggccggaggcgaggtcagcaacgtgtcggcgtcgaacggcagttccttcgcacaggtgcaggccaaggaccatatgacctacatggacgacatctccctggcgcctcaggacacggtgaccatcgaatacgacgtgaccaccgcggccggctcggccaacctcaaactggatcagacgccgaccatcggcgaccccgcgatcacgtacgagtattgatcggtattgatctgtgggtgtgatcttgggattgtgtgcccttatgaaagcgcgccgccaactcctctcggaaccggtgacgtgcttccggacgacgatgtccattacgatcacggcagatcgatagccgacaatatcgtcacgctggttcagctagttcgaattgcaggtggcggacggtgcccaagacgaaagattctcgtccggcgttcggccgccgtcgttggccgtgatgatactggagaccatgaagctcaggcggcggcagccaagggcgaagtcgagaaagaggtgacggcgtgacacttgaacagaggtcagatagcgcggcggcggagcagtgccgagcatgaccaacagtcaacggccgcaggcgattgaggtgcgcggggcgcgagtgcataacctcaagaacatcgacattgacattccgctgggtgaactggtgggcgtggccggcgtctccggttcgggaaagagctcgctggcgcttggcgtgctgtatgcggaaggttcgcggcgttacctggaagcgctgtccacgtacacgcgccgtcgcctgacccaggccagccgcgcc

SEQ ID NO: 1828 - DNA, 7016 bp, Unknown
  MAG_14  MAG No. k141_45740
ccgccatcttccacttcaagtggtcgaatcgcggaatcagccggcggatatcatgtgccgcgtcgttaccagtcaagccgggaaattcgttgcagacggtcagtcgaccagcgaattgatctggatgacatggtcgcgctgcggaccggtgccgatcgcggagatacggcagccgctcagctcttccaaacgcttgacgtaggcctggcaggtggcgggcagctcgtcgaaggagtggcagtcggagatgtcttcatcccagccgggcatggtctcgtaaatcggcttggcggcggcgaaagcggcctgatcggtcggcatatcgtcgtgacgttcgccgtccacgtcgtaggccacgcagatcggaatctccttcaggccggtgagcacgtcgagcttggtgagcacgatgtcggtcaggccattgacctgggaagcgtaacggttgacgaccgcatcgaaccagccgcaacgacgcgggcggccggtggtcacgccgaattcgtgaccctgctgacgcagccattcgccggactcgtccagcagttcggtggggaatgggccttcgcccacgcgggtgacgtaggccttggagacgccgattacgcgggtgatcttggtggggcccacgccggtgccggtgcaggcgccgccggcggtcgggttggaagaggtgacgaacgggtaggtgccgtggtccacgtcaagcatagtggcctgagcgccttcgaacagtacggtcttgccttcgtcaagcgccttgttgagaatcaggccggtgttggccacgtacggcttgaggcgttcgccgagcttcagcagctcctcggtggtctggtccacgtcgatcggacgacggttgtagagcttgaccagcatctggttcttctggtgcaggctggcctccaccttgtcgtgcagatggtcggcgttgaacaggtcatgcacgcggatgccgacacggttgatcttgtccgcgtaggctgggccgatgccacggccggtggtgccgatcttgtgcttgccaaggaagcgttcagtcaccttgtcgagtgtgcggtggtagggcgcgatgatgtgtgcggcctcgctcaccttgaggtgggaacaatcgatgccgcgggattccaagccgtcgatctcctcgaagagcacttccgggtccacgaccacgccgttgccgatcaccggggtcaggttcgggttgatgatgccggagggcagcaggtgcagggcgtacgactcgtcaccgaccaccacgctatggcccgcgttgttgccgccgttgaagcgcgcgacgtaatcgaccttggtgccgatcagatcggtagccttgcctttaccctcgtcgccccactgagcaccgataagaacaattccaggcatgatgcacctccgcattcgcacgattccgccggaaacagactaccttacaccctctactcggggcgcggccatctcacgcaatcgggcttctggtgtctttgccgcgcgttgcgcgaggcgggccgacaccaaggcgccgccacggcgaatgacagtttatttgggtgttatctgagtgctttgccggccgagccgagttgcttgcatgcctcagccacgcgggcggacatggattcctcggccttgcggccccaggaacgcggatcgtagaacttcttttcgcccacttcaccgtcgatcttgaggaccttgtcatagttctcgaacacatggtcggcaatcgggcgcgtgaacgagtattgcgtgtcggtgtcgatgttcatcttgatcacgccatggctcacggcttctgcaatctcttccggacgggagcccgaaccgccgtggaacaccaattcgaacggcttgccgttgggaaagtcgactatgccggcggcgctgggcagctcaccctcgaccaccgcgcgcgccacacgggactgaatatcaccgagcagggcgggacgcagcttgaccacgccgggcttgtaggagccgtgcacattaccgaacgtgaaggcggccatgtatcggccacgctcgcccaaaccaaggcgacgggccacttcaaggccatcggccggcgtggaatagaggcgttcgtcgattttggcggaatagccgtcttcctcgccgccgaccgcgccgatctcgatctccagcaccgtgtgcgcggcctgcgacttatcgagcagctcctcggcgatgtccagattttccttgagcgacacggtggagccgtcccacatatgcgactggaatgtgggctcctgaccatgcgccacctgatcggcctcatgtgcgagcagcggttgcacccattcgtccagatactgcttggcgcagtgatcggtgtgcagggcgatggtgatgttcgggtacttcgcggcgacctcgtgtgcaaaagcggccaaggccagcgatccggtgacacggtcgttgacgccgatgccggaaaggtatgcggctgcgccgacggacacctggatgatgccgtcggattcggcatccgcgaaccccttcagcgcggcgttcagcgtctgcgagctggtcacgttgatggcagggtaagcgtagccgccgcgtcgtgcggcgtctagcatttcggcataacgttccggtgttgcgattgtcatggcttcattatcgctcggggtgtgcccgccagactaggttctggagccaggcgagctgtgaactatctcacgaggaacaccatgatgataatcatggcgaagccgaccaaatcggtcggggtaaagaccgcgccggcgaataggacaccggtgatagtggcggttacgggttcactggtgccgagcatggtggcgcgcattgcaccgcagcgctgggtgccgccgaggaatagccaataggcaccgaatgtgccgaacaccacggtgaataccatcagaccaatgccgaaccagtccaacgcgggggcggtggtccacggacgcacgagcggcagcagcattaggccggaaacgatgaacatgacgccgctggccatgaagttgccccatttggccattaatgcgatgggcagaatcgcaagcagtgacgtgcatacggcatcggtcagaccccacagcagaccgggcagcggcagactgagctggctgagatcgccgcctgtggcgatgagcaccgtgcccacaaaagcgagtaccacaccgatgctttcgcgtttgccgggcagccgtttgcccataatacatacgaatacgagtacaaccagcagattgagcgtctgcagcactgtggccgtgccggaattggtccagtcaatggccttcaagtaggagacctgcaccatgagcacgcagaagaacgcgcacagcaggagtctcgggtaggaacggtagtccttaagcgagttgatgaacttgtcaggcgtgaagattcctgcgcaaaccagaaagatgacaccggccaatagctcgcgcacgcaggcgatccacagcggatcggcgtgatagtcgttcatcaggagtttggagacggtggcgttgacgccccagaagacgcctccggcgagcgccagtccggcaccgacgaagatgtcgtgcggggtgcgttcgagggttggcgttggttggccattggttgcagcggtcttgggttcacacatcgcccatcacgatacgcggacgacgtgaattgttctcatatagcggtcatacggcaggaaaataagctctcaaaagagggaaaaccgttgaaatttcaaggaaaatcgatggagcggacgacgggagtcgaacccgcctctaaagcttgggaagctttcattctaccgatgaactacgtccgcatgtgcgcttccacgcacgagaggcaagtgtatcacctatgcggcaccttgcgccatgtgccggtttgagttctgtgctggactagtgaattgcgcgcgtggaatacgtggatgcggccaccggagtgccgttcatttcattggccatttgcatcaggcgtgcgatgcgctgatcagtcggcggatgcgtggagaacagtttggagaaaccgaccgcggagaacggattggcaatcatcatcgcggagacggactgggtgccggccgttttgcgcatgggcgtggtctgggcaccataggagatcttgttgagcgcggaggccagggcctcggggtcgccggtcagcagactgccgtcttcgtcggcgtcgtattcgcgagtacgggagatggccatctgaatcagtgatgcggcaatcggcgcgagaatcacgctgaggagcacgccgatcaagccgagaccgcctgaattatcgcggtcgtcgcgcgagttgccgccgccgaaatacatcagagaataaccgaggtacgtgatgacggtggccatggcagaggcgatggcggaggtcagaatgtcgcggttgtacacgtgcatcagttcatgacccagcacgccgcgcaactcgcgggcgttcagaatctgcaggatgccctgcgtgcagcagacagccgcgtgccgttcgttgcggccggtggcgaaggcgttcggactcatggtgggcgcgatgtagatgcgaggcatcggcttgccggccttggcactcagctcgcgcacgatctggtagatttcgggggcttcctgctcgctgacctccctggctcccatggatgcgatggcgagtttgtcggagaaccagtatgagccgaacgtggtggccaacccgataatgacgtagatgcccagcgtctgctgcctgccgcccgtggcccaccatatcagcatgatgatggcccacatcaaggcgaacagcagcgtagtcttcaggccgttgaaatggccgtgcacccgtactttggcatccatgaggctcacactaaaatcactgcctgaatattggctggatgtgcgccgaggggtgaatcggatgggggttggcggtgcttacggtgcggttggcggggatcggaatagcctgtttacatgagattgacgatgcttgacagtgcggttgcttggcctgttttaccgctttaccgctttaccgattggtctgatcgggacgctttgcttgtttggcctgctttggctgcttggatcgtttggcccatcggcctgctcgactggcatgacactggcttttatataaataagaacgctggcgtataaccggcgttcttatttatcgatgtatcaatcgcgccgattgctgctggtgcagttgccggtgcgatgagctgatagtcaatcaggccagagcgagctcacgcatctggtcgggctcgatgaccttcttgtgctcgcggccctccttggcgccttcggcgcgctcgaaggcgtcgaccttcttccagccagcgaagtcaatcggcttgacgccgcggctttccagcagtcggtcgatggattcggggtcgcgatcctcggccacgcgaccaccttcggcggccttggccagatcctcaagcatgttggtcacgatggcaagtgcgtcggacttggtggagccgatcaggcccaccgggccgcgcttggcccaaccggtggcgtacaggcggtcgcgcacttcgccgccgtcggcctcggtggtgatgcggccgtcgccgttggcgttggccagatgggcgccgtgctcgtcgtaagtaatgccgggagcctcggccggcttgtagccgatggcgtggtagacggcctcaaccgggtagtcggtgaactcgccggtgcggctcatcttgccgtcggcaccggtttcggtgcgctccacgcggatggccttgaccttgccgtcctcgccgaggatctcggtaggggcggagttgaagtgcacgtagtacttgcggtcggccgggttgccttcgaagtcgacgtcgccgtcatcttccatgtcctcggccatctcgcggatggcgaacagctcctcgaccatctggcgggtgagcttgtccttgccggccacctcgatggtctcgtcgtccaaatcgaagtcgtcctcattgatgatgagctgcacgccgggcagcttctccatctcgcgcagttcctgcacgctgaacttggcctgggccacgccacgacggatgaacaggtggagcaccttggccttgttctggccgatgccctcgtacacgttgtccggaatgtcggtcttggccttgaggtcgtcggcgttgcgcatgagttcgcgggccacgtccatggccacgttgccgccgccgatcacggcgacgttctcggccgtaagcggccattcgcgggcaccggtggggtaaccgtcataccattcgacgaacttggcggcaccgtacacaccttcaaggtcggcaccgggcaggttcagcggcttgtccttgaccgcgccggtggcgaacagcacggcgtcgtaacgggccagcaaatcatcgagggttacgtccttgccgaattccacgtcgcagtagaggtggatgttcgggttgtcgagcgtcttctcaagcgcggaggcgatgaacttgatggacgggtggtccggggccacaccgtaacgcaccaggccgaagggcacgggcagcttctcgaacaggtcgatgcgggccttggtgccgaggccgagttcttcgcccagtttcttgagctggcgcaggaagatgtcggaggaatagacgccggccgggccagcgccgattacagcaatacgaagttcagtattcacagattcagtcacgcgctctagcctaacgcaaagccttccgttgcaacagagggcgagtggtgggaattctgtgtattaggccatagtttgtgcgtttgggaaacctacgagcactgctaatgtcagattatgggtttccctattggtcaagttattgccgttctcattccaagaagcatgcgaggcggatcaggcccttacttcggatacgtttatgctgcaaggcggttatccacgcatttatgacacgagaatgccgctcaatctgttcttctcgaactacatcgacacttatatcgaacgtgatgtttccgaatatcttgatgtacgcaatttggctgaattccgccgattcttgactctttgcg

SEQ ID NO: 1829 - DNA, 2917 bp, Unknown
  MAG_14  MAG No. k141_46280
gtggatcccaagagcgacgtaatgaacacgttcgtgacgcagatggtcaacggccacgggcgcatcgtgcggcaggcgttggcctgggccggaatctgacagttgttttgcttcccgctggtgggacgtgaatgtgaaggagtaattcatggcaatcgaattggccaatcatatctatcgcgatggcgaaggcgtgccggtggtgctgatgaacgcctacccggtggaccaccgcatgtgggacgtgtgcgcgaaggcgctcgccgactccgccgacctgaacgatgtgccggacttcccgatttgggcgccggatatggccggctccggcgcatccccggtgccgagcgatgccgattctggcccccgcatggcgaacggcgcgtacagcgaggcgctggatcgcctggccggagcctacgtggacctgatcaaggccgccggctacgagcaggcgatctggggcggactgtcgatgggcggctacgtggcgatggacatccagcgcctgtaccccgaaacggtggccggactggccttgtgtgacacgatggccgcgtccgacggcgtgggcggagagaaccgactgaagatggcggacgccgccgaacagacgaactcggtcgaaccggtcatgcacttcgcgcaaccggccgatggcgattccaccgtcaagaagactcctgaattcatcgcgaccatgaccggctggatcaacgaacagaacccggctggtctggcctggcgtcagcgcatgacctatggccggcccgaactgggggcggtgccggaaacgatcagcgcaccgagcctggtggtgtccggcgaactggacccctccagcaatccgagtgtgatgcgtccgctcgccgagcgaatcgccggcgccgaattcatcgacattccggactgcggccatttcagtgccgtcgaacatccggataccgtggcgcgagcactgctctcgctcgtcaggcgcgtgcagaacgcgcagaagaacgcataggagacctcgatgggcactgacattcatttttcgcccctggcgctgacccatgcgctgccgttcctgccgctcgcgcaaggtgacatcgactatcaggtggaccggcgcggtgaacccggtctgatcgacgagctgttggccgagccgaccaccaaagtcgtgcttacgcgcggcggacttgtcgccgtaccgcgcggccaaggcgagctcgtggactatgagaacgtgaaaatgcggctcgccacgttgccgggctcctatgtgtccgccgaactggcacgctaccccgaagcggtcgccatgttccttggctcctatgtcggggcgcgcggcgaatccgtggtcgccgtggatatcacgcgcgtgccggaagccggtgttcccggtgttggcgggattgctggtgtttccggtgctgccggcggcgtgctcggcacccaggattccggcaccgtggacggcgcgctgggcaagaacggcatcagcggaggtgctgccgccggaatacggcagccgggaaacgccaagggcaatggcggcgtagccgcagccaaaatcgccgggccgctcggtgtaccggattcggccggacaaggtgcggacgatgccttcgatgattcggtcggcgcgcccgtacagcccttggccccgaagcccacgctgctgcaacaggccgtgacccggttcgactgggtggacctgcgcggattcgcccctcacgccaacgcgcgcgaggctgggcaagccaccagtgccatcaccttaagcatctggcacagccgccagcggttctgccccacctgtggcgcggcggtccggccggcgctcgccggatgggcgcagcgatgcaccaacgaggcggacggcaaccgtgtgctgttcccacgcgtggagccggcggtcatcaccgccatcgtggacgggcacgatcgtctgctgctgcaacacaacgcggcatggaaggattcgaggctgtattcggtgtccgccggatttgtggaggcgggggagaaccttgaacacgcctgccgccgcgaggccatggaagagaccggcatcaagctcggcgaggtacggtacctgggctcgcagccgtggccgttcccggcttcgctgatgatggcgttcaaggcacatgcgatcaccaccgacgtgcatgtggacggcgaggagaccatgaccgcgcgatgggtcacacgcgacgaatacacggccgagctcatcgccggccgtatggcggcgccgggccgcgccaccatcgcccgctacatgattgaggaatggctcggtcgcgagctgtgacggaccgcgaagataggttaggcttatgactatgagtgatgacaacgaaaacgaacagccgctgaacctcgacattcccgaccacctcgaatactccgaggagcatgcttgggtggaccgttcggtcgaccccgcaatcatcggcataaccgaatacgccgccgaccagcttggcgaacttgtgttcgtggatttgcctgagcctggcgcccgtgtggaggccggcgacgagatcgtggagcttgaatcctccaaggccgtccagccgttgatcagccccgtggcgggtacggtcaagtatgtgaaccgtgacgtggcggacgacccgtccgtggtcaacggcgatccgtacggcgaaggctggctgctgaaggtcgagcttgacgacgatgagccggagctgctgagcgccgacgaatacgcgaaggtcgtgcggtagttccacccatagctcccctccctgagggaagccagtatgtggcatcaaacctatatgcatcgtgcctcttatggaggggagccaagaaaatgaggcgtatggcctatattggtgtctatgagaagcccacgcgaggattttgaggcggcaggcaagcgactgccttggga

SEQ ID NO: 1830 - DNA, 33776 bp, Unknown
  MAG_14  MAG No. k141_46710
gaccatgagcgcggtgcccggtgccgccatcggagcttcctccgatggctcatccacttccgccggcgcagacggtaaaccattgtgtcagatcgccgacctgagtcagatgaaggtcaatgtcaacatcaatgagctggatatcactaaagtggccaaggaccagagcgccaaagtcacgttctccgcggtgccggggctgacgctcgatgccaaggtggataccatcgccagcaccacgtcgcagttggctgattcctcggcaggcgggcagagtggcaacggcggcgtgggatacgccgtgcgtctcatcattcccgcccctgatccgaaactgaagccgggcatgacggccagtgtgaaaatcaccatgcagagcattgacaacgctttgatggtgccgctcgccgccatcgtggatgagggtaaggagagcagcgcggtcatgctcgagaccaacgccgaaacccatgagttcaagcgggtgcgagtcacggtcaaagccaagaacaacaccaaagccgttgtggaaggcaatgtgagcaagggcgatgtcatcatgcttgatggcgcttcggctgccgacaatactggcgatgctgcttcttccacctcgcaaaccgcggcttcggacgaaagggcacgctgatatgttcccgtttcgttccgacgcgagccgggcaaatcgcggcaaacggcgtaatgagaccattgccgtgcccaccgccacagccaacgtcatcgaggttgaaaacatcaaccgcatcttcgagacaggcgacacctacacccatgtgctcaaaggcatcaccatgaatgtgcgccaaggcgagttcctcgccatcatgggaccatccggttccggcaaatccacgctgatgaacacgctgggcctgctcgaccgcccatcatccggcacctaccgcctgtgcggcatggacgtgcagaatctgagtgatgacgaacgctccgaactgcgcgggtggctcatcggcttcgtgttccaatccttcaatctgctgccgcgcaccagcgtgctgcgcaacgtgatgctgcccctggcctattccgactgcccggtgcgtgaacgggaagggcgtgccatcaaagcactccaatcagtggcgttgagtccggaactgttcgaccgcaaaaccaatgaactctccggtggtcagatgcagcgcgtggccatcgccagagcgttggtacaggacccgccgctgattctcggcgacgagccgaccggcaacctggactccaaaaccggcgatgcggtgatgcacacgttcgaacagctcaagcagcaaggcaaaaccatcgtgctcatcacccacagccccgaagtggccgaacgcgccgaccgatgcctgcacatgcgtgacggcgtactgcgtgaagggatgtaccgatgagaacacgggatctgctggcggaaaccggctccgcactgagggcgaacaaaggcaaaagcgcactgaccattctcggcatcgtcatcggcattgccgcggtgattaccatgacctcactgatcggtggcattcgagactctctggtcggcgaactgggtatgaacgcggcgcgcacgatttcgatttacacggacgtcggcacccttgacgacgaacagatcactgcgatgcgcgaggaactgaccgactacgagtacttctcgccgacgaactatggtgccgcctcgtcaatcgccgcgcccggtaccaccgacaaggtgtcggcgagcatcaccggtgtcgacgagcatttcttcgatgtatccggagtgacgattggtcgtggacgggccttcacatcgagtgaagcaacgagtggtgcaatggtggtgattctcgacgggcagggcgtgcagaagctgttcggcagcgcggacattgacgccatcggcagaaccgtcacgcttgacggcaatgaagcaaccgttgtgggtgtggtcgagtcgtctggattgatgggcggcatgggcggcgacagcgtgaatatctatatgcctgccaccactgtggcgctgcggtttgcgtcctcgaacatgggatacatgcagatctacggactggccaaggacggggttgatatcgaccagctcacggaacagacgaagaccgttgtcgctcgcatcatgcgtatcccaaccgaacagatcgaccagaatctgtcggtcgtaagcgcccaatcctccatcgaccagctttccagcttcatgagcgcattccaggtgctggcgggttcggtggccggggtctcgttgctggtgggcggcatcggcattatgaacatgatgctcaccaacgttaccgaacgcatccgcgaaattggcctgcgccgggcattgggtgccactcggcgtgacgtgaccgcgcagttcctcgccgaatccattgcaatcacagtgcttggaggtcttatcggcacgttgatcggctacttgctgtcgttgggcaccgctggattggtgtccggcatcgccggtggcatgagtatcgcgccagcagtttccgtgcagtccatcggactggcagtgggcatctgcatcgctgtcggcgtgattttcggctactatccagctaggcgcgcggcaaagctcgacccggtcgaggcgctacggcatcaataatcgcgtagcaccccgaaatgcagtagggcattgcgcacaccgtcgtggtccacgtcgtcggtgatgtaatcggcggcggcctttggctcggcggtcgcattgcccatcgcgaccccgatgccggcgtaggcgagcatatccgtgtcattgccgccatcgccgaaggccatggtctgcccgcgcgtgatgccgtaatgcgccatgaaccgctggatgccgcgcggcttgccgccatcggccggaatcagatccgtgaaatccggatgccaacgcaccccgcgcacattgctgcacagtcccaccagttcggcctccaactcgggtccgacaaagggactgatctggaaagtctcatgatccagcgcgcgggtgcgcgggtcctcaaaataccgggtcggtgcggttttgcccagtttgctccacgtggcgcgaagcagatcattggactggttgaagtacacgtaatccttctcgccgaaattgcacaccacatcggggtgacggtccagccagtcgagaatcacctcaatatcagcagtatccaaggcctgcgaggcaaagaagccggtgtcatcaaagcaatactgcccattgaacgccaccacgccatcgaacgtcaccggcatggtatccagcaccacgtgcatctgtgaaggcgcgcggcccgtgcaaatcagcaccttgacgcctgcggcctgcagccggtgaatcgcctcgattgtggaatccggcaccgtatgggtcgtgaaactggtgagcgtgccatcgatatcgaagaatacggctcggatatcggcattggcagtatcggtagtcatagcttccattgtcaaagcccctctcgacgtgctttccggcgtgttcggcacgcctatagcgggttatcaaacgcacgaatcccggccattgcatgcgcgccataaaagacacctatacggcaatcggccattttccgtcactttcgcggttcaagcgcgttatggtgttacccgacatcaattttggagagaggaaatccaatgacagcagcaacccagtcggcaactccggccgctcctaacaataacgagccggtgcgtgtgaaccacaccgtccgcaacgtcatcatcaccatcgtggtcgtggcgattatcgccgtggccgcgttcttcggctaccgcgcgtttgccggtgccaacgagtcgtccgccaagggcagcaagggcaacccggtcaagatcggcgtggtcggcgctaccaaccccgaatgggtcaagttcaagcaggacgccgagaaggccggcatctacgtcgacatcgtcgacttccaggactacacctccgaaaacccggcccttgactccggcgagctggacctcaacgaattccagcacctgctctacttggccaactacaacgtgagcaacaagaaggacctgcagcccatcggcggcaccgccatctacccgctcggcgtgtactccaccaaggtcaaggacatcaaggacctgaagcagggcgacaccgtcaccattccgaacgacgaaaccaaccaggcccgcgctatcggcgtgctcaaggccgccggtctcgtgacgctcaagggcgactggaccgccttctccactccggccgacatcgacgaagccaagagcaaggtcaaggtcaccccgctcaaggccgaacaggtggccaccaccctgaaggacccgaccatcgccgctggtgtgatcaacaacgactacgtggccgacgccggtctcaacccgaaggacgccatctaccaggatgacgccgaatccgaagaagctcgcccctacatcaacgtgtgggtggcccgcaaggcggacgtgaacaacgagacctacaagaagctcgtttccatctaccagcagaaggatgtgctcgacgccctgcaggagaactccggcggtaccgcggtgttcgccgacaagttcagcgccagcgagctgcaaggcttcctgtccgacattgagaaggacgccaaagcccagcagtgagccgtggctgatacgagtgcacgactaacctgtccatagccattaccaccaagcggagcgagtacccgagccaacaatcgggattcgctccgcttccgtgaccggacatcaacaaccagcatcagggagcactatgagcgaccccatcatcaccttcgaccatgtcgtgaaggaattcaaaacacgcggacgcggcgcgaacatcgcacgagccgtggatgacgtcagcctgaccatcgatcgcggcgacatcttcggcatcatcggctattccggtgcaggcaaatccacactggtccggcttatcaacgcgctcgaacgacccacctccggcaccgtgaccgtgctcggcaccgatatcacctctttgagtgagaccaagctgcggcccatccgccagaaaatcggcatgattttccagcagttcaacctgttctccaccaaaaccgtggcgcagaacatcgcctacccgctgcaactcgatcactggcgcaaggactatcaggatcgtcgcgtcaacgaacttctcgaattcgtgggccttagtgagcacgcaaacaaatacccctcgcagctgtccggcggccagaagcagcgcgtcggcatcgcccgcgcactggccactaatccggagattctgctcgccgacgaagccaccagcgcgctcgacccggaaaccaccaccgaagtgctggccttgctcaagcgtgtgaacgaggaattcggcatcaccattgtgcttatcacccatcagatgaacgtggtccagcagattgccggccgcgtggccgtaatgagcgccggacgcgtggtcgaatccggcgacgtatacgacgtgttcgccgcgccccagcagccggtgaccaagcgattcatcgccaccgccctgtccggcctgcccgaggaagaccgggtcgagcgattgcaccacgaatggtcgggccgcatcgtcaccgtgctcatccgccaaaaggacgtttccggcagccatggccacgaactcaaggcatccggacagaacatctccgaactcatcgccaaatacggcgtcgaatccagcctgctctacggcggcatcgacacggtcaaggggaccgccatcggtgccatcacctacgaattcaacgggcccggctggcacgtggacgaattcctgcgcgagctcgccgccaatagcgacgtcattgacttcggcaccgccgcaaagcccgtggcttacgccgacgcagttgccggacatgcctcctacgccgaagaccgcgcccatgacccactggcggccgatactgccaccgcgcccgctgtatccgccgccgcacatgaaggagacaacgcatgatcatcctcgccaactcgcgtagcgactggaacgtgctgcgcccactattgttcgaatccatcggccagaccctgaccatggtgctcgtcacccttgtcatcggcggattcctcggcctgatcctcggcgtggtgctctatggcacccgccccggcaacctgttcgagaacgcggtcgtctaccgcatccttgacatcatcgtcaacatcgtgcgcccgattccgttcatcattttcctggcagccatgcagccgctcaccatcgtcgtggtcggcacgtccatcggcaccgtggccgccatcttcccgatggtggtcatgtgcaccttcgccacttctcgtctggtcgaacagaatctcgtgccggtcgacccgggagtaatcgaggccgcgcgttcgatgggtgccggcaagctcaccatcatccgcaccgtactcatccccgaagccctggcaccgctgatcctggcctacgccttcctgttcatcggcgtgcttgacatgtctgccatggccggctacatcggcggtggcggtctcggtaacttcgccatcgcctacggctaccagaagttcgaccagaccgtcacctggacggccgtgatcatcatgatcgtactggtccaggtggtgcagggcatcgccaacgccatcgccaaacgactgctcaaacgccagcaataacaaggcatactgaccccatagatcgcggccctcgccaatatgaagcgagggccgcaatatattcttcgcgctactagaatcgggaaccatgagtgaacatatcgacatcgaccacgaactcatcaccatccgccactacctgcacgcccatccggagcgtagtttccgtgaattcgacaccagcatctatctgaccgaccagctcaaggcgcacggcatcgagatcctgcacaacccgctggagactggtgttgtggggctcattcagggcgaggccggtcccgggccgcgtatcgggctgcgcgccgacatcgacggcctgcccatcgtggaagactccggactggagttcagctccgtcaatgaaggcgtgatgcacggctgcggccacgacctgcacatgaccggtctgctcggtgccgccttctggctcgccgagcaccgtgacaagttcgccggctcaatcaagattctgttccagccgagtgaggagaccggccaaggcgctcgcgccatgatcgacgccggactcgtggatgacgtcgaagccattatcggcacgcacaacaaccccaactatgcgtccggccagctggccatcggcgtcgagccgatgatggccggctgcgtgaaattccgcgtgaccctccacgcccaaggcacccacgccggctacccgtacaagggcaccgggcccatcgaagcgctcgccagtattattctgagcctgcagaccatcgtgagccgcaacgtcacgcccttccacccgctggtgctgtccgttaccgaagtgcacggcggccatgtgtggaacgtggtgcccgccgaagccggattccaagggactgtgcgctatttccacaagtcggatggcaatctggtcggccgccgattcaaggaagtggtggaacacaccgccgaggcatacggtatcagcgccgatgtggtctgggatgatttccaagacccgctggtctccgatccaggtcttgccaaggccgtggcggcggatgtcaacgactacgcgcagctcgaaccgatacgtcagtcgatggcgggggaggacttctgcgaattcgccaaggtgacgttgccggtgttcgcgttcgtcgggtcaaacggccaggaaggttgcgccgactggcatagcccgcatttcgtgggtctcgacgaatccattcccaccttcgtcaacttctacgtcaacgccgccctgcgcgtgctcaacgagctgaggtaaatccttttttggctcccctctggaggctgaggcgttaggcagacagcccaatgggctgtctgcagccgaaggtgaggcgacagccgaaccagatatgcgcgggcctcgcccgtccataagtgcaggacgagctatcagcgaagctgactgaggggagtggcattcgttcattaggtcgattcatcgtccattaggtcggtgaacggcgatactggttgttggaatcgcgccattgcaacgactgatatctcattgcagtgacctaatgaacgcaaaaacgacctaatgaatgacgccaagccggaagaacaggcaatccgacgccatacgcggctacactaagaagctatgacacagcttcgcttcgcactcgcccagatcgacacctgcgtcggcgcgctcgatgccaacgccgccaaagtgctcgactactcccgtaaagccgccgcagggaatgcccaagtggttgttttcccggaaatgaccctcaccggataccccatcgaagatctggccctgcgccgcaccttccgccaagccgcatgggacaaggccaacgaactcgccgcccagctcaacgacgacggcctcggcaatctgttcgtggtggttggcaccgtgggcactgatcgtaagacctccaagccgcgcaaccgactggtggtattgcatcagggcgtggtctgggccggctacgacaagcacttcctgcccaactacggcgtgttcgacgaattccgtatcttctccgccggcgaccgttccgtgaccctcgacgtggatggtgccaccatcggcgtggccatctgcgaggacatctggcaggatggtggcccggtggccgacctggccaccaagaacatcgacctgctgctcaccatcaacggctcgccgtatgaggaaggcaagaccaacacccgtttcgagctcgcccagcgtcgtgccgccgaagtcaacgccccggtcatctacctgaatcaggtcggcggtcaggacgacctggtcttcgacggtggcagcttcgtggtcgatgccgacggcacgcttatcgaacgcggcccgatgttcatggaaaacctgacgttctgggacttcgattccaccgccgaacatcaggtcaaggccgagatcgttccggaactcgacccggacgaagaggtatacactgcctgcgtgctcggcctcaaggactacatggccaagaaccacttcaccggcgtgacgctgggcctctcaggaggcatcgactccgcactggtagccgccatggcggccgacgcatgcggcggcgagaacgtctggggcatctccatgccctccatgtactcctccgatggttccaaagacgacgccgctgacctggcctccaacatcggtgcccattacgaggtccagcctattgagctattgttcaacgcctaccaacagcaacttgaccttgatggcgtctccgccgagaacctgcaggcccgcatccgcggtgtgatcgtgatggccagttccaattctcgcggcctgctcgccgtggccaccggcaacaagtcagagctcgcctgcggctactcaaccatctacggcgatgcggtcggcggctacgcacccatcaaggacctgctcaagacccgtgtctgggagatcagccgttggcgtaacaaggccgcggccgcaggcgtcggtatcggcgggctcaagatcgtgggcaacgaggacggcaacgccggcatcccgttgaaggacggcgtgatgattccggtctcatccatcgagaaggctccctcggccgagttgcgccccgggcagaaggactccgactccctgcccgaatacgcgctgctcgacaaggtgctcgctgcatacatcgagcacgcgcacggccgcgccgacctgttggccgacggcttcgaccaggccaccgtggacactgtgatgcgattggtggaccacgccgaatggaagcgccgccaatacccgttgggaccgaaggtcacggccctcgcgttcggccgcgaccgccgactgcccgtcaccaacgcgttcagggaataaacatatattgctcccgccagcgggagcaagtaataccgttgaggaggtaccaatgacagacgataacaagaagcagtggtatttcaacaccgtcaagaagcaggccgagctgggcatggtctcaccgattgaacagcgcatgggtccgtacaagaccaaggaagatgccgaacacgcctgggacatcgtggtggaccgcaacgccagatgggaggaggagaactggcgctggaagaactacggtgtgaaatccgcgcaagcgaacgatgaagactgacggccaaaacagacggatacggttctgctgtcaatctcaagaccgaaccgctcaccaagccgctcatacgaacatcacagtatgagcggtttcccatatctggagacgtgcaatagccccatcaatacctagaaaccattggaatggtagcgttcacaaaaaacaatgtgagatagctcactcccaatttcggcttttcccaagcaagtgccaactacactgttgaaccaagggttccgtgaagatgcgaaacctacaaccccatttaaggagtgacatgaccgcagtagaaaatgcagctgtctcccaagaggagcttgacgccaaggcgtgggccggcttcaccgagggcaactggcagaaggatatcgacgtccgcgacttcatccagaagaactacaccccgtacgagggcgacgagacattcctggctcctgccaccgagaagaccaagcacctgtggaagtacctcgacgacaactacctggccgtggagcgcaagcagcgcgtctacgacgtggacacccacaccccggctggcatcgatgccttcccggccggctacatcgactccccggaagtcgacaacgtgatcgtcggcttgcagaccgacgtgccctgcaagcgcgccatgatgccgaacggcggctggcgtatggtcgagcaggccatcaaggaagccggcaaggagccggatccggagatcaagaagatcttcaccaagtaccgcaagacccacaatgacggcgtgttcggcgtctacaccaagaacatcaaggtcgcccgccacaacaagatcctcaccggtctgccggatgcctacggccgtggccgcatcatcggcgactaccgtcgtgttgccctgtacggtgtcaacaagctgatcgccttcaagaagcgcgacaaggactccatcccgtaccgcaacgacttcaccgagccggagatcgagcactggatccgcttccgcgaggagcacgacgagcagatcaaggctctgaagcagctcatcaacctcggcaacgagtacggcctggacctgtcccgccctgctcagaccgcccaggaagccgtgcagtggacctacatgggctacctggcctccatcaagtcccaggacggcgccgccatgtccttcggccgtaactccgccttcctcgactgcttcatcgagcgcgacctcgaggccggcaagattaccgagaccgacgcccaggagctcatcgacaacatcgtcatgaagctgcgtatcgtccgcttcctgcgcaccaaggactacgacaacatcttctccggcgacccgtactgggcgacctggtccgacgccggcttcggcgacgatggccgtccgatggtcaccaagacctccttccgtctgctcaacaccctgacccttgagcacctcggacctggccctgagccgaacatcaccatcttctgggatccgaagctgccggaaggctacaagcgcttctgcgccaagatctccatcgacacctcggccatccagtacgagtccgacaaggaaatccgttcccactggggcgacgacgccgccatcgcatgctgcgtctccccgatgcgcgtgggcaagcagatgcagttcttcgccgcccgagtgaactccgccaaggccctgctgtacgccatcaacggtggccgcgatgagatgaccggcatgcaggtcatcgacaagggcgtcatcgacccgatcgccccggaggccgacggcaccttggactacgagaaggtcaagaacaactacgagaaggcgctcgagtggctgtccgaaacctacgtcgaagcgctgaacatcatccactacatgcacgataagtacgcctacgagtccatcgagatggccctacacgacaaggaggtgtaccgcaccctcggttgcggctgtccggtctgtccatcgccgccgactccctgtccgccatcaagtacgccaaggtgtacccgatcaccaacaaggaagccaagaacctcgaaggccacgagtacgagtacgtcgaaggcgccgacgacgatctggtcgtcggctaccgcaccgagggcgagttcccggtctacggcaacgacgacgaccgcgccgacgacatcgccaagtgggtcgtctccaccgtgatgggccaggtcaagcgcctgcccgtctaccgtggcgccgtcccgacccagtccatcctgaccatcacctccaacgtggagtacggcaagaacaccggttccttcccgtcccgccataagaagggcaccccgtacgccccgggtgccaacccggagaacggcatggactcgcacggcatgctgccgtccatgttctccgtcggcaagatcgactacaacgacgccctcgacggcatctcgctgaccaacaccatcacccccgatggtctgggccgcgatgaagccgagcgcatcggcaacctggtcggcatcctggacgcgggcaacggccacggcctctaccacgcgaacatcaacgttctgcgccgcgagaccatggaggacgccgtcgagcaccccgaaaagtacccgcacctgaccgtgcgtgtctccggctacgcggtgaacttcgtcaagctcaccaaggagcagcagctcgacgtcatctcccgtaccttccaccaaggcgccgtcgtcgactgatgaccaaccccgcgaaccgcggcaatgactaactgaaggggtggggcacggctccaccccttccttattttccacagactttcgcatcatttggaacaggaggacaactatgcccgcaacacccacgttccgcaccacgaccaggcatatgctcaaggaatcgaagacctatgcctcgcagactttgatgggcggcctttccggctttgaatccccaatcggactcgaccgacgtgaccgcctttccgccctgaaatccggcgatatcggcttcgtccactcttgggacatcaacacctccgtggatggaccgggcacccgcatgaccgtattcatgtccggctgcccgctgcgctgccagtactgccagaacccggacacttggaagatgcgcgacggcaagcccgtctaccttgacgccatgatcaagaaggtcgatcgttacaaggacctgttcaaggccacgcatggcggtatcaccttctccggcggcgaatccatgatgcagcccgccttcgtctcgcgtgtgttccatgccgccaaggagatgggcgtgcacacctgcctcgatacgtccggcttcctcaacacgagctacaccgacgagatgctcgaggacatcgacctgtgtctgctcgacgtcaaatccggcgacgaggagacctatcacaaggtcaccggcggcaccttgcagcccaccatcgattttggccagcgactggctaaggccggcaagaagatctgggtacgatttgtgctcgtgccgggcctgaccgactccgaagagaacgtcgaaaacgtggcgaagatctgcgagtccttcggtgatgccgtcgaacacatcgacgtgctgggattccaccagcttggccgcccgaagtggcacgaactgcgcatcccatacccgctggagaaccagaagggacccaacgccgccacccgttcgcgggtggccaaccagttcaaggaccacggcttcaccgtgttttaaattgcagggccgaaccgcgcgtaaataccacgattcggcccgttcgcccataccctagagatatggccgacatctacgcatttcctatgggagcgtccaacgacggacgccccgtacgccctcagggtgtgccggatgaagtatgggcagctgtcgaatccgtcagcaccatgaagcgcatccatgacgtgcgctatcgggagattcccgtgccttccaccttggccgattatggtatcggcgtggaattcgaagcgggagagcgtgccctcggcgatgccttttccgccggtcttggcaacgatgccgaatcacgaatcgccacaggctggatcatgatgctttatgctcatgagctgcgcattgaccgggattccaactggcgttgcgtggcgttcgcgcgacttccgctggaaaccgccgaaaacgattctctgacccccggcatgtactgggatgacatgtgcgactatttcgacggcatcgagccggattcggtatccggcacagtcaccgtgacccaaaacacggcttttggttcgatggccggctccaccagcgccgggtgtgagattcgcgtctcatggaccccgcttgacgggaccggaccggacggtactatggacgccggcgcacaaatccgctcgtgggccgcattcatcagatccaccatccgttttgaggaggatgacgccagttgagtgacgtccgtgacaccgaaccccgactgctgaaagagcctcgcgggggagtgcccgatgtcacttcgtcgctggatggctatcatcgtgcctgcgatgcgctggccgaggcgacgggctcgctggccgccgacgccgaacgggcgtccggattccgctatggacatgaggattggctgattcagttcaaacgtgaaggtgcgggcatcgccttgcttgatcccgtcgccctgacacgggccggagctgactggaatgaattcaatgacgccgtgggcgatgctacatggattctgcatgattctctgatggacttgcccggattcgccgaaatcggactcaaacccaaggccttgttcgacacggaaatagcggcgcgattgctcggcctgcaccgcttcggtctggccgccgtcaccgaacactacctcggcatcacgctggccaaagagcattccgccgccgattggtcctaccgtccgctgccgcgcgactggcgcaactatgcggcgctcgacgtggaggtgcttatcgaactcgaaaccttgatgcgtcgtgacctgaaagccgcaggcaaggacgagtgggccgctgaagagttttctcacgctttggttgcgggccttgccccgcgcaaacctcatccgattccttggctgcgtatctcgcgcatcacccagctgagtcgtgatccgaggggcttggccatcgccaaatccctatgggaggagcgcgaccggctcgcccggcgatacgacatcgctcccagcctgttattgaccgattcgtcaatcatcgaggccgcgaccaacaagccgcacaatgccgcccaattccgcgcactccgatccctgaacgagcgtgtgcgcattcataccggcaccgagcaggacaaaatgttcgagcggtacgcgccgattcagcgtacggtcaagccgaaggtctggaagcaggccatcgaccgcgccatggccctgaagcccacccaatggcctaccatgcccgcccccgaacaggacgaaaacggtgtggtgaacgcgccccgatccatgcgactgtggcaacagcgccatccggagcgttatgaccgtctgcagcgggtacggcgtgtgatcaaccgcatcgccgaagacacccgcacgccggccgagatgatcatcaagccacagatcctacgcaacctgtgctgggtggaagacccggtggaagtggacgtcgagacgttcctgatcgagcagggcgcaagaaactggcaggtgaaactcattgcaccgtccgtaagtggcgttatcatgtagaggttgccttacggcagaactgtaagaaataacgacttttgaggagtcattagcgtgaagatcagcgttcgtaacctcgagcccaccaaggtgaagctcaccgtcactgttgaaccggaagagctcaacccgtatctggatgcggcccgtaaggaaatcgccaagcaggtgaacgttcccggcttccgtaagggccacgttcccggcaagatcatcgaccagcgcatcggtttcgccgccgtcgccggtgaggccgtgaacgacgcggtcccggagctgtactccaaggccctggatgagaagaagattcgtccgatggctcagccggagttcgacgtgcaggatgttccgcagtccgccaacgacgagaccaagctgaagttcaccgccaccgtcgagcgtcgtcctgacatcgaactgccggaaatcgacggtcttgagatcgccatctccaagccggaagtcaaggatgaggacgtcgacaagcgcctcgagaccctgcgtcagcgcttcggcaccttggtcggcgtggaccgcccggccgccaagggcgacttcgccaacatcgacctgactgctgagattgacggcgagaccgtcgactcccaggaaggcgtgagctacgagctcggctccaacaccatgctcgacggtctggacgaggctcttgacggcctgtccgccggcgaggagaccaccttcgaaggcacgctggaagccggcgagcacgagggccagaaggccaccgtgaaggtcaaggtcaactccgtcaaggctgaggaactgccggagctgaacgatgagttcgcttccgaagcttccgagttcgacactctggacgagctcaaggctgacatccgcaaggctgccgctcaggacgccgaaggtcgtcaggccaccgaggctcgcgatgccttcatcgccaagctgcaggaaggcctcgagatcccggtgccgaagggtgtcaaggccaacatggtcgaagagcagctcaagggcatgaccccggacccggagaaggccaccaaggagcagaaggctcaggccgaggagaccgtggagaaggatctgcgcgatcagatggtgctcgacgctctggccgagaagctggacgttcaggtgtcccagtccgacgtgttcaacttcctcgcttccatcgcccagcagtacggcatggacccgaacaacttcatccaggccatcatcaagaatggccagcttggctccgctgtgcaggaagtcggccgttccaagggtctgctcgccggcatgcgcgccgtcaagttcaccgctgatggcgaggttgtggacctctccggcttcctgggcgaggccgctgaggacgaagagtccgagtccgtcgaggccgcttccgctgctgccgccgtggccgacgaactgtccgccaaggatgacgccaaggacgctgagtgagcatagcctcatcgcgttagcgtgattgtttgagcccggaatcgtgtttcacggttccgggctcttcctattctggtaaaaggactatttctttggctcccctttggggggagctgtcgggcgtagcgagactgaggggagttcccaaggcatactcgttgcatagcgtgcggaggttgacatgcagccaacggttactatcaaacgccttggttggctcgctgcggcgaccattgtgctcggcgtgctcatcggtgtgggagcaggtctgctgaccctgttgctctacggcgttgaacatgtgctgctcggctacatcgaaggcccagaattgtctggtccattcggcgtgcccgctgcacgccgtgtgatatcggtgaccgtgggactcggcatcgcgggcattatctggtatctgctacgacacaaaacgactgtggtgccctcagtcaagaaggccgtggcgggaaagcgaatgcctttctggcaaaccattgtgcatgtggtgttgcagattttcatcgtcggctccggtgcctcgatcggccgagaagtcgccccacgcgaactcggcgccatgatcgcgcaacgtttttgcgacctgttccatatcgagggcgttgatggtatcgaccggcgcatggtggtggcagtggctgccggtgccggtctaggaggcgtctatgacgcgccgctggccggcatgttcttcgccgtcgaaatcctgttggtggatgtgacgatcgaaaaggttgcgtttggactgggcgtgtctgccattgccgcattcgtggcggttgcgatcaaagggcattgcctgttctacgacatcaccgccatgcaaccggaatccacgccaacgttaatgctgttcgctctgatctgcggtgcggcatgtggagtgggcggcgcattgttccgaaaaggttcgcaatgggcggaagcacacaagccgaccggcaaggccattctgtggcagatgccgctggctggtctcatcaccggtttggtggcgattgttgtgccgcaggtgatgggcaacggccgtgccgcagcgcaacttggattcagcacgttcattcctgaaaccgccggcactgctggtgccatgcagtcggcatcttcagcggccgcctctccatggaacttgctgacgggcggcggtaatgtatccgattcggcctctggcgggggagcgggctctggaatggcctcgttttgggccatgcttcagggtgggagcggctcttctggatccgtgatgaacgccggtttcccgctgtcccagtccaatatctggatgttgctgggtgtgttggcactcacctttgtcgccaaggcgctggtgacgctgatgaccattcgctccggtgcatcgggcggtgtgctgcagcccggcatcgcattaggttccacgctgggtgcgatgctcggcctcgtatggatactgatgtttccgactgattcggtaaccgcgtgtgccttgatcggtgcggcttcgttgctttcggcctcacagcaggcaccgcttatggccatgtgcttggtgatggagctgaccgaagcgccgattaccttcttcgtgccagtcggcatggccgtggccacgtcgtcgttgatatcaaagtggttgctgagtcgtaagtaagtagatgcatatattctggctcccctctctgaggggagctgtcgaacacagtgagactgaggggagccgaggtaaagaaagctatgtcagaaaacaccgaagtccgtgcggcacttgaatcgcttgccgctgagccactcactgagcagattgactactatcgaaagccattcatggtgttgtgggccgccattcaggaggccgccagcgatgtggccgaagactacgacttgcctgcggatatggcccaattatgggtggccgaacagatgcgccaagtcgccgattcactggtcgatcggctcgcggaaaaagccgtggcccatggtgccagcaagtccaacgtggcgcgagccgccggtgccagccccgccaatgccgcccgtcgcttcccgcgtctgggcgacgatgccgcctcccagacccgcctcctcattgacgacgtcctcgacaccttggaataacccgaaatccctacgctacccgccaaaaagcacgcgaaaagccgccttcagtcgcttcaaggcggtagtctgaacaatgttcgagtaattagaaggagaatcaaggtgagcaatacctttgcgaccttgccggtcatggcgggcgatgacgtcccggccggccccgtcgacccgattttcaaccgtctgctcaaagaccgcatcatctggatgggtgaagaggtcaaggacgatatggccaaccgcatctgcgctcagctgctgatgctggccgccgaggacccgaagaaggacatctggctgtacatcaactcgccgggcggctccatcaccgcaggcatggccatctacgacaccatgcagctcatcgagcctgacgtggcgaccgtgggcctgggcatgtgcgcttccatgggccagttcctgctgagctccggcaccaagggcaagcgttacctgacctcgcacgcccgtgtgctcatgcaccagccctccggcggcattggcggcaccgccaccgacgtgcgcatcaacgccgagctcatcatggacatgaagaaaaccatgagcgagctgaccgctgagcagaccggccacaccctcgaggagatctaccgcgacaacgaatacgaccactggttcaccgcccaggaagccctcgactatggcttcgtggacaagctcgtgaccacgccggacaccatcggcaacaaccagcagggggagtgagactcatggcaagtgaagaagcaaagttcgccgcccgtgccgaccgcttggccggccgtcatggcgtagccggtttcatgccggccgccgcccgcgcagcccagcccgcgccgaccaaccgttacatcatgccgcagttcgtggagaagaccccgtatggcatgaagacccaggacgcctactcccgcctgttcgaggatcgcatcatcttcctcggcgtgcaggtggacgacgcctccgccgacgacgtgatggcccagctgctggtccttgaatcccaggatccgaaccgtgacgtgatgatgtacatcaactcacccggcggttcgatgacggccatgaccgccatctacgacaccatgcagtacatcaagcccgacgtgcagaccgtgtgtctcggccaggccgcctccgccgccgccattctgctggcctccggcaccaagggcaagcgcctgatgctgccgaacgcccgtgtgctcatccaccagccggccatcgaccaaggcttcggcaaggccacggagatcgagattcaggccaaggaaatgctgcgtatgcgcgaatggctggaggagaccctcgccaagcacaccggccaggatgtcgagaagattcgccgcgacatcgaagtggacactttcctgaccgctcctgaagccaaggaatacggcatcgtggacgaggtgctggaacaccgccagtaaaacttccgaacattgcaataccctcggtcggcaacgaccgggggtattgtatttcaaggatgacaatgataatgcgcagcgtggcggttcgacggtgcggcgcggtcggcaaaggagaatcatgggacgtgtggtgagctacaacgaggacgtaccccgttgcacgttctgcggcaaaaccgaacgtcaggtcagaaaactggtggccggtcccaacgcctccatctgcgatgaatgcatcgccctgtgcgtggacatcatctccgaggagcgtgtcaaagatgccgaggtcaattcgctgagcctgcccaagcccgctcagatcttcgattatctcaaccgctacgtcatcggtcaggagaacgccaagcgcgcattgtccgtggccgtatacaatcattacaaacgcgtcaatatggagcttcaggagtccgctgagcagcttgacgggaataacgggcacggtggccagaccggcaaacaagccaagcaatccgctcccgcccagacgcgtgctacccgccgcaacagtgaccctttggctgacgttgaggtcgccaaatcaaacattctgttgctcggccccaccggtgtgggcaaaacctatcttgcacaggcgttggcccgcgtaatgaacgtgccattcgtcatcaccgacgccaccaccctgaccgaggccggctatgtaggcgacgatgtggaaaccgtgctccaacgtcttcttcaagccgcggatggcgacgtaagccgagcccagcacggcatcatctacattgacgaaatcgataagatcgcgcgcaaatcaggtgagaacacctccatcacccgtgacgtgtccggtgagggcgttcagcaggcgttgctgaagattttggaaggcaccatcgcctccgtgccgttggagggcacgcgcaagcataaggagcaggacactgcgcagatggacacacgcggcatcctattcatctgcggcggtgcgttcgtgggactgacggatattgttcgcaagcgattgggccgtcgagagaccggcttcggcgcgaattggcacgacgccgacatgaaagacgaggaattgctcgaacaggtcaatgccgatgatctggccgagttcgggctgttgcctgagttcatcggacgtttgccggtcaccagtgtgctgaaggaacttaccgtagacgatctgacggcgattctcacccagccagccaacgcgctgatcaagcagtaccgtaagctgttcgccgtcgacggcgtcgacctgcagttcaccgaacaggccattcgggcgattgctgatatcgccatcaagcaggggaccggcgcacgcgggttgcgttcgattatcgaacgtacgttgcaggacacgatgttccagttgccgagtttggatgatgtgaagcaggtgattgtggacaaggcgtccgtagagggttccagtacgcccaaactcttgcgcgaagccgtggatgtgccgcagggacgcctcaaagttgcgtagtcggttttgcttgaccgagtccgtacacatgcggcgtgaggccagtaaatacgccgttgcggtggcgattaggatggtgcgactcgccgcaacacgccgagttgcattcatctgaacggcgtgtattatatatcgagttgtctgaaaagacaacatgcgccagtagcccagcggattagagcagctgactacggatcagcaggtcgcaggttcgaatcctgtctggcgcactcccgaaccacggggacaacagtggtatgcgccagtagcccagcggattagagcagctgactacggatcagcaggtcgcaggttcgaatcctgtctggcgcacagtaagcctcgaaagcgaaatgcttccgaggcttttccaattgtattggcccgtttgagtcggccacacaggggtggggtaaggttgcccttcgcgactcagcccggagcggaacgtcctgagatattccgtactattacatacggttcatccaagagagtacagcaaggagacgcgatggccacgaccgccggcgcgaagaagggactttggtccaccatcaggcgaatcgccgcctcagaccgtatttccggactcatcatgctcggcttcgcgctcaccggcctggtgctcgcgaacctgcccgccaccgcgcatgcgttcgagaccgtagcggaaacgcatctgttcatcccctacaccaatctcgacctgccgattggccattgggcccaggatggtctgcttaccatcttcttcctgaccgtgggcctcgaactgaagcaggaactcaccaccggctcgctcgccaatccgaaagcggccgccgtgccgatgctgtgcgcggtgggcggcatgatcgccccgcccatcctgttcctggccgtcacggcattgttctctcagatcgggcctggtgaacccggcacgctgattctgaccaccaccggcagcagcatcccgttctcggagatgtcgcacggctgggcagtgcccaccgccacggatatcgcgttctcactggccgtgctcgccctgtttgccaaggccctgcccggttcgatccgcgcgttcctgatgacgcttgccaccgtcgatgacttgctggccattattctgatcgccgtattcttctcctcgatcaacgcctggtattggttcatcggcatcgccgtatgcgccgccatctgggcatacctcgtacgactgaaaaaagtgccgtggattgcggtcggcatcgtcggcgtcctcgcttggatcatgatgttcgaggcaggcgtgcatcccacactggccggcgtgctggttggcctgctgactccctcccgtgaaatgcacggcgaactttcaccgcgtgccgaacgctatgccaacaagcttcagccattctccgcactgctggccctgcccatcttcgccctgttcgccaccggcgtgcacttcgagtcggtgagcccgctgttgctggcttcgccgttggttatcgcactgattgtggctttggtggtcggcaaacctttgggcatcatcaccaccgcatggctggccacgcatgtgggcgggctcaagatggccaaggggctgcgcgtgcgcgacatgattcccgctgccgtcgcctgcggcattggcttcactgtgtccttcctcatcgcctcgctggcgtacaagaatgcggaactttccgctgaggcgcgcttcggcgtgctggtggcctccctgatcgccgccgcgatttccggtgtgctgctgagccgtcagtccaagagattcgagaaggccgcagccgcagcagcggccgatgcggaggatgacgaatcgattgatggcgatggcgctggtcagaccggtcgcaccacaaagtccaccacgcccacggaacaccccggcaccctcgccgacggcaccgccagtgtggagattgacttccgccactgatggcttagacgatccctactccattgttggccttgtttcgtgaaaaccgtacgctgaggcgcgctcaccgtacgttcttcacgagatgaggccttatttcgtgaaaaccgtacgctgagtgtcactcaccgtacgttcttcacgaagtcaaggatgatttcgcggaaaacgtatgcagagcttcaggcgctagaatgcgaagagtcgatagcaccgtacaggaggatattggatggcaaagaagcagaagaaatccaagaagaacgacggcaaaaaggccgctgaagcaaagaatccagccgaggccgcatccaagtccacagtcgtggacgatatggaaccattggaagccacagccgcgaatgatgcggcaacgttggaggccgagacggcaaccgaggctgccgcaacgccggtgaacccggtcgacttggaggacgtctcgccgctgggcgacacctatcatcgcggcccggtgattctacgcggccagatgattccctcggacaataccaccgccaatctgctgaaacccgaccaggacaccgactggctgcacatggacccatggcgtgtgctgcgcatccaatcggaattcgtggacggtttcggggcgctcgccgagctcggacctgcggtctctattttcggctccgcacgcacccagcgcaccgaatcgatctacaaggcggcccggcgcatgggtagccagatagccaagcgcaacatcgccgtcatcaccggcggtggtcccggcatcatggaagccgcgaataggggagcggcactggctggcggcaaatccgtgggactcggcatcgaattgccgcacgagcaggggttgaaccagtgggtgaacctcggcatgagcttccggtacttctttgtgcggaaaaccatgttcgtcaagtattcctccggcgtgatcgtgtgcccgggcggcttcggcacactggatgagatgttcgagctgctgaccttggtccagacccacaaggtggcgaatattccggtggtgctctacggcaaggaatactggcaggggctctttgactggctcaacggtccggtggccgagcacggcatgatttcggcaatcgacccgaaactggtcaccgtgaccgatgacgccgacgaagccgtggaggtggccgtcagtgcaattgtgaggtaagcgagatagagtggctcccctctccgaggggagccaagggcagagttactttttgtaggcgatgagcaggcctgtgccgtcaggggtaagcgtggactcgaaaccttcgtcatcttcgacggtggtgagcagctcacgcatggcgatggccttgtcgctgcggtcggccggattaatcatgccgccctgaccgtcctccaacgccagcacatcggtgaacacgatcacgccgtgcgcgcgcagcagacgggaggcctgggcgaacgtggcggcatagttctcggcgtcgcccgccaccacgatcagatcgtaatcattggcgttgaggcgcggcagaaacacgctggccggggcgttcaccgcacgcaacgtggtgtcggtctcatcctgcagttcggcgaacgccttgcgaatcagcgcgatgccctgagcggtggaatcgaccgcagtcagcaggcccttgttatccagcgcatgggcgagctgcaaggtctccaccagcgagccggtgcctacggcgatgaccgaagcggcgtcggtgatgcgcaccagcatgcccagcagacgggcctgcgcggccgaaccctgcaactggccggacttgtcggcggccgtacgggcgtcggtcaacgcattggattcacgttcgcgcgcgtgttcctcggtgaattcccatgccttggcgaggttggtgtactgcgttctgtccataattcgttcctttatgtcttctctcgtgcgggcacccggtggatgtatcgactacgtgttgcagcgattgccgtagctggtcgtggcgcggcttagcgctcgcggaccttggccacgatctgccacatctcctcgcccacatcgatgccgcgcgggcagtggcgggagcaggcgcgcacggactggcaggcggccacgccgtcggcggtgtcgatggcgtccatacgctccatggccttggtgtcgcgcgaatcgttgacgaaacgggaggcccaaatcagcgaggccgggccgatgaaagcgtcgccgccggcgtacaccgggcaggcgccttcgcacacgccgcaggcgatgcagttgctcagcagctcgtatttggcgagttgttcggggttctgcaggtattcgaacacgtccaccttgccttcggcggtggtggcgagcacgccgtccgcctgaagatatggggtgagcttccttatttggttgagcatcgggtcgatgtcggcgatgaggtcgcgctgcggcgggaagccgggcagggatgccagttcgatgactcccagcgagccgtttgcggccgagtcctggtcggctgccgcgtttgcgtcgttttccgcggaatcgtcggattcttcggactcggtgccggtgtgccggaacccttcgtcatcgacttcggggatggcgccgggctgcttggcccaatcgcggatggtggccgtgcacagcagggtgggggtgccgttgatggccacggcgtccgaaccgcacatgccgtgaccgcacgaatagcggaaggccagcgtcgggtcgacggtgcgtttgatggtcagcaggcagtcgagcacggtgtccgaggggcgcgcgggaatcgtgtattcctgcacccactgcttgccgcgcggacgacggcgtgccgccgaatccgagccgccgccgaatggggagcttttcttggcgaacgggctgccgccgcgtgcacgttcggcgcgctcgggtcgcggcgtgaaacgatgcacttgcagggtaaccgtcgtgttgctcgcctcagccatgttctgcctccatgaaacagtgggatgtcaagtccaatatcagccaacctattgtgccacaagccctaggcggcttggtattaccaccagcggatcagtactcgcgcttcttgggtggatagtcggtgatgtgcactggcttgaaacttgccggaccatcatcggcgaccatcgagtgagcaaggaaatgctcatcgtcgcgttcggggaaatcaagtcgttgcatggatccgcgggattcctgacgggattcggaagcgtgcagcatggcctcggccagttcgattagatgacggacttcccagatggcggtgacctcctgattgaaagcggcggtcttgtcatgggcccgcaaggtatcggcaaccggtgtgatgtcgttgttgatctgagtcaacgccgtatcgatggtctgagcggtgcaacgtacggccagagcctgctccatcactgatccgagttgggccatgagctgataaggattggcggtgggcccgccatcgtctgaatcgtccatcggtccggcgagcagttcgtcaagctctgccttgcgggaatcggcagcctgatcggcggcatcggtcagcatgtcatcggtcgaatcatcggccatgggggagtcaaccgggttctcgacgatgcgtgcggccatcgtctgaccagcacgtgtaccgaacaggcaggcgtcgagcagagaattgccgcccagacgattcgcaccatgtacggagacacaagagcattcgccagcggagaacagtccatcgactacctgcacggcaccgtcggcccaacggtacacctcgccattggtggtgatggggatgccgcccatcgtgtaatgcgcagtgggcttgataggcaccaggtccttggccggatcgaggttcgcgtactgttcgatggtttcgaccacctgcggtagcacttccttcatacgttcggggtcgatgccggtcatgtccagccagacgcagtccttcggaccatccgggtccttcgggtcggcgacgccgcggccggcgtcgatctccgccatgatggagcgggagaccacgtctcgcgcggccagatccctatgctccggggcgtagcgttccataaacggctcaccgtcggcgttcctcaggatgccgccctcggcgcgggccgcctcggacagcaggatgccggtgtgcgcgagcccggtggggtggaactgcacaaattcgatgtcctccagctgcaggccggcggccaaggccaatgccatgccgtcgccggtcaggtcccaggaattcgatgtggtatggaacagtcggcccgcgccaccggtggcaagaagcacgttgcgcgcgtggatggcctgaatcttgcccgaatgcgtgtcaaatgccacgatgccggccgcctgcttgccgtcgtcggcgagcaccaggtcggtcacataccattcctcggcgaactcgacgccggcggccacgcactgctgccacaaggtgtgcagaatctggtggccgatgcggtcggccgcataggcggcgcgcttgaccggggcaccgccgaactcgcgcgtgtggccgccgaactggcgctgggcgatatgcccgtcatcggtacgggagaaggccacgccctgacgctccagattgatcacggtctgcggcgcgtattcggcgagcagtttggccgcgtcctggtcgacgagccagtcgccgcccttgatggtgtcgtagtaatgccagtgccagtcatcggactccacattgcccaggctcgcggcgatgccgccctcggccgaaccggtgtgcgaacgcagcggctgcagtttggagaccacgaggatcttcgggtccacgccttgttccttgagctcggtgattttgggggagcgcagcagtcccaacgccgccgacaggccggccgctccggcgccgacgatcaccgcatcatacatatcttccaaacgtttcggactcatgggttcgattctcgcacacccgccgaacagtcttcgagccgtgtcatgaaagccgattagccgacacggctgctcagcttgagtatgccggcatcccgctcgatcactcccttcagctccaatgcgccgagtagctcaagtatggtgccgatattgggaatctcgtcgggtaccgtctctcgcgccacacgcaatagtgcgtccggggtgacgatgagatgtcgtttacggcattcacgaatcaatgccactaatgtgcgttccatttccggcagcttggcgataatgatacgttgttgggcttccttctcgggatcgagcttcggcttgacacgaagatccggcatctgatgcgacgagggcggctcttcacccttgctcttgttggcaccggcctcggtagttgcgctcgccggcccatccttggattgaacgagtgtaggctgagtatgcttggtcctaagacgtttcgaatgacctgaatcttgtgacgactcctgtgacgccgatgattccgaggatgctggcgataacggagtcgttgccggcacttccatggcctcctcgttttcggacgagtcctgacctgtggatttcggtatgcctgggcatgccgccataacgggcttatgccgttcatggcatatatcctcagtggatgtggcggcacacagaatcatcgcccggtggtcgccgatcatcttattgcacccggcgttgcaaggctgattgatgtcaccgggaaccgcatacacttcgcgcagcaattcgcatgcccatcccgcggtgttgagcgctccggaacgcaaccgggcttgcgtcacaatcaatgtggaagacatggccgcgataatgcggttgcggagtagaaaacgacgggcttcgggaatcgtccctgggcacagttcactgatcagtgcaccaccctgcgcctcgatacgttcgaacagcgtgcggttacgcatcggtccgatatggttgagcccgccggcgaatacggcaacggttctgcccacattggcgggcattctgccgtgcagcgcattcaacgctccccaatgtgccgccgcatccgtgcccattgcgcctccggacacgaccagatgcccggcaacgactgcctgttcggctacggtgtgtgccacataccggccgtattcggtcacgtcccgtgaaccgacgatgccgaccggtttggcgcaactggtcaatgcgcgtggatcgcctttgatccacaaacacagcggtggcgcccaatcggagcgaatggacaggtcggccaactgcgagggccaacatggatggccggggccgataatccattgcgtgccatccatagtgaaccagtcgcccagttggatgatgtcttgcgagggcaggtccatcatgcggttatgccagccggccagtgcattgcggaaggagcgcatcgcgttcgccgacgccttgcggccccatcgggtgaggccatccacgaacatgcggtcaatgcgtgacagcgccgggccgcagattccagatggctggcttggatgggattgcgccaacgcgtgccagagggattcggcgctttccgcgcctttgagcgtggcgtacatcatcacatccgccccatcaagacagaacgtgagcgcggcgcggtacaacgtatccgtgggaggcatgggaatggtgcgcgaaacagcgaggcccgtatcggtgtgatccacactgcctgcggtgccgccagattgtcggatatcagtagcgttactcatgtcatcctcgttctcatttcgatgccctgatggacgtcctgctcggtgggggacacgcggccggccagatcggcgagcgtccaagacagacgcatggcgcgatcggccccgcgcaatgtgagttgatgattggacagggcccgattgaccaattccatcgctttcagcgacgtattggcatgcagccatttgcccgaagcttgcgcgttgcacacccatccatactgtctgaaccggtccttggccacttgacgggcgcgaatcacacgagcttgtatcccggcactggactcgccgatcgtctcgctctgcgcggcaatgcgcgagaccggtggcaccgccatctgaatatccacacgatccaatatcggtccggacaatcgcgagaaataacgtatacggtctttttcccggcaagcgcaacgttcgccggtgccgtaatagtatccgcacgggcaggggttggccgccatgatgagttggaatgaggccgggtaataggtgctgccttttgaacgggaaagcgccacatacccggattccaatggttcgcgcaacgtctgcagggcgcgtgcgctgaattccggtgcctcgtccaggaacagaatgcctcgatgcgcgcgcgtgatcgcgccgggaacggcgatgccgttgccaccacccaccaaggccgccgtgctggcggtgtggtgcggtgcctcgaacggcggcatgtcggtgatgccgtactgaggcagtatgccgcacagcgaccgtatcgacgccacctccagttgttccgcctcgttcaacgggcacatgatgccgggcatacgtgaggccagcatggttttgccgctgcctggcgggccggtcatgatgagattatgtccgcctgccgccgccacttgcagcgcccatttggcatgttcctgacccagaacctcgttcatatcgccacaatcgttgggatggcttgtgggcgattgatccatggtggtctcgtcggcaaccggtgtatcagtaatcgtataggtggcatcgccgcccatcagttcgatgagctcacccacatgcctcacacccactacatccagtccatccaccatcgaagcctcgtcaagattgcgatggggaacaatcattttgcgcacgccacgttcttcggcatgcagcatgatcgggagcagcccatgaatcggcagcaccgagccgtcaagattcacttcgccgagcacaatggtatcttccaagcaatcatgccctatggcacccgccgcgcataggacgctggccgcgatggccagatcatgcgacgaaccacgtttgggcatggccgcagggctcatgttcacggtcacgcgggtttgcggccaaccgaatccagtggcttgacacgccgatttcacgcgctcgcgggcttcggacaacgatgcatccggcaatccgatgatgctgaagtatggcaagccagggctgatgaaagcctgcacttggacgatgaaggccttaaggccgatcagtccgactgagagagtgctgccgatagccatgtctactcctttcgcaatgtgtttcgcaacgtggctgtttttgggggacgaattcagaaggcgttttcgatgtgatgcacgagcggtctgcccacccgaagcacgatggtgacgacatcgaaacggactgccgtatgcggcacacgattacgccggtcaagcagccaatcgcaggcggctttcctgagattgtgctgtttcgccggcgtgacggcctcttgcggatatccgtaatgcatggaccggcgtgatttcacttcgacgaacaccaccgtgtactcgggattgagcatcacgatgtccaattcgccgtaacgggtatgccaattgcggctcaaggtcgtccaaccgtgttcctccagccacgcggcggcatactgctcgccgagcgcaccgaactgtttgggcgtcagattgcggtcgcccatcgtggccgcaatccgttccgaaggcagcgttgcctgcggatcaggtgaagccagcatgggctggtgaaaggcaagaccggcgtcgatgccggacttcgtcgtcggctgggtaggtggtaaagcgttcatgattccactgtgcgggttacttatgtaagagcacaagcgcaaccggcaaatgtggatactatgacgcggtttggcgtgttgtggataacgtgtggatgaaaacccggttatccaccattagttcagaaggtttaccaaggctccccagccgacttacctgtgacgacagacaacccgccgagttgttcgctgaatacgtcagacccagtgagcggagaggggagccaaggtgcggtcacttcaccaaatcggtgagttcgccaaggttcagttcgaagctgacgccacgatcctcgaaatgcggctggttacgggtgctgaccatggcgtggcgcacgaactcgccggcgatttcggccgactcggccaggccgcggccggccatcaccgcgccgcacagggcagatgcgaaggcgtcacctgtgccatgaatcatgtatggcagcttttcatgagccagctcgatcttgccggcaacaccggtggaagcgctggccacatagttgacgattttgccatcgccatggtcgatgcccttcaacaccacgttcttcgcgccaagctccagcagcgcgcccaacagctcgtcaaccgtggcttcatcgatatcctgaccggggtagtcacgcttggtcagaatgctcgcttcggtgaggttcggcatcagcacatcggcgccgtcggccagcgcacccatcgcctcgcacagttccggcgtatacgtgggatacatttcaccggcgtcgcccatcacc

SEQ ID NO: 1831 - DNA, 18460 bp, Unknown
  MAG_14  MAG No. k141_46733
cccaggaagaagccgaacggagagacgcagcacgggatgatgatggagagcatcgtgttggtcaggtgcagggtgtggaaaatcgagtactgcgggatggtcagcagtgcggcgggcatcagcatgcaggccatgatgacgccaatagccgcgttcttgccgcggaagttgaacttcgcagtggcgtagccagccatcacagacacgatggtgccgatcaatgccgagacgcccgagtagatcagggagttcagcacccagcgccagaagttgccacgagtccagccaagcagcttggaatagttagtggcgatggcattgggcagctggtcaagcggcacagcaaaccacatgccgttgctaccggtcatctgggccggcgtcttggtggacgcgatgatggcccagtaaatcgggaacaggaagtagatcaacaccagtaccagcagcaccacggtgagggtcttcacggccgcggacggtcgcatggagcgaggcaaatcgtgttgcgcagcctgacgctgcttttcgagcttgcgctcggcctttttgcgggcgcgttcttcaacggttgcggagctcattactcgttcaccttcctttcggccaaggtgtacagcacggcaagcacacctgcgatcagagccatgacaatggcgatggccgaggccggaccgtcaccagacggggtaatggtgccctgagaagtgttcatggccatcatcatcggtgtatacgacttggaaatacccggatcagccgtagacatgatctgcggttcgttgaacagctgaatggtgccgacgatggaaagcagcatggccagcagggccgcgccacgcacgttcggcagcttgatcttcgtggcaatctgccaaccattggcgccgtcgatacgggcggcctcatagaggtcatgcgggatggcctgcagtgcggcaaggaaaatcagcatgttgtagccggtgaaggtccatgtggtgatgttggccatcgagccgagcacgatgttcttgttgaagaagtccacattgacgccgatggcggcaagtcccttgacgatcggcgagatttggccgttgtacaggtagacccagataatcgaggccacgacgccggggatggcgtagggcaggaagtagcccagacggaaaccggtgacatgcttgaccacgaacgagtcgatgacgatggccaacgccagtgcggcgatgatcatgatcggcacctgaatcagggtgtagagcagcaccctgccgacgccggaccagaagttgccggaagtaatagcatactggaagttctggaatcctacgaatttattgaccagctcgccaccgccgtatgcgccaccgccctcggtgacctgacggaagaagctggaatagatggcccagatgatgggcaagatgaacacgaaagtgaacaggacggcgaacggtgccatgaacgcccagccggtgcggttctcgcgcttctgagcgccggaccgcttcggcttggcggcggcacgcctaggtgctttgcccttcgcctgagtagtggatgcagtcataatacaaaacctgtcttcgcaaagaacagtaaaacaaatgacaagggccacagcgcccctgcagcaatacccccaaacaatacggaaggccggagtatgtgccccggcctttcgctatggtgatgcgaggcatcggaggtcttggacggccggctatttcaagccggcccgttgacaagacctagtgaggtcactccttgacggacagaccgaggttcttcagcgtatccaccgaggtcttctgagcggtgtcgaacacatccgaaaccttggcagaaccatcggcagccttggcggcggtctgtttcattgcagcgccgactgcggagaagccaggcatgtaggtgaagtcacccatgttgtcgttcgcggtcttgaactcagccatgacatcctgtccgctgaagtagtcggaccacttctgcggggtcttggcatccgcggtggtggcggccacgacaaggccctgggagacaaggtcatcaacctgggtgttgaaccagtcaaggaactccatggcttcggccgggtgcttggaacccttgagcacggccacaccggaaccaccatcggcgccggtcttggtgccattgccgaaccagtcaccgagctgggtgaccttccactcaccagcaccagtgccaccggcggaatcgatgaacagtggggcttcccaagcggcggccacggtgccgatcagctgaccggactggatggagttatcaaacgatgcatcccaacgcgggttggtgagggcggccttgttgtcgatcagctgctggtagacatcggccacggccttggagcccttagtctgggtgttgacaacccaggagttgccgtcgaccttgtaccacggaccggaagcgccggcctggccggacatcatcatcatggcctcatcaggttggaaggtcatgatgtacttgccttgggcagcggtcttcttggcggtctcaatgagctcgtcagcggtcttcggcacggtgatgccgagcttctcaaattcagcggcgttgtagaagtaagtcagcgggccggtgtcctgcggcagaccgtaggtcttgccgtccacctgcatcagtgcgaacgggccggaagcgaaatcgtccttgtacttggcggcctcatcggtgacatcctgcagaaggcccttggtgaagacctcaggaacctcggagtaaccgacctgagccagatccggcgcattgccagccttgacgtcggtctcgagcttcttgatcatgtcggcggcattgccatcgaacttggtggccttgacctgaatgttcgggtgctccttgttccacttggccacaatgtcgttgaccaaggtcatgccttcggaatcgggcagacgatgcatataggtgatgttgaccacaccgccatcgctgccggacttcgtgtcgccggcagtgtcgctgccgccgcaaccggccaaaccaatacccattgctgctaccgcggcaagagcagccacgatgcgcttgttgtgcgataccatatctctactccttcctagtgaaatcatcacctcagcgtgatgactgattgctaatttaggcctttgctcttttattgtcaacttagctaacaattaccgcgcgtcccgttgaggtgagtggcattaaaccgattcgatgctcgattgtgcgggtttgttcatttcattaactccccttacaaagcaacgtacttttggtccaccggtagacctaatgagatattggatagcggcaacaatccaaggcgttagcttgcaatcgtccaccacaaattgcaagcacttgccaacattatcggttttcaggttgccggcgcaatacccgactaggggggcaccgcgccttaatgagacgctacacgagcagtctcagcaactggtagagctgccacaggctacgcacgttgaagcgcgtgccgtcaaccgtggcgttcgcctcgccatcgcccacatggacgatcacggtgcgcccgttcacggtcagattaccgtgcatcgtgatatgattcatcttgcaaccttgttgattaaaggcgcaagccggtaatcaacgcaaaggcccgatgccgcaaacgtcgggccttttcttatcggctcacgccgattggcccgtcatatcaacggggacaccgcatgttacggcatcacaaaccaatatatcagcaccccggtggcgatcaagaagacaggttccagaaaaagaaaaagggcctgggcatgttgcccaggcctcggttcgcggacagggcgagattcgaactcgcggagggttgcccctcaacggttttcaagaccgtctctttaggccgctcagacacctgtcctgatgcgcgttcacacgcgcaagtattcattatacagaagggagggatgttgatattcggcagtgcggtcggtcttggattcgcctgctggctattagcgatctctccctcagtcagctacgctgacagctcccccattaaagggagctaaagcacgatgagactcaggcctcccacttagtgggctcgatgacttccttgccgcccatgtaggcgcgcatggcctgcggaatctcgatggagccgtccttctgctggtggttctccatgatggcgaccagccaacgggtggtggccagcgtgccgttgagcgtggagaccggacgggtgccgccatcttccatacgctcgcggatgttcagacggcgagcctggtactcggtgcagttcgaggtggaggtgagctcgcggtagcggccctgggtcgggacccaggcctcgcagtcgaacttgcgggcggcggaggagccgaggtcgccggctgcggtgtcgatgatgcggtagggcacttcgaccttggcgagcatctcctgctccatggccagcaggtgctcgtgctccttgtaggagtcctcctgcttggcgtagacgaacatctccaccttgtcgaactggtggacgcggatgatgccggaagtgtccttgcctgcggcgccggcctcgcggcggtagcaggaggaccaaccgcagtagcgcagcgggccgttgccgaggtcgaggatctcgttctcgtgcatgccggcgagcgccacttcggaagtgccgaccaggtactggtcgtcgggctcgcgcagacggtagatctcgtcggcgtgggagttcaggaagccggtgccgcgcatgacctcggggcgcaccagcgtcggggtgatggccagcgtgaagccgtgctcctcggcctggtccacggccatggtgagcatggcgatctgcatacgggccacctggccacgcaggaagtagaagcgggagccgccgaccttgacgccgcggcgcatgtcgatgccggccacgccggtgccgagggtcaggtggtccttgggctcgaagccttcggccgcgaagtcgcgaatctggccaaccttcttgacgaccacgtagtcgtcctcgccgccttcgggagcttcgggctccacgatgttggagagcttccacatggcggtggtgtattcctcggcggcggaatcggccttggacttgtattcggagaccttctgggacagttccttggtctcggcgatgagcttggccttctcgtccgccggggcggaggcgaccttcttgccgatttccttctgctgggcgcgagcctcttcgaaggccttcagcgcctcacgacgtgcggtgtcggaggagagcacttcgtcgacgagttccacggactcgccgcgcttgcgctgggattccttgacgatatcggtgtgttcacggatgaattgaatatcaagcatgggcaccagactagccgcgtaagcagacaccgacaatggccgaatgcgcgggagtcacgcggaaatcacagggaagcccggaaaagtccgcggacgggtccacccggccaatttcgtcagatgagacgcgattgaaccataatcgcgccccacggggctgttgcgtgcaggaaatgttcacgtacggcgcaccatggccgcaaacgacctccccaccgataacaataggagccatgcctcagcctgccctcaccgtgtttctgatcatcgccgcaatcgccattgtggtggtgctcatcgccgtcatcgtcatcgccctgcgcgcgcagcgccgccgcaagctggctcagacgctggagaagcgccgggacgacgaggtgcagtacgccttcatcgtgaatccgtccaaaccgcaggccgaagcccgccggctgcatatccagaggttctgcgaggccaaggggctcaatcgcatccgcttctacgacacccagcttgacaaggacggcagggtctgcgcgcttgaggcgctggaggacggcgccgacgtggtgatcgcggtcggcggcgacggcacggtgcgcacggtggcgagcgccgtctccggcaccggccatgcgctgggcatcatccccatcggcaccggcaacctgtttgcccgcaatatgggcgttcccgtggacgatatcgacgccgcgctgaccgtggccacctcccacggctcccgcctggtggacatgggccgtctcaccctgctcgaccacccggaggacgaccacggccacgccttcctcatcatcgccggcatcggcttcgatgcggccatgatcgacgacaccaaccccgagctcaaggcgaacatcagctggctcgcctacttcgtgggcggcgtgaagaacctgttcgcgccgaagttccgcggcacgctgacagtcaccagcgccgacggctcgacccacaccatcaagaatctcgatttccgcacggtgatggccggcaactgcggccagattcccatgttctcgctgatgccggcggcatcctatgacgatggtctgctggacttcgaaatcatcgacaccaccggcggcatcctcggctgggccaacctgttcggcgacgtggtgcaccagacgatcatcggcaagcccgaacagaacccgctgtccacgaactcgaccatcgaacaggtccagggtgtcagtgccgaaatcacattggaaaagccggccaaagcgcaggtggacggtgacatgctgccggaaacccgccacatccgtttctcggtggatcaccgcgcgctgatcgtgcgcgtgcccgacgcctccgcgctggaaaagaccgcgcaggccgctgcttcaaatgccacctcgaatttcgccgaaatgaccggtacactcgagccgattcgctgattcgccaatccgctaatccgttactacgatgcgtggccggtgactcgggcgacatgcatcgccaaataagcgatttcgtcgtcgctgatatccgtgtcgaggcgcagttcgagcagggaggcgatggttcgcgcgcatcgtagcgcagcggggtaggactcacgaatcaccttcatcaccggtgccggctcgtccgtcagttgctggtgctggtggatgcgtacgaacaggtagcgcaggtgggtgatgaaccggcccacgttcacggaactgcggtccaacgtgatgccgtagctgtggtcgatgatgtcaagcagttgctggatcacgcccgtcatcgtgtacgtataggacaggtcgccggtggcgaagccggcgttgaccagatgcatggcaagcgcggtggcctcgccgtccggcagcgtgacgtcgagccgtgcattgagcgatgcgagcatcgcacgcccctgcgcgtattcctgcgggtacaggttgctcacctcgccgagcagcgggtaggtgatgtcgatgccgcgccgcacccgctccaccgcattcgccacgtggtccgacagggccatgaccagcgtggtgctgccggtctcgcgctcccccagtccggtctcctgcatggattcgacgaccacgcggatgatttcgggcggaatgtccgccagcatctgcgccagatggtcagggtcgcgcccgtccgatggcacgaaggtgcgcacaactttcgactcgtcgaccgtctgccccggcttggcctggaaccccagtccgcggccggtgagaatcacctcaccgccgtcgccgcctttggcgagcacgacgttgttgttgaacactcgcagtatttccatggcatcctttcgcaacgtcattgttccacatcgatgatcgggctgccggctgatacggttttgcagtcgccgccgttgtcgtcgctgctaccgtcgccgatcaacggcgtgaccacggtcagttcagcggcgttgaccaccgtcaccaccaccacaacgctgtgcccggccgccgcgactttgccgaaatccacggtggccagtggctctcccgccgcgatccgctcgcctttgcccacggccacgacgaatccctcgccatccatattgacggtgtcaatgccgacatgaaccagcacttcgatgccgtcatcggttttaatgccgaaggcatggccggtccgggccacggttttcagcgtgccactgaccggtgctagcacggccgtctcgccggccgtctccggcacgacgcctacaccctcccccagcgcgcgggaggcgaacaccggatcgccagtcgcttccagattcatcaaccggccggcgaccggcgacaggatggcgttggagtcaggagtccgatcggaggcaggccgcgatggggaatcttccgcagactccgcatccgacgatgtcgcgccaatccctctcaccgcatcctgcgagcgtacgttctcgcccgccgagaccatctgcgcctccgtggcgcgcggcggcgtacggtacccgaacagcaccgtcagcaccatcgccattacaaacgcaacggcgatggacagcgcgtacacccacattctgtcaaacaccgaaatcgtcagcaacgaggagaaggcgaacgccgtagtcgtgacgccccggaccatctgaccggatggcagcacggacgggaacagccagccaagcaccgcgctggtcacgccgccggccgcgcagccggcgagcagccagcggtagacgcggcggtgatgcagatggatgccgtacaggctcagttccgaaacgccacccagcaatcccgcgagcaacgcccccaccgcggtctgccgcatggccgaatccttgccgcgtacggccagcacgagcacgccagcggtggcaccgaagcaggcaaagttccatacacccatcggaccttggacgaaatcgtagccgagcgcctgaatgttcatcagcatcagggcattcaacggccagtgcagaccgagcggcacgagaaacgggtagagcatcgggatgatgagcgcgaataggaacggcacgtgcgcgttaagccatgctgtggccgctcccagcccaccgccgagccatattcccagaggcccgatgaccagtatggtgagcgcaaaaacgacgaccagtgagaggaatggcacgaacaccagctgtacgctgtcgggaatgacgcgcttcaacccgtggtagaccacggcgagcacggcagccatgagcaacggcacgaagacgttgccgccgtagtcgttgagttgaatcggtatgccgaacgccgacacggtgcaggtttcggcgccgaatacggcgttggccgagcattgaatcgccccggagagggcgctggatacggacgtcccggacattccggacattccggacatcacgccagtaaactgcggggtcatcagcgcggccataatcgcgccgccgagccaggggtcgacgtccagtttcttggccgcattgtaggcgatcataatcggcagaacggtgaacacaccctcccaaatcgccttgagtagtatccagccggcggaggtctcgccgtcaggcacgatgccgagtgcaacgatcacgttgacgatggcgatgaccagcgaggcaccgagcagtacacccagaatcgggcggaacgagtcagacaggtagtcgaaaaacgcggcagcccaagcgcgggcggcactgccccactcgcggacggtacgaggcgtgaagtgacgggatgtattggatgggccgcaactttgttcggcgtcggtggcagtatcgcgcgatggtgcggcatcgtcggaaaggtacggcgcggactgcgcgggctgtgtggattgcgctgactgcgcgggctgcgctggctgagtgggctgcattgactgagtgggttgcgttgactgcgacgctgactgcatcactgccgatggcaattgcgctgccggcatcaatcgcgccgtccgcagccgaacgatctgctcgtacaccgaggcgaccgctccgccgatgatgacctgataacgattgccggctcgcgggaatgcaccgaggactccggggacggattcaagaccgtgctggttgacatggccggcatcggccagttcgaagtgcagtcgcgtggcgcaatgggtcaggctggtaatgttcgcggggccgccgacggcatcgacgatgcgcgccgcaatcactgcaggcgttgcgttcgatgcgttcgccacggttcctccttgctgccgtatgccactgtgttccattatcggcgctgggtgccccaaaagcacggcaatgccggcaaagcatcgcgaaacggcaactatgcgctacggtgctccgcgatggtgtcccgccataatgttccgcgatgatgcttcgccacacccgttctccgtatttgccgcagcgcccattccgacatcattccaccatgcagaatcctgcaatcgttgtcaaaaatcatcgttttttgctgcctattcggagtgtcgcgactgcggaagtcgtattctatctttcacacacgttgcgtagcagggttgttactcaaaacgaggcaagacctggagcgacgtggaatttgcgtatcgtaatatgcgaattccacgttgttccaggtctttttttgttttcgggcgactgcagacaatcgaagcctgaccttgcacgcggcagaggggccacgcaacaggcgcggtccgtcaacggcgaaaggacaaggcaatgacgacgacaacggcatcacccgtatcgaaacagacggcatccgcggcgcaggaaaccagcgcaaccggtgcggcggccaccgcaatcgaaaccatcgaaaccggcgtggccggagtggcgggcgcggccacaaacgcggcagccaacgcaatcgaggacctcgaagccgccgaatcgcacggcttctccacgcgcttcccgctcaacagcgcattcatcttcaccttcggcgcgctcggcggcatgctgttcggtttcgacaccggcatcatctccggcgcctccccgcttatcgaatcggacttcggcctgagcgtctctcagaccggcttcatcacctcctcggtgctgatcggctcgtgcgcaggcgcgctgtcgatcggcgcactgtctgaccggttcggccgcaagaagctgctcatcgtctccgcgctgctgttcctgctcggctcaggcctgtgcgcctcctccaccggattcgcgatgatggtgtgcgcccgcatcatcctgggtctcgccgtcggcgcggcctccgccctgaccccggcgtacttggccgaactggcgccgaaggagcgtcgcggctcactgtccacgctgttccagctcatggtcaccttcggcattctgctggcctacgcctccaacctcggattcctgaaccacaacctcttcggcatccgcgactggcgctggatgctcggttcggcgctggtgccggccgccttgttgctgctcggcggcctgttgctgcccgaatccccgcgttatctggtgaacaagggcgacacccgcaacgccttcaaagtgcttacgctgattcgcaaggacgtggatcagacccaggtgcagattgagctggacgaaatcaaggccgtggccgcacaggacaccaagggtggtgtgcgcgaactgttccgtatcgctcgtccggcgctggtggccgccatcggtatcatgctgttccagcagctcgtgggcatcaactcggtgatctacttcctgccgcaggtgttcatcaagggcttcggcttccctgaaggcgacgcgatctgggtgtcggtgggcatcggcgtggtgaacttcgtgagcaccatcgtggccacgcttatcatggatcgtttcccgcgcaagggcatgctgatcttcggttccatcgtgatgaccgtttcgctcgcggtgctcgccgtgatgaacttcgtgggcgacgtggccgtgctggcagtgccgacgatgattctcatcgctttctatatcctcggctttgcggtctcgtggggcccgatcgcctgggtgcttatcggcgagatcttcccgctgagcgtgcgcggcatcggctcatccttcggctcggcggcgaactggctgggcaacttcatcgtctcccagttcttcctcgtgctgctcgatgcgttcggcaacaatgtgggcggcccgttcgcgattttcggcgtgttctcggccctgtccatcccgttcgtgctgcgcttggtgcccgagaccaagggcaagtcgctggaggaaatcgagaaggaaatgaccaagcgctagacaaccggcacacgattcgcacaaaagttgacaactcttaacataagagtacccaaagtggcgaaaaacgtggcagaatagggaacatggtagcaaacaatgcgggtcagcccgccaccccagcagatctgattaatgtcgatgaggttatcggcaagtactatgacctcgtccccgatcccgaagtccccgagcagcgtgtcatcttcggcacctccggtcaccgcggatcgtccctgaagacctcgttcaacgaggcccacatcatcgccatctcccaggccatcgccgaataccgcaagaaggccggcgtcaccggcccgctgtacctcggctccgacacccacgcgctgtccggcccggccaagaagaccgccatcgaggtgctcgtcgccaacggcgtgcacgtgcgcgtcgactcccgtgacgacttcgtgcccaccccggtggtctcccaggccatcctgacccacaaccgtgcggtcgacggcacccagcgcttcgagggcgagggcctcgccgacggcatcgtcgtcacgccgtcccacaacccgcccaccgacggtggctttaagtacgaccccgtcaccggcggcccggccccggccgagaccaccaacgccatcgccgctcgcgccaacgagctgctcggcgacttcaagtccatcaagcgtgtgccctacgaggaggccatcaagtccgagtacgtcgagggcttcgacttccgcgagcactacgtggacgacctggagaacgtcatcgacttcgacgtgatccgcaactccggcgtgcgtctgggcatcgatccgctcggcggcgcttccgtgaactactggccgctcatcaacgagaagtacggcctgaacatcggcgtggtgcgtcctgaggtcgacccgacctggcgcttcatgaccatcgaccacgacggcaagattcgcatggacccgtcttccccgtacgccatgaagggcctggtcgacgagctcaacgccggcgcttgggacaagtacgatctggtcggcggcaccgacccggacgccgaccgtcacggcatcgtctgcccgaactggggcgtgatgaacccgaaccactacatcgccgtgtgcgtggagtacctgttcggcggcaaccgtccgggctggcctgagggcgcagccgtgggcaagacgctggtctcctcttccctgatcgaccgcgtggccgcatcgatcaacgcgaaggtcatcgaagtgccggtgggcttcaagtggttcgtggacccgctgttcagcggcgaagtcgccttcggcggcgaggagagctccggcatgagcttcctgcgcaaggatggccgcgtgtggaccaccgataaggatggtctgatccccgacctgctggccgccgagatcactgccaagaccggcaagaacccggcccagcttcaccaggagcaggtcgagcgcttcggcgagtcttggtacaagcgcgtcgacaccccgaccacactggagcagaaggccaagttcgcggcactgtccggcgacgacgtgaccgcctccaccctggctggcgaagacatcaccgccaagctgaccgaggcaccgggcaaccacgccaagatcggcggtctgaaggtcaccaccaaggacaactggttcgccgcccgcccctccggcaccgagaacatctacaaggtgtacgccgagtccttcgtctcccccgaggctctggacaaggtgctcgacgaggccaccgtcgtggtcgacaaggccctgagcgagtgaaatcgctgcgttagtcgcgttcaccgcaaccaataaggctctgcattggattcatgcaatccactgcagagctttttttagcgcatatgcagttcgcgaccactgaaacacgcaggtcaacggttctcctcgtgcaccgtgactgcattttctcaacatcactgcagggcaggacggccagatgaccgcgaaacgttcgcctgcctaccatcatcattgtggggtcacagcggccagatgaccgccgaagcgttcgatcggcttgcatcatggtcgagttttaacatcgttgtgggacgccacgacgaatttgcccattccagagctgccatcccacaaaagcgtgggacaacagctaagtcaatcgttttacatttcccccatcccacacactcaaactggaaaccccggaaagacgccattcctgccacacccgtcacagccattacccgaggggccgtgggacgccacgcaaaaatcggcaaaacatgcgtagcgtcccacacccattggcgcaaatccacgctcaatgcaccgacaacacccccaatcgaccactatgacacatttccctccacaatcgaacactagtcattcacgaaatccatcactacgaggcatcgcaatcgaacggcatgcaatatcaagcacacaccacaacaacaggtcgtacaaatattgcctttacatcagtccgtttcgaacatcatggtcacagcaggctctgcgccaactcttcaagagacatggcaactacatgaaactcgaatacggcaccgcgcgaagcaagcgccctcgccacgttgaaagcgaattcagcacgagcgtcctcgttagcgatacttgccgccgtggcgacgaagaccagccatctccgcccgaccagcacaccccttttctcttggtcacggcgccattgagccttactcgtacgatgatgatcgccatcatattcaacagcgaccttgaactccggccacgctaagtccaacgttatgggagctccagatgcaaaagccgcgtccggcaccacatagttcgcaaccggccgtggaatcccatgcgctaccagagagagtcgttcttctgattctttgggcgaatcagcaccaggtgatatcagaggcaatgctcgaacgcaggacgggcgccctctgaatcgggtaaattgctccacgaacttcaccagatcctgatagattgcagcagcatcacgatccttggccaatactggctgtttgctcgtagcagcgatgacggcatccccgagcacaatcagggactcaaaagaaacatacggggcaagttgggcccatacgtgaaacaggtccagcgcaaacacgtgttggttcatttccacattggcggctttagccgcatgtttccaaatatgcgtttgcagtggtgcatggcgtgtacggaaccgcttgctcttaacgctggatacagtgtgcagcttggccgagtcgaggtcgcaatcggcgggaatcggtacggattgcagagcgagggaagtggtcatgccgaaaagcagcttcttgcccgcccgtttcgcttcctcagtgcagcgtgcgaccatgtcgcgtctgcgctgggcgaggctttcgctcatggtcggtgtcgctgcagaatcatgtgcaccactgttcggcgatgacgagtcgcgagaagtcgggtatttcgagtcagtagaaaatgaccccgcaaattcgggcggaacaaaaactgcctccgattcttccggaggctgatcgtatatagagcctggcagagctccatagttggtgatgccgtcggtcatcctgttcatgacaccaccatatgggtagtgggtgcggaaacggaagccgatccgaggtatgtggtcctagcttcacttacgcacattcattgtggataaccatgtggacacctcacttatacacatagtcatccacctcttcaaccccgatttgacacactaactgtatctgatatgattacagtatcataactgtacacatcatagttacagtatcgactcggtaaggaggtcgtttcatgaacggcgaccattcactggcagtgcacgcattggtctaccttgaccatcgcgccacacacctgcccagtcagatcctggccgagaacatatgtaccaatgcggcgcgcgtgcgcaaagtaatgcgaccgctcgcctcagccggactcatcgccactaaagagggtgctgaaggcgggtacgctctggcccggcccgccgccgaaatcactttgcgcgcggtagcggaagccaccggcaccacttttgtgaaagtgaactggacaccgggcgacgtacacgaggactgtctggtgtcatcttcaatgggcgcagtgatgaacgacatctatgccgggctcaaccgcacttgcctcgaacaactcgaacacaccaccatccacgacatcaccgaacagatattcagcgagcgcaaaggctaataatcccgcgcgtttcccctagccagcatcagtcgataacgcttcggcagtcaaagaagaaaacagacgccgcacggcacacaacacatcagcacaacgcactcttatcactcgaatacgtaaggaagtaaccatgtccatcagcacacccaatgccatcagcacacccagcacctcccccactatcaccaccgacgccctgatcattggattcggcaagggcggcaaaaccttggctgccaagctcagtgcagccggccgcaaggtcgtcgtcgccgaggcaagcgccgacatgtacggcggcacctgcatcaatatcggatgcttgccgtccaagtcactgattttgtccgccgaacaggcgcggcgggatggcgcgaacagtactcccgaaacccgcgaagcagcgttcgaggctgctatcaaggagaagcgccgcgtcacttcgatgctgcgcgacaagaactatcacaagctcgccgaccaagacaacatcaccgtaatcaccggccgcgctcacttcaccggccctcatagcgtggaaatcgccaccgctgagggcccggtcgccgtgaccgccagcaagatcttcatcaataccggtgccacgccgcgcattccggatattcccggtatccacactacgcccggcgtctacaccagcactggactgatggatctcgacgatatgccgcagcgactggtgattatcggttcaggattcattggacttgagtttgcctcgatgtttgccgatttcggcacggcggttaccgtgctgcagcacaatgccgagttcctgccgcgcgaggatgcggatgtggcggccgcgattcgcgcacagttggaagcgcagggcgtcaagttcctgttcaacgcggataccaaggccatcgcgcctgctgctgacggcggcgtcaggttgtccgttgcggtgaagggtatgactcgcggcgcatcgcaagcttgcgattccacccccgccggcaccgggaacgctcataccgatatcaccggtgccaccgacgccaccggcgccaccgacactacaacaaccaccagccccactagcaacccgaccgatcacgccacgatgtcacacgttcaaacgaaaccatcagacgatggcgagccgcggttcgccgagccggctgaagcccgattctgcctgaccaccgacgcggtactggtggccaccggacgtacgccgaacgtcgagggactgcatcttgaggcagctggcgtggagctcaccgaacgcggtgccgtgaaagtcgacgagcttctgcgcaccacagcagccgacatttgggctctgggcgatgtgaacggcggcccgcagcacacgtacatttcgctggatgactatcgcgtggtgtggtcgcagctcaatggttccgaccgtccgtacacggtgaaggaccgcaagcatgtgccgtcgagcacattcctcgccacgccttactcgcgcgtgggattgaatgagcgcgaggcgaaggcggctggattggattatgtggtcaagcgattgccggtggccgctgtgccgaaggcccaggtaatgcggcgaccggatggtctgatgaaggcgattgtggaacgcaatactggccgcattctgggtgcgatgctgctttccgtcgagtcgcacgaggtgatcaatatcgtcaagttggcgatggatcttgacgcgccggccagcacgttgcgcgatatggtgttcacgcatccgacgattgccgaggcactgaacgacttgttcgcgtagtttgtccgcatagcacgcccgcgcagcatgacccgcgtagcgcagcccgcaacagactcccctaatgcgcgcgaaggtcctcatcgacgtaaaccgatgaggaccttcgcgctgtcgtcatgatccgtacgtgacagcaatcacgtccgaaccagccgttacttcaagccgagcttacggtccagaatgtcggaggcatccaatcccaagcggcgtcggatgaaccagccaagaccgagcggcaggccgggagccaaggccatgccgcctggaccgagtgccacggttttggctaggtgtgatgttattcacactcttcactacgttgttttgcctcgcactgggcaaccccacttcagcaagagattgcacagcttgcgttagggtggagaacatgactatcacagtatccac

SEQ ID NO: 1832 - DNA, 21144 bp, Unknown
  MAG_14  MAG No. k141_46794
catcacacaaagaagcccctcaaatagaggggcttctttgtgtgtacaacctattacggcctcaagcgacaatcactccgccgcagccttgcgccgtgcgttggacaccgcgtacaggctgatacccgccgccactgaagcgttcagcgactcaacagacgagctgatcgggatgccggcaatcgcgtcgcaggtttcgcgcaccagtcggcccaaaccgctgccttccgaaccgagcactacaacgagcggatcggattcaaagccagtctcgccgacgagcttatcgccgccaccgtcaaggccgacaacgtagtatccacgctccttcaagccctcaagtgccttagtcaggttcaccacgcgcgccaccggcatatgcgcggccgcaccggcagacaccttccaagcggcggcgttcactgaagcggaacggcgttccggcagaatcacaccattggcgccgaatgcggccgccgaacgaatcacggcacccaggttctgcggatcggtcacgccgtccaatgcaatgaacagcggtcgcgcagcaatacgggcggccgccgaattcgcggcctccattgccttggccttcttctcagcacgatcggccagctcgttcagcgaggagtactggaacggatcgaccttcagaatcacgccctgatggttgccggagcgggcgatacgatccatctccagacgatcggcctccagcatgtgcaggccgttcataccagcgattttcacgatttcgcgagtacgatcgtcatgttcaatacgagacatgatgtacagcgtggaagaaggtacgcctacgcgcagtgcttccagcacggaattacggccgtacaccagatccgaagtatccgccgaagcgaacttgtccactcgacggcgggctgccagacgcgggtcggccatctgccgacgttcggccgctttcttggccttatacgccttgtgatagacgcggtcctcggctttgggagtggggccgtaacccttcagtttgttgcgatgcttgccacccgaccccttggtcggtccttttttgatagccataggtgctattgtcccagcaccccgcgccaaaacgcggctattccgccgtcggtagccggtaaggtattgagagtgaagaagcagcgcatgatattcggactgtccctgctgtattggggattatggttggcgattctgattctgtggatgggtcgcttcgtgacctcattcttgtcgatatatttggtttccgcgctgcgcctcgatgagggtgtggtgggcacagtcgtggccatgtacggcttcggcgcaatcatcggctgcctgttcggcggtaccttgtccgacagattcggccgccaatccatgattatcatcggcgaaatcggcgcagcggctgccctgctggtcgtttccgtgctcactgaccccgtggctttaggcgcggccctgtttgtctatggtgcgttcgcctcactgcccagcccggtcatcgccgcgtatatcgcggatgtggtgcctgccgaacgtcagcaacgtgcgtacgtactgcaatcgtgggcgattaattttgggtacgcgattgggccgattgtggccaaccagctggtcaagatctcgtattcgctgatgttctacgttgaagcggcggtgatgatagccgtcacgatattgctgattgcgttcttccgcgaggtgcggcatttggggattactgtatcggtgccaagtgcggtgcgccatgaagacgaacgcagtgttacgcatgcggaattcgccggcgtcgaggggccgaatcactcggatgccgcaccggctgccagtgccaagggctccatgtctcgcaattggcggcgcgtgctcactgatacgccattcctcggcttctccctgctgatgttcggctacttccttgtgtacttccaaagcacctccggcctgcccattgccatgacggaccttggtctagggctgggcgagtattcggtgctgctcaccatcaatggcggtatgttgtgcctgctgcagattcccgcgatgaaactgttctcgcgcatgggcaattcacgcgtgctggtgatgggcctcgccgtaaccgtcatcggctatgcggtgcaggccgcggcccattcctggggcggattcgcgcttgccgtagtgctgtggacgctgggtgagctgggcacattccctatcgccaccactacggttgccgccatggcacccgcgtcggcacgcggcacgtaccagggcgtctacaacgtagtgtggtcggtatcgattgcgctggcgccgctgattggtggctggaccatcagcaacttcggcggtcgaacgctgtggatcgcctgcacgatagtcctgatcgccgtaaccctcggtctcaagctcaccaaaggcttgcgcgaccgcgccatggccgccaacctgcgcaatgcctcacagtaaataattcccgtcaagaaaagtgtgaggcatccgaacttttccgcacaatcaaacatggtccgcaacggcgggatctcactgatatgacgctctgcatgtgcgattgaggcatcgtaatcctcacgcttttcttattgagaatcattctctgcgatacgttctagaatcatcacaagcaatgcgccatatacaacggcagatataggcggtctccttcaacgcgcattggtctaggatgcagcacatattgcatgccgacccggctgtcgaatttattcttgaacttatcgagcgatgaggttttgtatctctttgtcgatttgacctccacggggcagaccctggccttcatggcggcatttgaatactccccgataaggagaaaatcaattttcatgcggtccttcgcctgacgggaatatcgggaatagaagaacaggcgatggcctgaggcccggagctgctgcgcaacgacattctccaccagcatgccttcattcacttccagcttgccgaacaggatatcgcggtacaactcattcgacgtgtatgcgcggtcggcaaacacttgcgttactaacaagccggtgtctcccatatagcatttcatcgtggagtcctcttggtgtaggcgcaggcccacatgcggatccgtggcattcatgcagcggttgatcaggaacgattcatccaaccagaagaaagcatcgccatattcacgttcgcgtgcgttttcgcctaaagacgacagtgtgaacttcttttcatgcttggaaagttgccttggaatttcatcgaagatacgtttgacccgttctttcgaatctccgccgtatttctctatgtcctgagcgtacaggtgcaaaatttggcgtttcactcgatcgacattgcccatatcggatgttcccagataacgctctacggcctgcggcatacctcccaccagcatgtattcacggaacaggcgttccgccttgttgtccagcagcggagacattgctcgcctgtccgcaaaagattgccgtatcgcatcggcgagtagttcttctcctctggcccatagaaattcctcaaaatccatgggaaacatgctcaccgattcttcctcggagggaatcaagatgttttcgacattcttcttaatggagatcagggagccagtctccatgaagtcatatcgaccatccgcaacgagttgtttaaccgcgctgcgggcaaaggggaagagctgtacttcgtcgaaaataaagagggtgtcacgctcatgcaggcgtacgccgtaatagacggaaaggtccatgaacagcgtgtccaaatgatccagattgttgcggaacgagtctcgtaccgcctgcggagccttctgccagtcgataaggatgtatgagcggtattcgttcttcgcgaattcctcggcgacggtgcttttgccgacgcggcgggctccttcaatcattaacgcagtagtacccttgctcgctgctttccatcgccgtagatggtcgtatacttttctcttatacatgttaagctcatattcctagtattttcaaggatttatgagctatgatatcacgattcctaagttatataatgccgtaaaactcactattcctaggttatgaattgctttgattctcacgattcttaagttatataacgaggcgcgattctttggctatgtggccgacaacagcgaggagatggaaccggaccgcatacgcccggccatcctgattttgcctggtggcggctacgccatgacctccgaccgcgaagccgagcccgtggagaatacgctaatgctatccaggcctgccgggccgccggcgtgagcatcgaagcacacctgttccccgaaggcagccacggcctgtccctggccaatgcggaaaccgctggcaacggcttctatgcgcacatcgtcgaatgcgtgcagtgttggcctgatttggctgaagcctggttgcgtcgcctgttctaggcaaaacgctattacgctgtgcgccaagtgcgccacgcagttatggaataatagcaatcgtatgcatcggcagcagttgcgccggtgtccataaccgcgcagtcctgtgcgtccagccgggagagaaaacccggcagcggccgcaaggctgactactccgcggcaataccaaggagaacattatggatgatctcaaagatcaatccgcagtgtccgcgaccgcaacgaacgaggtcgtggaatcggaagaagtgcgcgcgcaggaagcgctattgggggaagctgatccaagtctgaccagtgccgacgacgtggccaaagccctgaatgtcgacccatcccagggcctgagcgaggaagaagccaagcgtcgactggccaaattcggcccgaatgagctcgccaccgccccgcccgtaccgaaatggaagaaattcctggcccagttccaggacccgctggtctacctgctgatcgcggccaccatcatctcggtgatcgcatggttcatcgaaaaggccaatgcgcagcccggcgcggaaggcggtgaagtgctgccgttcgacgccatcgtgatcattttgattctgatcgtcaatgccgtgctcggctacatgcaggaggccaaggcggaggccgcggtcgaggcgctcgcccaaatgacggccccgcagacctcggtgctgcgcggcggcaaagtcatgcgcatcaacaccgccgacgtggtccccggcgacatcatcgtccttgcggaaggcgactcagtctccgccgatggccgactggtcaacgcggccagcctgcgcatcgccgaggcctccctgaccggcgaatccgtgccggtcggtaagaagccggacacactcaccgaagccaaggcgctgggcgaccgtgccaacatgatcttcaacggcacttccgtgacgcaaggcaccggccgcgcaatcgtgaccggcaccggtatgaacacgcaggtcggcaagatcgccgacatgctctccgccaccgaagatgagaaaaccccgctgcaaaaggagatggattacgtctccaagatcctcggcatcgcggtgtgcgtcatcgctgtcgtggtgctggtggcgctcgccgtgctggaaggcttcgacgacgtccatgacgtgattgattccttgctgttggccgtctcgctggctgtggccgccgtgccggaaggcttggccgccatcctgaccgtggtgctggcgcttggtgtgcagcgtatggccgcgcacaacgccatcgtcaagaaactgcattcggtggagaccttgggctccgcttccgtgatctgctcggataagaccggtacgctgacccgcaacgagatgaccgtggagcgcgtggtcaccccgtccggcgcagtgcagatcaccggcaccggttacgcgccggaaggccgcatggttatgaccggtggcgtcagtcctgaatccgagcaggcccagattgtggccgatgaagtcgtcgccacgcttgtggccggcacgctcgcgaacgacggcgaactacgcgaggagaacggccgctgggagatcgtgggcgaccccaccgaagtctcgcttatcgtggccgcacgcaaggtcaaggccgatcgcaagatcaagcgctacacgcgcgttggcgagattccgttcacctccgaacgcaagcgcatgtccatcatcgccaaggacagcaccgattcagacaagctcaccgtgttcgccaagggcgcgcccgacgtgctgttgagctactgcacgcgcatccgcgtgggtggtcaggtccgtaagctcaccgaaggcgatcgccagtcgattctcgccaccgtcgaacgtctctcctccgaggcctaccgtacgcttggcgaggcctgccgtccgctggaaaccagttctttggctgatgtgcccggtgtaagcgtcaacgccgcaggccaggtgtccgacatcgccgatcaggccgaagccatcgaaaccgatctcatctggaatggcatggtcggcattatcgatccgccgcgtactgaggtgcgcgactccgtgaccgaggcccatcgtgccggcatccgcacggtgatgatcaccggcgaccacccgctgaccgccgcccgcatcgcctccgaccttggcatcatcgccaaggacggcaaggccctgaccggcgaccagctcgaccagctgcccgatgaggccgcactcgacaaggccacgtccgaagtgtccgtgtacgcgcgcgtggcccccgagcacaagctcaagatcgtcgaatccttgcagcgtcaaggcaacatcgtggccatgaccggcgacggtgtgaacgacgccccggcagtcaagtccgcggacatcggcgtggccatgggcatcaccggcaccgaagtgaccaagcagagcgccaagatgattctggcggacgacaacttctccaccatcgtggctgctgtgcgcgaaggccgcgtgatcttcgacaacatccgcaagttcctgcgctacctgctgagttccaatgtgggtgaggtgttcaccgtgttcctcggtgtggtgtttgctggcttcctcggcatccgccagccggaaaccgtgggcgtcaccgtgccgctgctcgccacacagttgctgtggatcaacctgctgaccgatgccgcgccggcgttggctatgggcgtggacccgcagaccgacgatgtgatgggtcgtaaaccgcgtaagatgacggaccgcgtgattgacgcctccatgtggggcgacatcatcttcgtcggcgtcattatggccatcgtcacgctgattggtatggacatgcacctatccggcggcttgttcaccgaccgctcggtggatgccatcggccatgaagcgcagatgaccgaggcccgtacgatgggcttcacgattctggtgtttgcccagctgttcaacgcgctggcctcccgttcgcatctgcagtccgcattcgtgggtctgttctccaacaagtggctatggggtgcgattggtttgtccgtggcgctgcagctcgtggtgatttacgtgccgttccttaacggtccgttcggcaccgtggcattgagcccgatggcttgggtggaatgcatctgcctggccgcaatcgtgctgattgcctccgagctacgcaagattgtgctacgcgcgatagccaagcgttaagccatcgcaatagccctgattgtgggcatatagctgtgggccgggctctggtattcagggcccggcccactgctatatccaaacggctcctcatggggcggtaattatcccatggggcggtaatttcctcatggggcggtcgctgaaaacggcgttattccgcgaaaaaggaaaatgcgctaaccgccccatggggaagttaccgccccatgggaaacgggagaacgctgcagacctcagttgtggctgccgtcggggccgtcagtagaggtggacccgtcttgagacttctgctgtgcctgctgcttggccttctgctgtgcctcttggtcggccttccgctgagcctcttcctgagcttgcttggcggcatctgcctgctgcttggcctgtatcgaggcggtgacgtcggactcggccttctgcagtctagaaatcgcattgttgacgtcggattcggacggactggtcccgttcatcaccgtattggcctcggtgatggcgttttgcagcgcggtgcgggtgttctcatcggccacactgcccgcggaactatccagtgtgccctgcgcctgcgaaatagccgagctcaggttcgatttcagtgtgtcggtatcggccgtcgcctttgaagtattaacggccttgatcgcattgttgatggcatccgtcttgtcagccatgtcgctggcatcattctgcagctctttagtgtgagacttcagctcagtggcgttgaggctggaatcgcacttggcggtgtcggtcggattgccggcgtcttgcaacgcctgattcagcgtggtgagcgtattggcatcggccacatcgctggtggatgtttgcgcgctggtttggccattggatatggcggtggtgagcttcttctgcgcattcgtgtactgcttggccgctaccttgcactcggccaatgccacggcttggctcgccttgctgctgttggaatgccaccagagcaggccggcgacaaccagcgctatcacggcgactactgctacggcaatgccgacgattttgcgggtgttttttttgccgctaccgccgtgacgaggctcggcgccatcggaatcgtcctcatcggagacctgattcaacggaatggagggaggcatcacagcaggctgagcctgtgccgaagcagccagggcggccggttggaacacctgtgtggctgcagcatcatcggcagacgctacttgcgttgccggcatggcaacggtctcaccggatacggtggatgatgcgccgtatgcctgtgtggccgcagctgaattaggctggaatgcctgtgtggccgcggtttcggcattcggcatggcctgagcttcgaaaagctgtgttgccatgacctgattaggccggaatgcttgtgttgcctcggcatctaccgcaggctgctcggcctgactgggctggaacgcctgtgtcgcggcgtttgaagctgccgaaacaggcgatgtcgccggtgccgctggtgcggctggcgtcaccggcactgtcggttccaccggatggaagctttgcgtcgtctgatcccaaacgtattgctgctggccgggcgcagcggcgattggtgtttcggatactactggctgcgtggctgccgccggctgtggtgcttgtgcggcaaccgcagccgggaattgcggcgagaacggttgcgtcatggccggatcgatgggctgcgtcggctgcacagactgcacagactgcgggaactgcagagccggtgtggcctgtgccgtgggttccgtgctatatgctgccgtctcttgcccgggaatcggaggaaccgttggcttgaccggcttttcgtgctgctggaagtcgaactggaacccaccatcgctgttggtcatgacatctccttgggattaagcaaatggccggcatccgccggccgaatggtacgtcgcaacgctcagtcgtcgatgtgcgcgcggtagaaattctcgtaggaacggctcggcgtcggaccccgctggccctgataatgcgagccggtgcccttggagccataagggtgctcagcgggcgagctcagctggaagaagcacatctggccgattttcatgccaggccatagtttgaccggcagcgtcgacacattagacaactcaagcgtaatatgcccctcgaaaccggggtcaatgaagcccgcagtcgaatgggtcagaatacccaatcgacccagtgagctcttgccttccaggcgggcggcaatggacgggtccaacttgacgtattcccacgtggaacccagtgcgaactcgccggggtgcaaaatccacggttcgtcgggatccacctcgaactgttcggtgagcgcgccctggttttccgccggatcgacataggtgtaggcgtggttattgaacaaacggaagtaccgatccaatcgcacgtcgatggaagcgggctgcaccatttcgggggtccacggatcaagtgagatatgacctgcggactgtgcggcgagaatatcgcgatcggacagcagcatgtgaaaaactccttgggcaaataaatactgccttcaagtctagcgccttgggcggaaacgtgagaggctcctcacgcttccgcggtccatcaatcgcaagtattctcaggtttttctcagagaaacttagaggtagacccagaaagcagtggttatataaatgatgtcagcggaaagctgatcaggagccgcagcagttcccgacaattgaaccccctttcttcttctctctcctttctctccccggcgggcaaccgccggggttcttttttgccctgaatcattcccccgaatgaccgccattcccaagccatagcggtacactggctgtgtaatcggcaggaagggggcaccgatggcccgcaacgatgaggactacgatttcttcggcgatggtcagtatgacgattcgcgcagctcacgtcgtgcacagaatcgacgcccatccaggcggaatgccggccggcgattcgccgctacaaaagccagcagcccaacgtcgatattgtgccgcagacttgccgttgtcagcggactgctagccgtcgtggtatcggccacctcggcggttcatgaaatcgcgccttacgccatttcctttatgacggcagtgccaggacgatacattgcgttgacggcggcggtgcttatcagcatcaccctgattctggtcatcgctgcgcgagtcaccatgcctcggtacgccactcacgggggagtgggcgcgggcggcatcatcgcactggtgtgcgccatagtttgcttggttatcggcgtggccatgggcgtattgttcccggaaggactgattcagcagtcgaacgacaaggcacccgtcgaagataccgcacagatggagcaaggcatagaacaagctgccggcgcgtgcaaagaaggatggcaggggcttgatgcgggcggtttgccaggcatcaccaccgtacagatgtgcactgatccgagagtggccttcgtgtcctttgaatcggaatcgtccgcagccatcagccgggcacctatcgaaagcaagatttccgaactgctgagccaatacgctgataatgagcaaacgaaaggtgattggcgattgctgaacggcaaacgctggatggtgttcggcgagggcagcaagatgaccgcactgcagcagcagtggggcggcgaacttgagacaatcaccgcagccacagacaccgcagccgcaaacagcggtaatgcctgacagattgccggtatcccctggaaagtcccaaggcgattcggcgcggattacccaatgtgactgaaatcatggtccatcgttttccgcacagcgcgcaagacctctatattggattggtatgagcaaagaagcgaatgccagccagcctctgatcggccgcgaatccaccactgtgcctggacgttttggcgagccactcaccgtggaacacagcgtcacctcgcgcggcggcttcgaccagcatgccacgcatccgctgttcctgtgcctgcatggatggggatccagcgaagaagacatggcggacatcatgcgcctcatcgctccatataacgacttcgtggcattgcgcgggccgctgacacttgcgccggcccgtgaaggcagtcccgaccccggcaactacgcgtggtttcacgatgccctgcctatcggcgatgatcgtgactacgacgcgtatgccgccgccacagcagtcgaccgatgggtggccgacaacattcccgccgaccgtgacgtggtgccgcttgggttttcgcaaggtggactggtcgccgtgcatttgttgcgcatcaaccccgagcggtaccgggccgtcgtctccctgtccggcttcaacacacccggtcaggtgcccggcacggcccccgccgactctcgcctggccgattacgatatccccgtgttctatacgtacggcaagaacgatggcgtaatcccgaaatacgaactgttcgccaccgccgcttggttggaagagcatacgtggctgaaaaccaagagctaccacggtctggatcacaatgtgagtcttgaggagttcgccgatttgcgccagtggctgctcgacaacgacattacctctggcgtgctgtagtcagccgccatcactggaattggcgcggccgtcacagcaatcggacatcgagggcgcttgtggccggcgcggtcatagactgttctcccatgagcgaagtgagcactgcaagcactactgcacatactgaagagaatcatacggaaatagcaatccccaacttggctcccctcagagaagggagccaaggaaactagatgccggaatcggcatcgacctgcataacgtagatgttgcgcctcagggagcgggcttgggctcggttgatgtcgccggcttcgtacatgtcctgaatcacaccgagttcgataccgtagctctcgcgctttacgtcctcgacctgcgtgatggtttccgtagtgccgctcatattcggacgtgcctgcaatgaagcctcagcgcgacgataatccagcaacagcgccgaacaatgctcggtgttgtacgtatcctggcccatctcgtcaataagccggccgataacatgatgaatcgcctcgacctgcagttcgcgggtgcgcgcgaaaatctgatcctcgctcaccaatggtgtggtatggcgaatcttggacaccgtgcgtttggcgtaattgctcatctgccgctggaacatgcgtaagcgaccgcgaatctgcgataccgcatgccccgaagtcggatcagtggaagtgtgacgcagcgtattcataatctggtcaagcatgcgctcgcaggcttcgacgttcagctcttgcgtggccgtatccgccgccggatgcgccttggtgtcggcaagtcggtcgcgcacgaattccttttcccaatgcagcgcttcgatctgcaattgctcgaatccctgaggatcggtatcgccgatgcgctgctgcaatcgtccgatgcgcttggtgtattggtcgattaccatcagaatcgcacggcgattctctggcgtgatgcgtccggtcaattcctccaccgtggcgcgtaacacatcgatggtcaccggaatcatttccgcgctgggatccttgccacggttcggggccaatagcggtaacaggaagttggccagcagcaaggtcacgataatcacgcctgacgcaatgaaaatcagctcgtcacgcatcgggaacggcgcaccgccggcaatgtaatacgggatggtaaacatcaatgacagcgtgatggttcccttggggccgccaaaggtcatcactgcggccgagcgccagcgttcgggtgtcattttgcggcgctggccggtgattgtatctcgcgcaacgcgcagcatggccgcaatccagaagaatcgaagcgcgattaccaccagagtgaccagcagaataatgccgatcagcacggtattgctgatatacgggtcagaccagctggccctcatggcgcgcggcagctgcatgcccagaagaatgaacaccgcaccgttgagcgagaaactcagcacaccccatactgaagtggaaacgatattcgtacgtgccacattcggccccacgccggtacggtcgaatcggatgaacaggccagcggccaccaccgacagaatgccggacacattgaattcctccgcgcccaaatacagcaggaagggcaggaacagttccatcagaatacgtgtggtggtggtttcccaaccgagggatcgcacggtctcgaatagccagttggccgctgctgctatcaccaggccaaataaggtgccgccaaagaaggagatcacgaattcgccggcggcctgccccacggcgaattcgccagtgaaggcggcggccagagcgaactggaagccgacgatgccggaagcgtcattgaagagtgattcgcctttcagcacgctgcgctgacgctgcgtcagcgaggcttctttacctagggagctgacggccaccgcatcggtcgggccgagtgccgcgccgagtgctaaggctgaggctaaggtgatggacggccagacggcatgcaaagtgaatccgaccgccgccatcgtgacgatagccagtccgatagccagcgataggctcagatccagcgttttcagcaacgccgacttatcgatttcgtgcgcttccagatacagcagcggcgcgataaacagcaccatgaacagttccgggtcgagctttgcatccgggaaaaacggcagatacgtaaccagcacgcccagcacaatctggaccagcggtgtggaaaccttcggtacgaagcgactggcaaacgagctcaccaccaccgccgcaatgatgcataggatgagctcaaataccgccatgttgccgccttctcgtattttttctccaccaaaagtatatgggaaccatgaagaaaacgttaagattgcggccgattatgcacatcatgagacgatatgagaaaaaggcatacactcgttggtatggaatatgacgaggcgatgcgctgtgcactggaactggccggtcaggccgcagccgctggtgacgtaccggttggtgcggtggtgctggatgcggccggccagattgtcgggcgcggatacaacacgcgtgaggctgatggcgacccgcttgcccacgccgaaatcatcgccatgcgtcaggcggcccaagccttgggcgcttggaatctcgccgattgcacgctggccgtcacacttgagccgtgcccgatgtgcgcgggtgcctgcatccagacccatatcggcaccatcgcgttcggtgcctgggatcccaagctcggtgcatgcggttcgatttgggatattccgcgcgatccgcatatcggccatagtcctgaagtgcacggcggcgtgctggaaggcgagtgtcagtccatcctgactgatttcttcgcccagcggcgatagacacggacgcattacttacctcacgcaaccaacacgcggcaccaaggcaacatattccatttcttctaccatcgaaaccagtagtgcaatgcaaatccacacacgtcgaaggagacaatatggccgagaacacctccactttcaccggcgccgccgctgacggcaccgcactcaccgccgtctacctgacccagcccgccgccaatgtggcgatcggtctggtgtttgccggcagcgacctgccgcacatcgtccactggggccgcccgctggccaagcccgacaccctgctggccgcctatgacgccctgaagccgcagcgcgtgtccggcgcgctcgacgacaccgcctggccgtctatcctgcccacccaggccgaaagctggatcggcgagcagcgcgtggtgctgcgccgcgccggcgtcgagctcttccccaagttcactgtgaccaatatcgaggccggcggcgtgctggaagccaccctcgatgccgtgtccggcgaaagctacaccgatgtggccggccatgcccgtgccaccggtccggtccgcgtgcccggcgtcatagtcaccgcgcgcgatgaggagcagggcgtggaagtcgagtggcacctcgaactgctccccggcggcctggtccgtcagaaggccaccgtaaccaacctgttcggtgcagacgccggagccccgctcgagatcggcaagatcgagctcggcttcccgctgcccgaatccgccggcgaaatcctcaccaccaccggtcaccatctacgtgaacgcagtccgcagcgccagccgctgaccgtcggccgtttcgaaaagccgcagctcgccggccgccctgacttcgacgcatccctgctcctgaccgccggcgtgcccggtttcggcttcgagcatggcgacgcctattcggtgcacgtgggctggagcggcaactccgtgctgtccgccgaacgtctgccctacacaaccggcgtgatcggcggcggcgaactcctgttcggcggcgaagtgacgctcgctggccctggcgaaggccagaactcctacgacaccccgtggctgttcggctcctatggcgatggtctcaacgagatcgccgcccgcttccactcctacgtgcgctccctgcacccgcgcctgttctcgcacggccgtccggtgatcctcaacacatgggaagccgtgtacttcgaccacaacttcgatacgctgaaggcgctcgccgacaaggccgccgactccggcgtggaacgattcgtggtggacgacggctggttcggctcccgccgcgacgacacctccggcctcggtgactggcagattgcgcaggacgtctggcccgatggtccgaagtccctgaaggcgctcgccgactacgtgcacgccaagggtatggaattcggcctgtggttcgagccggaaatggtcaaccccgattccgacgtggcccgcaaccaccccgattggattctttcgcccaccaccggccgactgccgctgcagggccgcactcagcaggtgctcgatctgaccaatccggatgcgttcgactacatctacggctgcatggaccaacttgtcggcgagcttggtatcgactacatcaagtgggaccacaacaagttcgtcaccgagcccggttcccgccgctccggccgcccggccgtgcacgcgcagaccctcgccgtctacaacatcttcaagggcctcaagaccgcacatccgggccttgagatcgaaagctgctcctccggcggtggccgcgtggacctcggcatcctagagcacgctgaccgtatctgggtctccgactgcgtggacccggtcgagcgcgcggacatccagcgctacacctcgctgctggtgccgccggcgatgatgggcgagcacgtgggtgccagtcccgcgcactccacccagcgtgccaccagccaggaactgcgcatggccatggcgttcttcggccacatgggcatcgaatggaacctgttgaaggagccggacgaggcgctcgccaagctggccgtgtgggtggccgaattcaagaagcaccgcgactggttcgccatcgacacctgcgtgcacgccgactccaacgatccggccgtgcgcttggatggcatggtgatgccgaaccgcgacgccgccatctaccgcttcacccagctgaccaccagccagacctatccggccgcgcccgtgcacctgcccggacttgaccccgagcgcacctaccgcgtcagcccgctcgacccgagcttggatttgaccggtctggccaacggccagagcactctcggctggtggaacgaggaaggcgtagtcctgaccggcgaagccctgcagcgttacggcatccgtcccccgtccctccacccccagcaggcagtattgctcaaggctgtggcgttaagctgacagcctagtaggctgtcaatagccacggcctgagcgaagcgacagctgagcgaaggtgggattgagccttgccgataggcaagtccgtaattgctggtcgtggcggagtaactgtggcgaagcaacgttcttggcttccctctctgaggggagccaagaacggcctacccaatatgcttcacgattacgcgactggcggcggctttggcccagagctgccagtcgtggtccataatcgtgaacttgaccggctgggtctggctgtgacggtagaaacgaatgccatcgcgcagcgaatcggtgccgagcttggccaaaaacgcggactccccggcaatcatcacatgtccgggcatcgcgatgttcgccaccgtagccaccagcgaacccaaccggaaacacgtccggttcaccaactgcgtggcctgcggcacgcgtcccttggcatcgcgcgcaaagtcctcaaaactgaccgcgcgacccacaatcgcagagtactgttcggcgatcgaatcgtcagtcaagcattgtgaacagccgatatgtccgctggtgcagcgcggcccctccggatcgataagcacgtggcccaccagaccatagctcttatccgggtactgcactggcttgccgttcacggccagcgaataaccaacacccacgccgatggtcaccacggcgaacatatccacgccgacacccggcccgaaccaggaggcatccaccagcagagaatcgatatcattgaacaccccgcacggcaggccggtcgcctctgtgaccatcgtccccaagtccgtggccccgtcccaatgcaggaacggcgcgaacgtcacaatcgaatcgtcgaccacatgcccacctaccgcaacgcccaccgcagtgggggagggcagtccggaagaggcgatatcggcggaacattcgcgcaccagccgcgtgatggccgacaccacatactcagccgactgatccgccccgatcggcacctcgtgccggccggacaccacctcgccatgcgcgttcaccgcagcggccacaatcgacatcccatgaaccttgacaccaatgaaggtgcgtgcgttcgaacacaacaccagcgaagtctgcgggcgtccgcgacgatccgaactttcccttggcgtgaatcgctcgggcagcttgcctgacgggccggcctcggccggaagctcctcgatcaccccggcgtagatcagatcgctggtgatgcgggacaaggccccttggctcagtcccagcatctgtgccaacgtagtgcgggctatcggcccgtattgggcaattgccgccgccacgcgatgcgtatgctcggatccggaaaaccactgtggaatcgcgttgacatcagacatgcaagccccccttcgctgtatttattgcgttaatcacaaaataccgcgctttttgttgcttgcgcaagtgggctcgctggcgctgggaatgaaatggccgaaccgttaccttggaaagtggaagaaccgccggcaccgaagccggaggaaaagaaagataaaggagtcaacaattatgctgtccgattccccacatgcaacgcctagactgaagcgtctggccgtgcgcaccgccgccgtgatgtgcgcgatcgccgtcgggttcggcctggcaggctgcggctccagcaccgcaggcaccgtcacgctggatttcttccagttcaagtccgaggccgccgaccagttcaagtccatggtcgccgactttgagaagcagaacccgaccatcaaggtcaacatcaacaactccgccaacgcccagaccgatctgcgcacccgtttcgtcaagaatcgtgtgccggacgtgatcaccttcaacggcgacatcagcttcggcaacttcgccgcctccggtgtgttctacgacttcaccgatgaacccattgtggacaccctcaaccccggcatggtgcagatcgccaagaatctggtgcagaccaccgattcctccaagaagcgcctgtatggcctgcccttcgcgggtaacgcctccggctacatctacaacaaggctctgttccgcaaggttggccttgacccggagaatccgccgaccacctggagcgagttcaccgatatgctcaacaccttcaaggacgccggcatcaacccgctgcagggttccgtggccgacgcctggaccacccaggcaccgctcgcctccctggccggcacgctggttcccgaatcgaagtacaccgagctcaagcaaggcaagaccacgttccaggaactgtggaagaccgcagtcgagaaggaatccgagctcttcacctactccactgcggacaccggcgtcacctaccagcagggcacgcagaacttcgcccaaggcaaggccgcgatcatcccgctcggcacctacgccatcccgcagatcctgctgatcaaccccgatatcgaacttggtttcgcccagatgccggccaccgatgacgccagcgagcagatcctcaccgccggcgacgacgtgatgctcaccatcggtgcgaacaccaagcaccccaaggaagcgatgaagctcgtcgagttcctcatgcagaaggatcagcttgacgcctacgccgacgcccagtccgccatcacgccgctgaaggacacctacttcggcaacgatgcgctggaaaccgtgcgcccgttcttcgaggaaaaccgactggccgacttctgcgaccactacattccttcgtccatcaacatcggcggctacctgcagaccatggtgacctccggcaacaccgaccgcttcctgaaccagatgcagaccgaatgggacaaggtccaagccaggaccttcgagtgatcggtaggagaggagaacatcatgtcacacgcaaccgcaaccaagaccgctgccaagaaaccggccaagaagaaggtctccgccttctccacccgcaaggtggaccccgcctactactggatggtggttccggcggctatcattttcgccttcttcctgtacctgccatttcttgacggcgtaaagtattccttcaccaactcgcagggctacggcgattacaagttcatcggcctgaagaactacatcgccctcttccaagacaaccgcgtgggccacgcctacctgttcacgttcctcatcgccattctcatcacggtgctgattaatgtgatcgccctgttcctgtcggtgctgctgaactcgaagatcgccttcaagaatggcttccgagccgtcttcttcatcccctacaccctctccgtgctggtcatcggctacgtgttcaagtacatcttcatgaacccgctgcccgagctcggcaaggcgctgggcatcaagtggctgtccacctcgctgttgaccaatgagcaactcagctggatcccaatcgtcttcctcgccgtctggcagggcatcgcctactcagtactcatctacctcgccggcctgcagaccatcgacgacgaaatctacgaggccgccgccatcgacggcgtcaacgcttggcagaagttctggaagatcacattcccgctgatcggaccgttcttcaccatcaacctcgtgctgtccatgaagaacgcgctcggcaccttcgatcaggtcgtcgccttgaccgagggcggtccgaactcctccaccgaa

SEQ ID NO: 1833 - DNA, 3717 bp, Unknown
  MAG_14  MAG No. k141_47050
caatgcggcggacagggaactggtttccttgtccaaacgggcctgctggtcgttgagccccttgagttgggctcccaatgcgcccatttccctcttgcggccctcttcgatctgcgtgaccttgttctgcaaggtatcaagatttttggccactggcgcaagcgcctcgagcaccttgctctgttctttcaaacgtgcttcctgttcagcacgcttggcctcggcgtcccgagcatccgcctgacgcttccgttccgcctccgcagccgcacgctcacgttcctgctgaatgcgaatctgctcagcctgctgcgcctgggcaagttgtgacttggcgaaagccaattgctggttcacgccttcaatctgagcctgtgcggcagcattgcgagcactgagctcagcattctcgaatcgcgcattctccagcgaggtcttggcctcctccagctcctcgcttttgacgcctcgagccatctcctgacccttatggcgccccagcacgaagccggcgaagaggccaagccctgcaccaaccactagcacgacgatgacgataaccacggttcctatttgctcaaacatggtacctagtatgtcatcgatggtgaatgacggtaaatttttaccgaactcgacgatttcaagccgttaaacggacgctcagcagcccacattggacgcttggccttatcacagtcgagcatcaaccgttattatgctgtgtcgtatccgagcgtcagacggcctttcatgatttgccagcgcgcgtcatcatgcggcagaactcgtcacgatttgacgagacgcgcaatggccgcggaagcctccgcaagtttttcatcggccacctcgccgccctggaccgacgcctgccgcacgcaatggttgagatgatcgtccagcagcaataacgccacggatttcagcgccgaattcgacgccgaaatctgcgtcagaatatcgatgcagtatttgtcatcctccaccatctgcgtgatggcgcgcacctgcccttcgatacggcgtaatcgtgcgatgaccttggccttgtcttcgtcataaccatgcatcgcaacccccctgatacttatccgtcagctgaacacaccccatcatataccctctaggggtatagggtatacactgttgttcagtgcattaggaatgggaaggaacagttatggagttcagcatcttctcgaccgccacggcgctgatagtggcggccgcattgacatggctggtcctgcggttcttcttcggaacgcagaaggcaacggccggggccatggacgcttccggcgaacgccaatccgcgacgatcaccgtcaagggcgggtactcccccgccgtggtgagcatgcgtgcgggtacgccgatcacactgaccttcgaccggcaggagaccggcgaatgcacctcgcatgtggtgtttgctgatctgggacttgacgccatgctgccgggcaacgccaccaccgacgtgaaactgccggcgttgccggcgggcgagtatccgtttgcgtgcggcatgaatatggtgcatgggttgttgagggttgagggagaggacggctcggatgagaacacgccccttcctcatcctgatgcttcgtatacggcacctaccgccgtggatgcggcggagggggagcgccgggaggcggctgaacgcgccaatgagatcaaggcgctgacgaagctggtgattgtgggcgcggtactgacgttgccggtattcgccgtcaccatgctgcatatggccaatcccacgctggtgccgcattggatggtgaacccgtggttgcaggccatcctgatcacgccggtgatgttctactgcgggcgtccgatccacacggtcggcttccccgcgttggcgcatcgctcccccgacatgaactcgctggtctcactgggcacttcggccgcctacctgtattcgctggtgacctgcatcgccccgtgggtgttcccggaaggctcgcgcgaaccgtatttcgaatcggttggcgtggtcatcaccttggtgctggtcggccgccttctggaaaccaaggcccgcgaaggcaccggcaaggcggtgcagtcgctcatcaaactgcgcccgcgcaccgcgcacaaactcaacgccacttccgcagacaatgtggacggcatcgaatggcgcaatccggcgtatttcacggacaccgacatcgacgccatcgccaccggcgacctgctggtcgtcaagaacggcgagcgcgtgcccacagacggcatcatcgtggccggcgaggcgcatatcgacgaatcgatgatcaccggcgaatccaagccggtttccaaaaccgtcggcgatccggtaaccggggccaccgtgctgctcaagggcgactgcgtgatgcgcgccacccaagtcggcgcggacacggtactctcgcagatcgcggcgatggtggcccgcgcccaggcgaccaaggcgccggtgcagcagctggccgataagatcgcccggtatttcgtgccggcggtgatgatcatcgccatctggacgttcgccatctgggtgtcactgggcccggtgccgcaactggcgcatgcgctggtcaccgcggtcagcgtgctgatcatcgcctgcccgtgcgcgctgggactggccacgccgctgtcggtgacggtctcactgggcttgggcgccaccaacggcgtgctggtcaccagcgccaaggcgctggaacaggcgcgtcgcatcggcaccgtggtgttcgacaagaccggcaccatcacgcgcggcgtggtggacgcggccgccgactgggacaagccgagctacgagcaggacacagtcaaggaaggctcgcgcgaggccatcgcggcgttgcgcgcacgcggcatccgcacggtgatgctatcgggcgacaaggccgaggtagccgggcgcatcgcccgcgaagtcggcatcgatacggtgatctgcgaggtcaagccggacggcaaggcctactggatcgccaaactgcagcgcgaacgcgacgaggccgccgccaagtccgcggatggcgcctcccgcacggccgcgcaatcccgcactctgattgcgatggtgggcgacggcatcaacgacgcccccgcgctggcccaggcggatctcggcatcgccatcggcaccggcacggacgtggcgatgcagtcggcggacgtgaccttgatgagcggcgacttgcgcggcatcatcaagaccatcaacctgtccaacgccacgatgcgcaacatccgcgagaatctggggtgggcgttcggctacaacgtcatcggcattccggtggccgccggcgcactctacccgttcaccggctggctgttgagcccgatgatcgcgggtctggcgatggcgttgagctcagtgtgcctggtgctgaacgcgaacaggctgcatagggcgaacatcaacgcgggcgttgtcgatggcaccgctggctcgggcaacagcacggcggatatcgaatcagccggatcggccgaatcagccaacgccgccaacatcaccggctccaccacatccaacgcgcctcacgagccaaccgtcatcatcgacgatcgcaccacgctgaatccaaccaatcacgcatctgaccaatccaataatccaaccaacaaggagaacactatggatatgggaatgcacatgcaccacgtcaccccgaccgacggcgaaaccgccaccgaccc

SEQ ID NO: 1834 - DNA, 5116 bp, Unknown
  MAG_14  MAG No. k141_47303
aaatgcgttctaacggcatatacaccattaaccgtgaaaccatgcgtttcaaaccatggttccatacactatgaaatgtgaaaatattgtgaatattcatggcatgccgccgcttttcaaacagggcacatgaaccggtatatttttcggtatacttccggtggttttcaatacgaacacaaccggaaaccattgaaaatagcggttttatggcaacagacacggaatcggactgattccaaccgccattactcatatcaagctacgggatcgagcagagcgaacgctactcgcgcaccaagcggatatgctccacatcgtcgcgccgggagcgacggaacagcacgaaacgattgccgatggactgcaccacttcggcgttcagctgctcggcaagctcggcggcggcttccttggcggtcaggccagaaccgtcctgcacggcgcacttgatgagctcgtgcttctcaatggtttcatcggcctgattgacggccgactcggtcaaatcgttcttgcccacatagaacaggggcttcagcgagtttgccatcgcgcgcagctgcttgatttgcttcttggtcaatgccatgggaatttccttacatctttcgtataaccacaccagcatagcaaccggtgctgtctgtgctgtttgccgccctacagcgcgatgatggcggcgatgtaggcgatgacggcgacggcgaacacgagatcttgcgcggcgatggtcagggcacgccagtgggtgcggcggatgctctcctcgtagcagcgggcgtcaagtgcgaggctcaggttgtccgcgtgacgcaacgtgccggcgaaaatcggcacgataatcgcgctcatcgccttgatacgctgggccagcgaaccggtttcgatggaaccgccacgcgcggattgggcgtcgacgatggcacgggtctcgtcggtcagcgttggaatgaatcgcaatgccagactcatgaccaacgcgatctcctgggcgtggatgccgagccggttgagcgggctgatcagggtgtcgaaggcgtcggtcatggcggtaggcgtggtggtggtgaggaacaccgcgcccagaatgatcaccaatgcgaaacggcaggcgtacagcacggctatggccacgccctgatcggtgatgctcagcgggcccagcgccaccaccggcgtgccggtgcgtaccacaaacagattgaccacgcccatcagcaccagcagaatcagaatcggatgaatggattcgagcacccgtaacgggttcaggcgtgccgccgcgataacggccagggtgatggcgatgcccagcgcaagctggaggggtgtgttcaccgcgaacatcgtgaacatggcggccaggaagcccaccatcttcacgcgcgggtcaagtcggtggatcaccgagtgcgcgggtttgtcaggggagacggactcggcggggaaggcagtctcggttgccgagatgctctcagcaccagccgcgccggcaatcggcatacgtaccacgcgatcggcgatatgcttggcctccgctcggtcatgggtgatgatgagcacggtcacgccgcgcgatttgagcgtgcgcaacagctcatggatgcgctccttggcctggacgtccaggctcgcggtcggctcgtccatgatgagcacgtcaggattgcaggccagcacgccggcgatggccaccaatcgctgctgtccgccggacaggtcgaaaggggagcggtcggcaagatgcccgatatgcagcaggtccagtgattcgcgcacacggtcggccacctcggcctcggcgagcccctggttgcgcgggccgtacgccacgtcctcggccaccgtgtccgcgaacaactggtgctccggatgctgcatcacgtaacccacatgccggcgcaattgcgccaattgcctgcgattcgccggcttcggacgcgcgttgcgaccgcgtttgccggtcgaggccaccggaacgccggccacctcgatgctgccggcggtcggcgcggccagcgcgcacagcatgcgcaccagcgtcgacttgcccgaaccgttcacgcccatcagtgccacggtttcaccgcgcgcgatggtgaacgacaggtcatcgataaccgcccgtttggccgaaggatagcgataggtcagatgcgagacgcgaataatggggttcgtcatatcaccgatgccgtcggagagcagcggcagttcggagccgtcttcgcgcttccgctggcgggggctgtcgttcgtaggacgactgggggcggcttctgtgccgataccaccctcggtctcgctttgcgagacagcctccgctagcgggggtcgattatcggcggctgcagtgacaccaacgattcgcccggcctccatgtgcacgatgcgatcggcatgaacggtctcatccggatgatgcgtgacatgcacaatagtggtgccgcgcgcctgcaaatcatccaaaatgcgcataacttcggcgcgtgcggattcgtccagcatggcggtcggttcgtccaataccagcatcgccgggttcatggccagcatgccggcgatggcggcgcgctgctgctgtccgccgctcatacgggtcgggtcggactgacgcaagttcgccaaccccacggcctgcaatgaatcaacgatgcgctcgccgatgagcccgcgctccagcccgagattctccgggccaaaagccacgtcatcctccaacacggtggtgaccagctgatcctcgggattctgaaacaccataccgatgccgcggcgggcagcgcgataggcgtcggcattcgggccggctgcgtacacgcgctgttccagtagcgtcacttcgccaccgtccggcgcggtcaatcccgcaattagacgggccaacgtggacttgcccgatccattcggaccgaccaagcataggcgctcgccggcatggaccgtgagcgaaacgccatccaaagcccatgaagtgccgcggtcatagctgaaacgaatgtccttgagtacggcggcggggggagcgggctcggcggaatcgtggaactcgtcggcgtcgaaggaatggggtgcaacggtcatgaaacagcaatccgtaactgataggcgaaaacgcagaatcccggcaagggccggagttctgcgttcttgttctttgagtggtcgttgagtggtcgttgagtggtcgttgagtggtcgttagtcgtggcgggcagcggcccatctcaggccggtcactgctgcttggacagcaggttggagaccggcttgtagatcaggaaggtgatcacggcgtgaatcgccatcttagccacgttgaacggcagcagaatcggcagaatcatcgcggccacagcctggtagggcatgtgcgcgtaaatcggcgtgatgatgaggttgcccaccagcgccactacgatggccagcaccgcacccaccagaatgccgatggcggcacccttgcgcgtacggatcttacggtagatgaacgcggccggcacagacaggaacagcgccaccagcacagccatcagcgaaccccacgggtcggcgaacatgtgcggcacaaagccgagcacagacacgattgcggcggcggccggaccgtacgcaaagccggcgatcaggcagacgatgccggacgggtcgtacttcagccaagtgaccggcgtaatcgggaattcaatgaagctggtgaccatcgccagcgccacgaacagtgcatacatggcgatacggcgcgtggaccagcggccggaatcggccacaccagtggtgtgcgagccgagtttggcgctggtgctggcggtggacgcgctggccgaaccctcggcctcgggcgccacagaacgaacaacttgcatgcggatacgcgaagatacgctcataatgagccctcgtttcttccatccggactataccgttggctccggaatctcaccggatcagccgcttgcgcgggtcgcgggcttcccgccatccccgttatgaaacccggggtacaggttaccgccagtaaggaattgcaccttccctgaaactgacaggcttattcatacgccatgcgccggacgtacgcaacccgcgtttcactgtgcagaaattcgtcttgtgccggtcaagtgcaacaatgggagccatggctgaagtgaagaaacccaacaacaccatcgacaagcttgccctgatcgtcaccacctacaaacgtcagcagctgctcgaggtactgttcgattcgattctggcgcttgagcaggcaccgtggcgcattgtcatcgtggacaatgagcagtccgatcagacggcggacatggtcgctgcgtttgccggcaaggtgaccggccagtggggcaccaccgtggccgaccagtccggcaacgaagagcgcgtggtctatgcgccgcagaccgagaacctgggtggcgcgggcggtttctccgccggcgtggccaaggcgtatgatctgggcgccgcatggttctgggtgatggatgacgatgtggccgtgctgccggacgccattgccaagctgtccaagtggaccgacaagcacgaggtgattcagggatcccgattcgattacgatggcggcccgttctactggcagtacgacttcattgtgccgctgggcatcccgaacccgatcgcgcccgccgcattcggcccggccggataccgagtgatggacacgctgtgcttcgaaggcggcctgttcaaccgccgtgtggtcacggaaatcggtctgccggacccgcgcttcttcatctactgggatgacacgatgtatggctaccgcgccagcaaggtcaccaacccgattgtggtgcccgacgtgatcctgcgccgtacgcgcgaaatcggcaattgggatatcgccggcgtgcgccagctcaactccacgtccgacatgaaccggtatcacatcatgcgcaaccgcggatacatggcccggtacttcatgacctatggtgacttccgtccgctggtgtttggactgggcaccgtgctcaccgcggccaaggaagtcattcgcctggtgatggtggatcgcgaacacctcaagaccggtttggtgcagattgccaagggctggtgggactcgcgcaagctg

SEQ ID NO: 1835 - DNA, 9801 bp, Unknown
  MAG_14  MAG No. k141_47908
caacgacggcaagaacgttcagttctactacacctttgcgcagggcgctcaggtggccaaggccgtggagaacggtgatttgtccaagggctggacctccaacatcgagcagaccagcatgatgagctacctcatcacctctattctgccgttcatcatcgtcttcgctttgttctggttcctgatgagtcgcatgggcggtgccggcggcatgctcggcatgggtggcaagaaaaacagcggcaagctgctcgacggccagacccccaccaccaagttcgccgatgtggccggcgaagacgaggccgtggccgaagtcgaggagatcaaggacttcctcaaggatccgtccaagtacaaggcgctgggtgcgcgcatcccgcgcggtgtgctgctgtacggccctcccggcaccggtaagacgttgctggcccgagccatcgcaggcgaggccggcgtgccgttctactcgatggccggctccgacttcgtcgaaatgttcgtgggtctcggtgcctcccgtgtgcgtgacctgttcgatgaggccaagaagaacgcccccgccatcatcttcatcgatgaaatcgatgctgtgggccgcaagcgtggctctggcatgggcggtggccacgacgagcgcgagcagacgctgaaccagctgctcgtcgagatggatggtttcgacaacgacaccaacctcatcatcatcgccgccaccaaccgccctgacgtgcttgaccccgctctgctgcgtccgggtcgattcgaccgtcaggtgggcgtggccgcccctgatctggaaggccgtgaggcaattctgagggtgcatgccaagggcaagccgttcgtaccggacgtcgacctgcacatggtcgccgtgcgcacgccgggcttcaccggtgccgatctggccaacgtgctcaacgaagccgccctgctgtgcgcccgtgccggtgcccagttgatcgacaaccgcgccatcgacgaggccatcgaccgcgttcaggccggaccgaagcgcaagtccaagggcatggctctggaagagctgcgcaacaccgcataccacgagggtggccatgcgctggtagccgccgccctgaacaacaccgacccggtgaccaaggtgacgattctgccgcgaggccgcgccctcggctacaccgccgtcatgccgacctccgaccgctactcgcagtcgcgcaaccaactgctcgaccagatggcctacgcgatgggcggtcgcaccgccgaggaaatcgtcttccacgacccgaccaccggtgcctcgaacgatatcgagaaggctacgaacatcgcccgtacgatggtgatcgaatacggcttctccgacaagctcggtgccatcaagtggggttccgacgatgaccagaccactgtgatggacggtctgcagccgcgcaagtactccgatcgcaccgccgaagtgattgatgacgaggtgctcaagctggtggagaccgcgcacaccgaggcgtggaccatcatcaacgacaaccgcgagatccttgacgagctggtccgccagctgttggtcaaggagaccctgaacgagaaggaacttgcggcgatcttcgcgccgatcaagaaggctccggtccgcccggtgtggctgtccaacgaccgtcgccccgactcggacaagccgccggtggagattcccgaaagccttaagcgctcggtcggcatgaagccggaagagtagacacgatgacgattcggcccgacctgttcatgtggtttctcacgtacgcaggccgggccgacgtcgttgtggacaatgacaagggagagatgagatgaacgaatatatagagtcttgccagcgggagaaacgcacatacgacgaggaaggcgtgcgcgaagccgtacgcctgttcctgaagtcgattggcgaggatcccgagcgcgaggggctggtggaaacacctgaccgtatcgcccgcgcgtgccgcgagctgttcgccggtctgcaggcttccccggccgatgtgctggagaagcacttcgacgtggataccgacgaactggtgctggtcaaggacatcgaactgtattcggtgtgcgagcatcacctgctgccgttccacggcgtggcccatgtgggctatattcccgccaaggacggggtgatggggctgagcaagctcgcccgactggtcgaggtgtatgctcgccggccgcaggtgcaggagcgtttgacccagcagatcgccgacgcgctggtcgagtatgcgggcgcacgtggtgtgattgtggtgaccgaatgcgagcacctgtgcatgtctatgcgcggcatcaagaagtcttccgcccgcacggtgacctctgcggtgcgcggcatgctgcgcaatccggccacccgagccgaagccatgagcttgattcttgacaagtgacgcaacctaggctcccctctctgaggggagctgtcgccgtaggcgactgaggggagcgaagggaaacaacgaaggggagataacctatgactgatttgcaggcgttgcatgacactacgcacaccatggtgatgggtgtgctcaacatcaccgaggactcgtcctcggacggcggcctgtggctggacccggccaaggcggcccagcacgggcgcgacatgatggccgccggcgcggacatcatcgacatcggcgccgaatccacgcgccccggcgccaagcgcgtgtccgaggccgacgaattggtccgcatcaccggtgccgtcaagacattgattccggccggtgccatattgtccatcgacaccacgcgcgcatccgtggccgccgctgcgctgagcgagggcgcccagatcatcaacgacgtctccggtggcacgctggatgccgaactgccgcacgtggtcgccgaccacgactgcctgtacatcgtgcagcattggcgcggttggctcgccggctccaagggcgcgaaccccgatcaagacacctccgtctacgagcacggtgtattgaccgacgtacacgacgaactcatgcgccaagtcgacggtgtgctggccgccggcgtaaagcctgagcgcattatcatcgacccgggcctgggcttctccaagcccggcatcgagcacaacctgccgctgctgaccggactcgagaccttccgcgccaccggatatccggtgctgatcggccagtcccgcaaacgcttcatctcggcgatgcttaccgaggcgggcgctgccggtgctgatgggccgatcatggcccagcgcgatgacgtgaccgcagccttgtccgccctgtccgccgaacatggcgcatgggccgtgcgcgtacacgacgtggccaaaagccgcgccgccgtcatcgccggcaacacctggcgcgaatacgtatgattcccctggctccctgttttggttgcttctaggtcttggctcccctcgggcgaggggagctggcgccgaaggcgactgaggggagcatttgagcagaaagccttaccaatggacaccatcacacttaccggcgtacatgccaacggcacccacggtgtgctcgcctttgaacacgaacggccacaaaccttcgtcgtggatgtcaccctgcaccttgatctggccgcagccggtcaatccgacgatctcaacgacaccatcgattacggccgtgtggccaaggatatcgcggctgtcatcgaaggccctcatgtggacctgatcgagcgtctggcccaacgtatcgcggataagatccttgccgatgcgccggccgtcgcctccatcgacgtcaccgtgcacaagcctcatgcgcccatcgtcgtggcttttgcagatgtatcggtctccatctcgcgcgtgcgtgccaccgataatggacgtactgctgaagagcatgccatccataacgcggtggtggccttgggcggcaatgtgggcgaggtggaatccaccttgcgagccgccgttcgggagattgacgcgttgcctggcacacaggtgactggtatctcaccgctttaccgcacggccgcgtggggcatggctgacggtacgccggatttcctgaacgccgtggtggagcttgaaaccacaatgggcagccacgaattgctcgccgcgttgcaaagcatcgaggcgaaccatgggcgaattcgtgagaatcattgggattccaggccgttggacttggacattatcgactttgatggcatcaccagcgcggatccggatctggcattgccccatccgcgtgcttggcagcgcgcgtttgtgctggctccctgggcggcgctgaatccgaacgccaaacttgccggagcccatgaggggcctgtagccgatttgctggccgccgcaccggaccgtaacgccgtgcagctcgagagcgaagactggatgctcggcgggcatgcagtcaagcaaaaatcagcgtcggagtcggcacccgtctcacgcaaggcgattatttcgctggattccacctcgcaggatgtcgaacggctgttccgcgaaaccatcgtttccatcgacagtgttcctggcaatcaggtacagggcatctcgccgctctaccatgtcagccatttcgacggcccggacgcgatgagcgcggtcatccaaatcgaaaccaagttgccgcccgccgacctgattgccgtattgggcagcatcgaaagtgttcatgatctggcagtcgaccttgaccttgtcgacatggaaggcgtgacttccgacgagcccaactgcagcattccttggccgtcggcccgtaaccatgcgtcggtattggcaccttggctggatatggacccgaatgcttctctgggcggcgacccggtggccttccttttggccatggcaccggatgccggacaggtcggattgctatcggacaactggatactgtcgaacagttgagctgatggcagaaccagttacgaacggtaggctagaaaccagacggtgacggaccagtctccggcctcgaacagccgggcacggcagtgacgaaaaccaaatcaagatgaacagcccaggcgcgagggccgttcgcaaacagcaaacagcaacgcaacgataaggaggccggacatgaaaacacggcgaacaccatggtggcagtatgtgatcggtgccgtgctgggcctgttggcgggtatcggtctggcctcctacggcgaaagctcgggactgtcgctgattggtgcgccttggattgtgaccggattgctggccgtgctgggcgttatcgtgctgatcttggccctgcaagtgcataaatacgcgaataccgaccccaagaagcgtccgcatagcttcatcaatcccactatcgcggtgtatacgctggtgctggcaaaggcactgggattggcgggcgcaacgctcgccggctggtatggcggtcagattgtgatgagcctgagccatatcgaggcggatttctatgcacacgccgtcaccgagtgcgcaatcgcggccgtggtgtgcatcgccgacatgatcatcggcattatcggcgaatggttgtgccagttaccgccgaacgaaggccccgaaaacccgaaaatcaaggaagccaagcgccgtagcgacatagcccaggcctacaaaagataatccgtgataagccccctctgacgagggggccgtaggcgtagccgactggggagagaagaagaaaaaccacaccatcggccaagccgattcccgctattcctgcggcacgcgaaccatagcttcctgagcgatggccgccaccaagtcgccattctgcgcatacactttggcgatgccgagtccgcgtccgtgcgcggcgataggcgtatcctgcacatataaatgccattcgttgatatcgatatcctgataccaccacatcgaatggtcgatggacgcataggaaatgcccggtgtggaaatcgacagtccggcgcggcgcagcaccggctccatcatcacctgatcgcagccgagtgccagcatcgcacgatgcatgacctgcggcacatcgacgtggccatcggccttcatccacaccatctgcttgccggaatcatgctcggcggaatccttgtctgcgcgcagcatcacggtcggcgtcacgtggcggatatcgaatggcgatttctcgacataaaaattggcgaacggcgacttttcggcgaacggctgcatgagttccttggcggaagtcaacgtttcgggatcgggcaggttttccggcatcggatcggcaaattccacaccctcctgaccggtctcttggaaggaggcgatggccgtgagaatcgacccctcggcttgggtgacgttgacccgacgagcggagaacgagcggccgtcgcgaaggttctcgacgtcaaacagcaggtcttgacgaatatcgccggcggcaatgaaatagccatgcaccgaatgcggcaggcgtgaagggcccacggttttggacgcggcgatcaccgactgggcgatgacctggccaccgtagacgcggccagtggggaagtacatactctcgccattgatgtatgtgtgattgcggtaagcggaaggctcgcccaacttcagcaccttcaccagatggtccaatggagttacggtggttgcctgagccatggcgttcctcgattcctgttctgctgtgttcgatattcggttatcgtattccaacctatggttggcagtctatccggtgggggttaagagttccgggagcgaaatgtaacgagactgtttggaaggtaaacggttggttatgcggtgcgttgccgctacgttgctgctacgttgctgctgcgctgccggtgcgttgccgtaggtgactgtgggattttatgggatgcggggcggggcagtcatgggggcaattatgggaaagccgcccctgagggacggctttcgacgtataaagcgcgttgtggcactaatgccggcgtatctcagccgcgcacaagcttcttgtgcaggcggtgcgggcgggccgcatcctcaccgagtcgggccaccttgttctcctggtaggcctggaagttgccttcgaaccagtaccacttggccgggttgtcgtcgtcgccttcccacgcgaggatatgcgtggcgacgcggtcgaggaaccaacggtcgtgggagatcaccacagcgcagcccgggaactcgagcagcgcgttttcgagggattccagggtctcgacgtccagatcgttggtgggctcgtcgagcagcagcaggttgccaccctgcttcagggtcagggccaggttcagacggttgcgctcaccaccggagagcacgccggtcagcttctgctggtcggcgcccttgaagccgaagctggccacgtaggcgcgggtcggcacttccacgccggccacctcgatgaagtcgaggccgccggacacggcttcccacaggttcttgttcggatccagaccctcgcggttctgatccacgtagctgatcttgacggtgtcgccgatcttcagctcgccgctggtgagcggctcgagccccacgatggtcttgaacaacgtggacttgcccacgccgttcgggccgatcacgccgacgatgccgttgcgcggcagcgtgaaggacaggtcgtcgatgagcacgcgatcgccgaaagccttatggatatggttggcttcaagcacggtggagcccaggcgcgggccggccggaatctgaatctcggagaagtcgagcttcttgttgttgcgtgcctcgttctccatctggtcgtaacgttccagacgggccttgttcttggcctgacgggccttgggggaggagcgcacccagtcgagctcgttcttcagtcgcttggcgagcttggcgtccttggctccctggatctccagacgcttggccttggtctccaagtaggtggagtagttgcccttgtacgggtacaggtggccgcggtcgacctcgcagatccattcggccacattgtccatgaagtaacgatcgtgggtgacggcgatgacggcacccttgtactggtgcaggaactgttccagccacaggatggactcggcgtccaggtggttggtgggctcgtcgagcagcagcagatcaggggcctcaagcagcagcttgcacagggccacacggcggcgctcgccaccggagcacacgttgaccggggtgtccggatcggggcactgcagggcgtccatcgcctgctcaagctgggagtcgaggtcccagccgtcggcggcgtcgatctcggtctgcagcttgcccatttcttccatcagcgcgtcgaagtcggcgtccgggttggccatttcttcaccgatctcgttgaatcgggcgaccttctcggcaatcgggccgaacgccatcttgatgttctcgcccacggtcttggtgtcatccagcggcggctcctgctgcaggatgccgaccgtgaagcccggggtcagcgtggcctcgccgttgctcacggtctccaggccggccatgatcttcagcagggtggacttacccatgccgttcgggcccacgacgccgatcttcgcgccgggcaggaagctcagggtcacgtcatcgagaatcacgcggtcgccgtaagacttacgggccttgatcatctgaaatacgaattctgccatatgttaccttatcgttcaagaaacgctgattttccaacgttttgcgggacccggaccccgcaatgacaccaatggaaaacgacgcaaccgtttacgggggtgtcccggacggcccgttgtgcgtcattcgctgttgtggttgtcccgtgtcatcgccggcgccttggtcctacgcaaaagcaccttgtggattatcccatatcccgtctacacgatgcaatggggttctggcgggcgggaattagcgattcggtcatcgggaggagacgtggaaggtggcggcgatgccgtcattgccgacgccggtaaatgggcgctgggcatgccctgtttcctgagcgagagcccggccctgtatcgtctggcgatttgtcgatcgttgcgattccggcgttctgccgggctttcatttcgaaatgacgcatctggaatagtgcggccgtctttggtgctcctctcttcagtgatccgccgaggttacgcccatggctgaacgcccggaatgtcccgcgaaatccggcgagacggtctaggccgcggatgtaccgtgaatggcgcataggcgtgtcggtcgccgcaatcatggcaatgagaggaaaccccgttatggatcatgcatcccgatttcagcatcagactcaggccgatgcgtcttcgatctcttcaacgaatccgacggcctcgtcgccgctgcccacccaggcgccgccgtggggcgcgctgtgggtgatggccctggggttggccatgatcgtgctcgacagctcgatcgtcaacgtctccatccccaccatcatcgacgacatcggcattaacctgaccgacgcccagtgggtcacctcgctatacaacatcgtgcttgccgcgttgctgctgcctttcggcaaacttggcgacgccagagggcgcaaactggtgttccaagtcggcaccgtgatcttcgtggcgagctcggtgcttgccgccgcctcgcaaggcgcggggatgctgctgggcgcccgtgtgctgcagggcatcggaggcgcgatgatcatgccgaacaccctgtccacggtgtccgccctgttccgtggcaagtaccgtgccgcggcgttcggcgtctggggtgcggtgatgagttcggccgccgcgcttggcccgctgctcggtggcgtgttcaccgagactctgggatggcgttggattttcctggtg

SEQ ID NO: 1836 - DNA, 7224 bp, Unknown
  MAG_14  MAG No. k141_49515
ggaatcggcgtgcggagcgtaggtcggcttgttcttgccgcgcagcaggattgcagcctgggtggcgagacggccgagcaccacgtcggtggcgtcgatgacataccagtcatgagtcagatcagctggcttcggagtgaaagttttcactggattaccttttctatattgtgttccgggtctcagctgcttggcgtggcttggtcagggccgcatccaagaggcatcgaacctcattatccgtgggctccctgaaagtcctcgatggcgagtgggatagcgctttgaaggaccccttagggaaacacaacaatccactagtatatcgccgggcttgacatagggcaactggggacactccattgggtttatggcttctcttcccctatttatggtttctcttccacccacttcggctaaccgactcgcctacggtgaggcaattccctgccttctctcagctatcgcttcgttcaggcctcgtctacggacagtccactggactgtccgcttaacgactcggctcgtcagagggaggtaaagtgggtcaggaattgaagatttgggcgaagcgttggacgccgggggtgtcgaagagggtttcgagcggtaccacgttgcccttggcgtcggccagcgggatgcgccagttcgggtattcgttgttggtgcccggctggttctgcgcgcgcttctcccccaccgcgtcggtgatcgaggcggcgagcagcttgcacggcgaacccttcagtgcgcggtacagcgcgtcgatgatatccgcctcgtgatcctcacgatgttcggcgaagtcggcatcaagatagccctgctcgaccagcatgaccagcatcgcatcctgctcggcctttgcggaggcttcgaattcctcagccgggccggtcagcaagcccagacgctcacgaatcttgacgtgctcgtattccaggtaaccggcggtcggcggcaaatcgtgcgtattcacggaggccaatgcgtacggacgccactgggagggggcgcggaacacgccgtcgcactgctcgaaccattcaacggcgcaaccgagaataccgtggctcgacagggaatcggccacatggtccggcaccacgccgaggtcctcacctacgaccacgccgccggcgcgagaggcctcgatggccagaacgcccagcatgatgtctgagtcgtagtacacataagcgccatccatagccgaccggttctcgggaatccaccacaggcggaacaggccgagaatgtggtcgatgcgcaccgcaccggcacgggcgaacatgccatgcaccatattgcggtaggtctcgtagccggtggcctccagattgatcgggctcagcggcggctggctccagttctggccttgctggttgaacatgtccggcggtgcaccgaccgtggctcccttggcgaagcgctcgggattccaccacacgtcagcgccggaggggtgcacgccgacggccatatcggacatgatgccgatatgcatgccggcgtccttggctgcctgctgggcggaggacagctgctcggcggcaatccattccagccagcggtagaagtccaaagtgtccgggtactgcttgcgcagattggcgatttccggggagttgcggttgaacttgcgctcccagttgctctcctcgccgttgggtgctccccacttgtcgtagcacaggcaccacgtggcatacgcctccaagtcggaaccgcagtccgccttgaattggtcgaacgcgctttggcgttcggcggtacggccggccttgaagataatccacagggcgtgcatcttgctgcgccacatggcgtcacggtcgatgagctgggaatcaccgttcagcggttcggtgtcggcatgcagtccgtcgacggcgttcttgtcgcccgcgctgagcgtggcatattcggcgatcgcctcggggcggatgtacgtgaagttgatcaggcgacggcttaccggcagatacggcgacggggtgagcggggacaccggctcggcggcatgtaccggattgatgagcacgaagtcggcaccggtcttctgcttggcgtccaccagcatggtcttcagatcctcgtaatcgcccacgccccaggagttggaggagcgaatcgagtacagctgggccatccagccccacagactgccgcccttcatcgggtcaagcagatcgacgcgatcaggtgcactgatcaaagtggcgtcttgcacacggtcggcgaccttgacgtgcagcgtatggtagccaatcggcagatcggcgggaatgaccacagccgcattcgaaatgaacgtgccatccaagtcgtaggcctgggatccatctccaggaccaacttcaacggtgccctgatatggctcgccgttctccagcgtgatgctcgccgaaggcacgtccagaatgccggtgttcaccagcacccggtcctcgctaccggcgatatgcagcacggtgggtgccaccaatcgggagtaacgctcgttcagaatgcgtcggatggcgatgagttgggcgttctcgctggaggcgtcgatgcccagcgctgccagcacctcgatcaggacgtcatcgtctatctcgtggtagtcatggctcatgcccacataactcgtgccgacaccgaccaacttggccagtcgaatcaacggacgggccagacgctcttcactctcggtaatctcactcatagccccagtctaacgccgtttgattgcgccacaccgtaagcaaaatgccgtgattccgccaaattatgtactttttaccctcacatagtgagatgtgagcgctcacaatggtggatagagggtgattgccggccaaatttgcacggcaaaacacagcaatagtgtgcttagcggcggctttccacggcgtgccgcacctcggccgaggggtcgttggccaatttggcaagcatcgcttcggacgtattggggttcagcgccacggcacggcggaccatcgaggaaagcaccgccggtgctccctcttcggattcggtgccaagtacgcccaagaaatccaatgtctccgcatccgcagtggggtcctgcgcaccctcaagccgcatcttccagctggtgcgcttgtttttcaacgccgtatcccggaccgcaggcaccgggtccttggtcaggcggccgaccagccaattcttgtcatccccgttggcggccacggcttggcgcacggacggttcggggtcttcggagagtttgaccaatacgttcgggaacggcatggtgtcggcgaggaacacgcgatcggccaccggggtgtgcgggttgccggccacagcctccaaaagtgcggtggcgcgggagaacgccgcctgatcggcacggtcaggcaacggccgacgggcgaattcggacagttcggccgggtcggtggaatgacgcagacgctcgtatgtagcggtcagcggttcgaaatccaccggagcggcggactcggctgcggcctgcgcgccttggtcccgctgctgggcgcccgtgtcgattgcagcctcagttgcggcctcggtgggctgggtctgctggctggtggtgttctcgtcggtcatgatgcccagcttagtcatacaggcgtcacgcgagcggaaccggaatgttgaccacgtcaatcggatccggcaccaccgcggcattgaacgcttcccgcacacgctcctcgaatcgcacgcaatcatcttgcggcaccaccgcggtcaactcgacgttcaccgcatacgattcatcctcctggttgccaccgagctgcgccaggatctgctggaatcgggccagctgcgggtattcgagacggacccggtatcgcttggcggtcatgatgcgggcggcgcgggcggctttcatcgccaatgatgcggcggatgagtacgcgcggaccagaccaccggagcccagcagaatgccaccgaaatatctggtgacggcaaccacgcaatcggtggtgccggactgcttgagtacgtcgagaatcggcttgccggcggtaccggacggctcgccgtcatcgctcatgcgttcggacagtcgcccatccgcgcctccgcacaaggcggcatacgccacgtgtcgggctttcggatgctgctcgcggatcgcggccacgaacgcgagcgcctcgtcgagcgtatcgacatgggcagcgtcgccgatgaattcggactttttttcgacgagcgaatcgtgggcgggatcgtcggacgtgttgagaatcgtctgcataagcgtgttccggtggtcggctgactgggtgttcgattgagcgcgaggctagacaggactatcagtgttcggagacgacgacgttatagtcctcgccggcgaagtaggcggtcaggcaggcgatcatctggcgggtgagctccttgaacgcgccgtcggtacgccagccgacgtgcggggtcaggacgatgccgggcacatggcagatggcgtcgtcggcggtcagcggctcgtggtcgaacacgtcgagtgcggcgggaacatcgcccttttgcagtcgggcaagcagcgcaccggattcgatgacttcggagcgggcggtgttgatgaacagggtgccgggcttcacatgcgcaaggttctcggcggtgacgatgccgcgagtggcgttgttgagcggcagatggacggagatgacgtcgctggtttcgatgagctcgttgagatcgtcgaccggagtggcgccggagcgttcgaaatgctcgggcggcacatgcgaattccatgcggcgacctccatgccgaaggcgcgggcgatgccggccacggtggcgccgatgccgcccagtccgatgatgcccatgcgacggccggcgagttgcagtccatcgccgccggcccacgcccagttgccggccttgacatccttatcgagttggccaacgcggcggatgagctcgaacaggagggcgaaggtgtgctcggccacggcgtgatcgccataatgttcggcgttgcagacgcggatcttcagctcgcgcgccttatcgagattgatgtagctggcgacgccggtaccgcagaacacgatgcacttgacgtgcccctgctcgctgatggtgcgcagcagatcatccgaaatgtggtagccgcccaccagcagggcgtcggcatccttcagacgctcggctatggtcgcctcgtcggacgtgaattcctcgaacatacgcacgcgggcaacgtcgtggagcgcggggaactgggccttgatgggctcgatcatcgcgtcgagcacggacggcatcacgacgaggggcagatcggtgcgttcgctttgggtttcgtaaatctcggtcatgggctccacattaggaggccgacgggaaaagcgtcaccttgcggcttcccctccttgagaccaagccgagcaactattgctttgccgcctgctcctgcgtgatgttccattccttgacgacgttctggtccgcgcccatcgaatagatgacatcccagatgcgttggcgtatctgagcgtcgtaggcttcgtcccaacatgtgcctatgggatggtcgctggatatcgggcaccattggtagttgccttgatgcacgttggcggtgggcacccagtcgatgcggttgacgcgccacgaccccttgacgcccttcttgccggcgaactggatgcgtgcggtcacaccctggttgttgaccaaggtttccggcgtgttcgccgactcggtgacggtgttgcccagaccgtagacaatccacgtgccgttatagttctcgatgggctgcgcacaatggcagccggcaccgtagataacgtcgaaggcaccagtgtcggcaagctcatgggcttccgaaatctgccaggaatcggcgtaatcaaggtattcctgcaccgagtgcatggcgatggccaccacatcggcaccttgctcgcgggccttgttggccttgtctaccgcgcgctggatgtcgctgccgtgattcgggtcgccgtcttcgcgcagacgatccacctgccagtcctcgtcggcggtcatgccgttgagggagaccgtgccggtgaccagacccagcttgccgccgccggtcggggaatcgatgactaacggtttggtggagtcggcttcggttttgtacgagccggtctgggcgatgccatcggcctcaagcgtgtcccacagacgggcgatgccatccgccccctgatcccaggaatggttggtggcgtgtgtgcaggcgttgtatcccacgttgcgggcggcatccgccacttccggcggaatgttgaagatcgggtacgcggcatatgggccgccgcgctgggcgatcggggtttcgaattcgcacacggcgatgtccgaagcctgaatgtactgcttcatcggcgcgaacagcgggtcgaagttgaaggcggtgccatccgtggcgttggggttcgggccttggaaatggctccacaatccctcatggaacaacaaatcgccgttgaccagcatggcgatgcagtccgtatccgggcaatccggtgaattgccgtgatgttcggtcaccggtttgggcgtgttcttcgctttattcaacgcgacgtccgacactccggcgcgtgcggggccattgccgtccgtgcgatgggttgcgaaccatgcgccgatgcccagcgtaacggcgagcgcgatcacgaacacgataatcagcgccgcacggttggttcgtgtcgagttggagcgatgttgcccctgcccagcgatatggctcatctttgcccgcccttcggaactcttcttctctctctagtgtaccgcccatctcagtcaaacactgcggggaggaaggcgatgggcaagcgattggacaagcgacataaaccggttaatcttcaatcaccattcacgaacaccacgcaaaagtctcacttagtggacattcttctttcgtttgttagcctttccccgaggtgccgcactcgttcacccgctaaaatggcggtttggaggcggacggacaatggcgtacctccgactccgcttatcacaagcggagaccgaccgtcctcggttatttcggttacttctagcgacacattcccaggaaagtttcgcaaaacagacccccaagcaacccactagaaacacattcccaggaatgcgtcgcaaaacagatatccggacaacccaccagaaccgtattcccggggttcgaatccctctgactccgcgaagtgcgaa

SEQ ID NO: 1837 - DNA, 4113 bp, Unknown
  MAG_14  MAG No. k141_49779
cggtcagttttcttcggcacgtacagcgagcagaagtagtcgatgttttcggtgacggtcagttcattgaacacggccacgttctgcggcacgatgccgatacggtgcttcagcgcgtaggaggtcggcgtcatcggctggccgaacacgcgaatcgtgcccgaatcgtaggtgagcagcgcgaggatgcagttgatcgcggtggttttgccggacccgttcggtccaagcagcccgaaaatctcgccctggttcacgtcaaggtcaaagtagtcgagcgccaccatgtcgccgtagcgtttgaccagttggctgacgtgcacggccagggccgggttggttgtcgagtcgtgttcggaagctctgttgtcggttgccatagccactcccttccttggtgattccatcatcccaagaaggggccagacgccgccacaggcaaacgtcacgacttggccgcacaggcgtgacatttgtcattacagtccttcggcgtcggtctgcatggccttgtacaccttatcgaccggcatcaggctgatctcgtccatcgaatagttggacgccctgtggctttgcgcaatcatcggtatcatccctttacggttgtgtcgacaacatccgacgcttgtgcctcatctattcgggaagtgtaggcccgttgtcttggaccgtcatgcgggtaattccgcacgcccgtcaagttcgtcgtgttccgcacaccgctagactggtggtggaagagcgtcgagccggggaggtgccatgcgcgtgttggccgagatgggcttgctactcgtgttgggcctggctttggcctggcttgtcggggtgcggctcgatggcgtgttcatcgccggcatgctgttggccgtttccgtcgccggattggtggaatggctgcgtcccgcgcaatggtcttgggtcttgtgtacggcgtatctcgtcatcgccgtggcggtgccttcatggtgcgcgttcatgccgctcatcgcctacgatactgcacagctgccggccctcgcctcgaccggagcccgggctggggcacggactgcggcaagcggccgctcccccagtgtctcgcggaccgcggcctctcgccgttcccttgccgatgcaatacgttcggccccgtggctttcggtcgccgcgcgctggatatgggtgttgccgccgatcgcgctctggttcgcccgtggcaccgaccgtctccagacgctggtgatgacgatggtcgccctgcttggattcgttctgggccgggcccgcgcctcctcggacgaggcgcggcgcgcgttgctgcacgcgcaggacagggcgcgcgaatcctcgcgggccactcgttcgcgcatcgccgacatcgatgaggaacgcgcccagtcgattcgcatggcgaccctcggcgagcgcacgcgtatcgcccgggagatccacgacaatgtgggccatctgctgacccgcgcgatcatgcaggcgcaggccggcaggacggtggccgaggcgacgaacgatacggtcgctgcgcaagggttcgccacgttgggtgcgacgttggatgatgcgatgacgatggtgcgccgttcggtgcatgatcttgaggatgacggcactgatttcgccgcgcagatcgatgatgccgtcacgtcgttcgacggcatctcccccggtttcgccgtgacgctggccaacgacatcgccaaggcgcccgcgccggtctcgcgctgtttcgcgaccgtgattcgagaggcattgtcgaacgtggtgcatcatagtgcggcgcacgaggcgagcgtgacgttgcgcgacttccccgcgttctggcagttggtcattcaggatccggggccggccgtgtccgagtccgatgggtcccggacggccgctgcccgcctgtgtgcgatgtgcgccacgcgcgtcggctcgcgactcgccgccgacggcgttgccgatatgcgcggttcggccgatgagctgatgcgcggcatgggtttggcggatatcgaatcgcgcgtacgcgcccttggcggcaccgcggtctgcgggccgtatgagggcggctggcgtgtgttcgtatccgtgccgaagaagcgttggaccatggaatcgagggattgatgagaatcgcaatcgtggatgatgatccgatcgtctgccagtcgttggagacgattctgacggccaccggcacggccgaggtgctatggacggcaaatgacggcgacgccgccgtgcgccgttacttcgagacgccggcgagccgaccggacgtgctgctgatcgatattcagatgccctgcaccagcggtttggatgccgcgcgcgaggttctggccacggacccggccgcgcgcatactgttcctgaccacgtttgcggaccagtcgtatatcgcgcaggcgatggggcttggcgccaagggctatctcatcaaacaggatgtggcggcggtcgggcctgcgctgcaggcggtgatggccggtcaggtggtgctcggcgcggaagtgctcggcaagctcaccgaacggactccgaatcctgccgattccgacgattccagagataccgccgattccatcgagggcctgcttggcgagcgcgaacgtgagatcaccgcgctggtcgccgagggcctcgataaccgcgacatcgccgccagactgttcctgagcgaaggcacggtccgcaatcgcatcagcgcgatactggacaagctcggcctgaccaatcgcacccaactcgccatcctctggctcaacgcccatcggtgaggggcctttggtcaagtaggtctctccctccgtcatcgcttcgcgatgccacctcgaacgcgattcaggacagcttgcagctgacctcttattcgctcgttgtcactcacccttgcctaaaaacacctccggcgttttcttcacggctcggctcatcagagggaggttgtgaaaaaccaacctcagctgtttttcatgacgatactgtcgatggtgttggccacgcgctcgcagtcgtcggagcactgttcgaggtgacggtacacgtcatgccaggcgaacacctgcagcggatcggtgcaggtggtgtgcagcgtgcgcatcgactcgatgaacaggtggtcggcgtccgtttcgatcgtgttgatggcgaacaccagttcgcgcaacgtcttggaatgccggaatcgcggcagttcgttgaccagctcgcagatgctttccgtggcgcgcaccaccatatccgacatctggaccgcatcgtcgcgcatgtcggtcacattgtcgtagtacatgcggttgagtacgccttcgatgctgtcggtcacatcgtcgagcacgtggccaagctcgtcgatgtcctcacggtcgaacggcgtgatgaacgcggtcaccagttcgtccatcatgtcgtggcgcacctcgtccgccgacttctcaatcgcgtgcatgctgtccatgcgttcgcgcagctggtccggattgaagtcgtgcatgacctcggacagcagcttcgcggcctggcatgcgtagtccgcgctgcggaggaatccgtcgaagtagaacgcgtctttttgtctcgccatgatgggtggattcctttctagaacacgaccatgaacagtttggccattacgaagctgatgagaccgcaaccggggaaggtgaacacccaggtgagcatcatgtcgcgcaccacgccgaagttgatggcggagaggcggcgtaccgcgcccacgcccatgatggcgctggtcttggtgtgcgttgtggagacggggatgccgagcacggtcatgacgagcaggcacagcgcgcttgacagatcggccgagaagccttggtatttctcgagtttcaccatgtcctggcccacggatttgatgatgcgttcaccgccgacggacgtgcctacgcccatgatggtgctgcacagaatcatgagccagaccggaatcatcacaccggtcacgctgggttggccgttgcagaacgccatgccgaggaacagcacgccgatgaacttctggccgtcctgcgcgccatgcatgaagctcatggccgccgcgcccacgatctgcgcgtaggtgaagaacccgttggtgcggcggcggtccatgcc

SEQ ID NO: 1838 - DNA, 2957 bp, Unknown
  MAG_14  MAG No. k141_49835
agaaggccggcgtgaccatgtacctcaccggcacccgccacttcttccactgatcgggactctctgaggggagcagctcagccaaaacgcacaaaggtgggattccgcctgacccgtcaacgggtccaagcggaatcccacctttgctattcgcctgctattgtggtcacgtaaccgttcgacagaaggaatcgcaacatgcacaaccatccctatgtatccgaagcgcatgagggcaagccatggtttgaatggtgcgtactcggcgtcgtcgccgtcatcacactgctggttgctttcggatatacgatggccgccacggtcatacttgccgtgacggccatcatcaccgggcttgttcgcctgattcttcaggacaaaagcccatggaaagtgcgctcagtggcgttcgactccttcatcggcatcgccttgggaatcggcctgctgattacctacttcagcttctttggactcttcggcaacatctttttccgctgaatcgccatcagacgaggcggcctgatcgaagaattcgccatcgtcgagcgtgtccgcgttcgcatcggcatccgtctgtggaagatcggcggcagccggcactttgggagtggtcatcatctgcgcgatgatcatgaccaacgccaccacagcggcggccaagaccgggctaatccagaacacccacagctgttgcagcggattttgcgtaagaccctcattcatcgcggccagtgcgataccggtggaacgggcgggattgagaccggcaccggtaaccgggtagctgatggcggcggccagaccataggcaagacccatggcaatgacatgacggtccgaggactcgccgtgatcacccagagaagacatggcggtggcaacgacaatcagagaggcaacgacctcgacgacaatcgccagcgtaatcgagaacgtaatgccatactgggtcagcagcgagtaagacacggagccgttctcgaaaccgttaacggccggagtcagccacactttggcagctacctgctcggatgtgggcagcagcttgaccacggcgaagccggcggcgatggcaccgatgacctgagcgatcacatagaggatgccatccaggattttcgtcttggaaaccagcacggaggctacggtgatggccggattcagctggccaccggacacgcgggagaagatggcggtgactgcggcatatgccaagccggtagccaacgcgaagaacacgatattgatgccatacacggccgaaccccatgtggagaaggcgtaaatggcaaagcacagcaggaagctgccggccaattcggcgcacacgcgcagggccagcggctgttgcttggtttcttccatgattgttcattccttttcatctgttggaagacgggcgaacccgcacaaacggttgccagtctagcagcagtcctacgttgcggtatgatatataggttggaattggctgggattccagtccgccaactctgaagtatgtatacaaatcgacagtctctgcgatgacagagtctgtccggccacgttgggagaacgatgccaaacgcatattcccgcgctgcgaaagcgcaagacgattccaattccattcgactccagaagctgcttgcccaagcgggattcggttcccgccgcaagtgcgaggacatgattaccgaaggccgtgtcgaggtcgacggtgaactggtcaccgagctcggaactcgcgtcgacccccataagcagcaggtgcgcgtagacggttcgcgcgtacgcgtcaatccgaaccacgtcactctggcactgaacaagccccgcaaggtgctctccgccatggacgacccgaagggccgctacacgttgcgcgacatcgtgggcgacaagtacgagcgcatcttccacatgggccgtctcgactacgattccgagggtcttatcctcatgacgaacgacggcgaactctcgcagcacgtcatgcaccccaagtacgaggtcgaaaagacctacgtcgccacactggaaggcaagatctccggcaccgtatgccgtcgactcgtgaccaccggcgtacagctcgacgacggctggatcaagctcgaccactgcgcgatcatcgactcctcacgcgaccacacgatggtcaaggtcgtgctgcactccggcaagaaccgcatcgtgcgccgtatcttcggctcaatcggcttcccggtcaagcgcttggtgcgcacccagatcggcccgatcaaactcggtgatttgaagcccggttcctaccgcgtgctgtcccagacggaagtccgttcgctgtccaaggaggttggcctgtgattcgcgttgccatcgacggccccgccggcgtgggcaagtcgtccacgtccaaggcgctggccaagtatttcggatacgcctaccttgacacgggcgcgatgtatcgtgcctgcgcttggtggtgcctgaagcagggcatcgatctggacgccgaaaccgtggatgagcgtgtcatcaccgaagcggtgggcgagttcttcaccggcgaccatttcgatatctccgtggacccggacaacccctgcgtattcgccgacgacgaggacatctccgaggccattcgttcctccgaagtctccagccatgtctccaaggtgtcgaacgtcatcccggtgcgcaacgtgctcatcgccgcccagcgcgcctacatcgcccgcgaggcgtcggccgactccttctccggggggttgggcatcgtggccgagggccgcgatatcaccaccgtggtgtccccggacgccgaggtgcgcgtgctgctgaccgcccgtgaggaggtccgtcaggcccgtcgcaccggccaggctgtcaagggcgtgggcgctgaggatgtggccgcgcgcgacaaggccgattccaaggtcaccagcttcctgaccgccgccgatggcgttaccaccatcgac

SEQ ID NO: 1839 - DNA, 3289 bp, Unknown
  MAG_14  MAG No. k141_50236
cttcacgttcttggtcaaagccttcgcgatctcgaccaactgctgcttgccgacaccgatgttcgagatcagggtgtccgggttctcgtccagaccgaccttcctcatcacgtcgtacgcgatgcggcgctgctcgtcggcatcgatcgcgatgccctttttcttctgattgcccaggaagatgttctcctggatcgacatgtacggcaccagcgcaagctcctggtggatgatcacgatgcccttctcctcggaatcgcgaatcgtcctgaacttgcaggtctcgccgttgtacacgatgtcgccctcgtacgtgccgtacgggtacacacccgacaacacgttcatcaaagtcgacttgcccgcaccgttctcaccgcagatcgagaatatctggcccctcttgaccatgatattcacatcgttcaacgcggtgaccgggccgaaacgcttcacgatatgacgcatctcaagaatcacgtcaccgttcgtagccacagttacctcctccgatagtaatgtccctgtgcatgatgaaggcgccgtaccgcaaccacgcagcgcggcgcccccctatctgttagccgttaggccgttggatgaatcgaatcagcgatcctgcggatcacaggccagcatccttggcggagatgtagccgccgtcgacgaggatttccttgaggttgtccttgtccacggtgaccggggtcagcagctgggacggaacatccttagtgccgttgttgaaggtgtcaggagccttcggatccttgccatcgaccatgtccttgatcatttcggcggtggccttggccagctcgcgggtgtccttgtagacggtcatggactgcttgccctgcacgatggcctgcacgttggccttctcggcgtcctgaccggtgatgatcgggtagtagtcccagccagcggcctctacggtgttgtaggtaccggttgcctcggcgtcgttctgggcgagcacggcgtcaagcttggtgccatcgttgtagaaggagttgatgcggttctccatctcgttctgggccttctgacgatcccagttatcgataccgatggactgccaatcatcagcagaggaaggaaccttgccggacttggactgcagcacgccggacttgaagtacggtccgagcacgtcccaagcgcccttgaagtagtagcctgcattgttatcggtcggggaaccggccatgagttcgacgttgaacgggcccttcttgccatccttcagaccgagcttctgctcgatgtactcgccctgcatcttgccgacatcctccaaggagaaggtggcgtagtagtcaacggcgtcggtgttcatgatcagacggtcgtaggcaatgaccttgccgccgttggaggcgacctgctcggcagcagctccggtcgcagtgccgtcgatggaggcgatgactacgtagttcatgccgttgttggccatgttctgaatctgggaggtctgcagatcggtcttgccatctgcatactgcagggtgacgtcgtagccgtagccttcaagctgcttcttcaggttctcgccatcgatcttccaacgctcgagcatctgctcaggcatcgaaataccgaccttgacggtgtcggagctaccgccgttgccaccggcagtggtcgtgccacggctaccgccacaggcggccagcgggatgagcatggcggttgcagcaaccacaccgagcaccttggtccacttattcatgggaattcctttcgacattgataggaacttgtttcctcttccttttggtcaggcaacccttgccgaacctgcataaaaatataccattagttttttgatttaacaatttgatatcgcctattttccccacaactgagcggattatggcatacttgattcattcgattaactaaatgtgagcggtaacaacgctgattttccggcatttttatagaccatacgaaacatgaattttatcgatacgattcgtcggaaataacgacacgccgaaactgaagccatgagatcggtcacaaaaataccagtcactgccccgacatgccgaccaaagaaaaagcccagcggcgggccgggcttcaaaggagaagagaggatgaagattcaattgtcaggccttgcggccatgactccatataaccgcacgatacataatgcgacaggcgaattggccgggaattgcatgggagtcctaggacgaaccgaaccagtcaatcaccgtgatgcatcaatcacgcttcgttgaataacgcgaggaacttggcacgccacgcatagcgtgtcgaaaccagcaccagaccggcggcggtcagtgcgatgccgattggcgcggcggccggcgcaacaaacagcaggacggcataggccacggccaacaggcagagcgagagcagcaaaatacgatgtgcgcgcatagcagtatctccattgacgttgcgtaggtacgcatggacttacaatatttagttcgttgatttaaccatatatcgaatttgttaccaatgcaaaccgaaaagggctgatttgccaaacattggcggcccggctccaacagcacctctcagcggggccgacctgccaaacactggcaaaacgaccccacacaacacccctcagcgaagccaacctgccaaacactggcagattgaccccgccaaggccattcaacaggccagcaaccagatcatgatgtcgcgctgcaaaccgtaaaccgcagattccgtcatttcgaccagataagtacttccctatcgtcatattccgccaatgggcctcgggccgaacgctcgccgcgcacggcaccggtgacatcccggtccacgataatcggcgaaccatcaggattttcgaaatactcctcaacgatgcgcggctggccaagatcagcagtggagatcaccggtccagtcgccgaccgaatcgattcgggcaacgagatggtcatccatagctcatcatcggtttcacgcaacgccaacgaagagccgtcatcactcaccacggcctcggcttcgccggaagcggccttcgcgcccgaaacataggcgttcgaagccagcaataccggctgcttcacgctgcgatacaactcctcatcgccaaggccagcctcttcaatcagctgttcatactcctcaagcgagcgcggatagccgtcaaagaacgcggttccggcttccgccataccggccgcaccggcggcatccgcggtacacaacggtttggcggaatcgtccacagccaagaacaggttgttgacgtaccgatcatcgc
